United States Patent Application Publication US 2025/0146087 A1 - sequence listing, part 2

SEQ ID NO: 26 - DNA, 1630063 bp, Fenollaria sporofastidiosus
  source 1..1630063: mol_type = genomic DNA
ttggtcaatgtaagtaaaagtatcttcatcataccaatcatggttaactatatcgtcaatagtctcaggaacaaaaaagttgaaaaattctttcttgaacgaacttccatactgtaaataatatgcacctaccatctttgtaaaattggttttctttacatcttgtggtttatacaaaagtgcttctccaacctgatttaaatcagggcttacttcaagaaaaactaaacttaaatcatcttccttatagccaagtataaaacttctgtatttataggaaacggtacgaagcactacgaaattcgtaccactaatatcttctgaataagcataaactattttatattccgaaccattatctactttattatcaaagatttctctcatgcgatttttgttttcattgctttttacattatctaactcaactgttttttttccaccaaataaattaaacaatcccattttattgcctcctatcataattttaattctcttcaaaaagccttattagtgtgcttaatatgtgaacctctttcattttcacatcatacttaccatctttaaatataaaatagcataaattaattcaatagtcaagtttttttaacattaaattatatttatattagctgtaattattcttggcaaataaaaaagctactaagttctaagacttagtagcttaatctaatctattcaaataaacaatcttcaattaattctttattctttaacttatctatccaccctcttggtatggcatcatatccatagataatacctgcaagtcctcctgtgacagcagctgtcgtatctgtatcgcctccaaggttcaccgcttttaataccgcatccttataattagctgtatttaaaatgcaccatagtgatgcttttagtgtatcaagcacaaagcctcctgatttaatctcactctcatctatattttttattaactcatcatgatatttctcgccgcgaataagttttcttgctatgtgaatgtactctatgcaagccttctttgagatctcatgagcgtgtgttatagctgaaacattggcaatgtcttcgtctgatgcatctgtaaaagctagcggaagtattctcataagagagccattgccattgtcatgaaaaccctccaagccatgttcaagttcaatagcttcgcgtgtagttccacctacatcgaatacagtgccatttgcagtaaattcatcattgtatagccatgcttcaaaattctttcttatatcttttaaatcaatgcatcctttatctttaattgattttgctgtggcaagtgtcagcgatgtatcatctgaccacgtgccatcctcttgattccatgtaccgtatccaatcatatctgtgcaaataaaagtatttctttctttgaactcgtatggcacacctaaggcatcgccaatagcaaagccatatatggcagattttaattttgacatagcttacctccataatcaaaacattttgtgtatgaaaaaagactaagcatattacttagtctttcatggcgcaccatgagggagtcgaacccccgaccttctgattcgtagtcagacactctatccagctgagctaatggtgcatgcaagcaaaaatataaaattttcttgctatggcgcgactaggaggagtcgaacccccggcacacggattagaagtccgttgctctatccagctgagctatagtcgcatagaatatattaattttattatgacataaagagccgaccttctgattcgtagtcagacactttaaagacatgatatttatgtaaaaaaagcagcaaaagaatattaagttttgctgctatggcgcgactaggaggagtcgaacccccggcacacggattagaagtccgttgctctatccagctgagctatagtcgcatgtaacgtatggagcgggtgaagggaatcggaccctcgcaaccagcttggaaggctggggctctaccactgagctacacccgcaaattttgcggtattaaaaaagaatatggagcggaaaacgagattcgaactcgcgaccctcgccttggcaaggcgatgctctaccactgagccatttccgcatatggtggaagagagtggatttgaaccactgaaagcttagctaacggatttacagtccgccccctttagccacttgggtactcttccataaggctttaaaataaaagatttggagccggcaggaggacttgaacccctaacctactgattacaagtcagttgctctaccaattgagctacgccggcaacaagatgatgataatcatcatctaatcttttactggcgacccggatggggctcgaacccacgacctctagcgtgacaggctagcattctaaaccaactgaactaccgggccatgcatggtggacgatatagggctcgaacctatgaccccctgcttgtaaggcagatgctctcccagctgagctaatcgtccatgcataaaattttattaaagaataaaaatggtgaccctaccgggattcgaacccgggtaaccgccgtgaaagggcggtgtcttgaaccgcttgaccatagggccatatttacttattaatatttttattaaattatatataaaggtctcttccgtaacttttatggttgcgggagcaggatttcattgacctaacttagtgaattaggcgctagccgtaatgaactttagtaggtcaagtgcaaccgtttttccaagagagcaagctttgcgatgctcgattggtaaaaaacgtctgctgaaccgtcttttgatagtctatttaaggacttcatatatccccgtaatcttatggttgcgggagcaggatttgaacctgcgaccttcgggttatgagcccgacgagctgccagctgctccatcccgcgatgtctttttggtgccgaggatcggaatcgaaccgatacgacctttaggggtcgcaggattttaagtcctgtgcgtctgccagttccgccaccccggcttgtttggcgcttgtggtaagactcgaacttacaacctaccggttaacagccggttgctctgccattgagctacacaagcttatttaagtggcggctacctattatcccaggtcgtctccaaccaagtaccttcagcgttaagagccttaacttccgtgttcggtatggtaacgggtgtttccctcttgctattgctgccacatttcttaataaccataattctaataagcgtcttttgatcaagttttcgacatattagtacagttaggcttaaagtattactactcttacacttactgcctatctaccttgtggtcttcaaggtgtcttacttaaaggaaatcttatcttaaggggggcttcgtgcttagatgctttcagctcttatcctttccaaacgtagctactgagctatgcaactggcgttacaactcataaaccattggtttgtccatcccggtcctctcgtactaaggacagctcctttcaaatttcctacgcccacgacggatagggaccgaactgtctcgcgacgttctgaacccagctcgcgtgcctctttaatgggcgaacagcccaacccttgggacctacttcagccccaggatgagacgagccgacatcgaggtgccaaacctccccgtcgatatgaactcttgggggagataagcctgttatccccagggtagcttttatccgttgagcgatggcccttccacgtggtaccaccggatcactaagtcctgatttctcatctgctcgatctgtttatctcgcagttaagctcccttctgcctttgtactctttgcacgatttccgtccgtgctgagggaacctttgaacgcctccgttactgtttgggaggcgaccgccccagtcaaactgcccaactgacagtgtccctaaaccggtttacggctcaaggttagaattccagcactacaggagtggtatcccacttttcggctcctctgatactggcgtaccaggatctttgcctcccacctattctgtacatgtactaccgaaatccaatgtcagcctacagtaaagctccatggggtctttccgtcctgtcgcgggtaaatggcatctttaccattacttcaatttcaccggatcctttgttgagacagtgcccaaatcgttacacctttcgtgcgggtcggaacttacccgacaaggaatttcgctaccttaggaccgttatagttacggccgccgtttactggggcttaagttctatgcttcgcttacgctaacatttccccttaaccttccagcaccgggcaggtgtcagctcctatacgtcgtctttcgacttagcagaaacttgtgtttttggtaaacagtcgcttgggcctattcactgcggccagatcgctctggctccccttctcgctaacttacggggtcattttgccgagttccttaacaaaggttcttccgcgcgtcttaggattctctcctttcctacctgtgtcggtttacggtacgggtatcatttatctatttagcggcttttcttgacagtgtgaaatcggctacttctctactttgtttcgatcctcatcataaatcagcttagcctggttattagtcctggcatgcctttttatttgagcgtactcttccatctggtacgcttagcttatccttctgtgtccccgcttcatttatacgatatttgatagtactagaatttttactagttgtccatcggctacgcctttaggcctggccttaggtcccgacttaccctgaggggacgagccttgctcaggaatccttaggttttcgacgggagtgattctcacactccttctcgctacttatgccagcattctctcttgtgtttcgtccacagcgcctttcgatactgcttcagcctattacacaatgctcctctaccactcaagttgagtccacagcttcggtatccgatttagccccggaaatcttcggcgcaaggtcactcgactagtgagctattacgcactctttaaatgtatggctgcttctaagccaacatcctagttgtttgggtaacttcacatcctttaccacttaatcggtatttggggaccttagctgatggtctgggctctttcccttttgacatagaagcttatcccactatgtctgactccttaggtttgttttcttggcattcggagtttgataggttttggtaatgtacaaacaccccgcaaccagtcagtagctctacctccattaaacatcctaaaggctagccctaaagctatttcgaggagaaccagctatctccaggttcgattggcttttcacccctatccacaagtcatccgatgtgttttaaaccacacccggttcgagcctccattaaattttactttaacttcactctgctcatggataggtcacctggtttcgggtctactcctgtaaactaaaccgccctattaagacttgatttctcttcggcttcgaagcttaacttcttaaccttgcttacaaaagtaactcgctggcccgttctacaaaaagtacaagattgcacttttcacgtgctttctttgcttgtaaacgcagggtttcaggttctatttcactcccctttcggggttctttttacctttccctcacggtactgttctctatcggtcaccaagtagtatttagccttgggaggtggtcctcccatgttcccaccaggtttctcgtgccttgtggtactcgttaagcttattgaaatgctaatatcttctcttacaagtctttcactttctatggatgatttttccaagatcattcggatattgttttagtatttctttaagcgggctctttccatttcgctcgccgctactttgaaaatcgatgtttctttcttttcctcggggtacttagatgtttcagttctcccggtattgcctctatatactattttattcatatatagatacttaaggtttgcttaagtgggttgccccattcggatatctccctttcgtttcttgtttgcagatctagggagcttttcgcagctttctacgtccttcttcgcctcttggtgccaaggcatccgccctgcgctcttagtaacttgacctaatttttttaaaaatcctttaacgcttattgttaaaatttactgtatttattttctttataaatgtcgtttcgttttcatttgattatggttattaagttttatttggttttgacttttcttttgaaaagtcatggtggagatgaggagattcgaactcctgaccccctgcttgcaaggcaggtgctctcccaactgagctacacccccatgttgatggttttgtttgggtatttgtttttaagcaaagcccaaagtgaaaagaactaatgttctccttagaaaggaggtgatccagccgcaccttccgatacggctaccttgttacgacttcaccccagtcattgaccctaccttcgactgctgcctccttacggttagctcacaggcttcgggtattgcctactcccatggtgtgacgggcggtgtgtacaagacccgggaacgcattcaccgcagcattctgatctgcgattactagcaactccggcttcatgatctcgagttgcagagatcaatccgaactgggatcggttttttgaggtttgcttgatatcgctatttcgcttctctttgtaccgaccattgtagcacgtgtgtagcccaggacataaagggcatgatgatttgacgtcatccccaccttcctccgatttgtcatcggcagtccatctagagtcctcagcttaacctgttagtaactaaatgtaagggttgcgctcgttgcgggacttaacccaacatctcacgacacgagctgacgacaaccatgcaccacctgtatccaaggtagataaatctagggtttttatctctaaaaactttccttggtatgtcaagtcctggtaaggttcttcgcgtagcctcgaattaaaccacatgctccgctgcttgtgcgggtccccgtcaattcctttgagtttcatacttgcgtacgtactccccaggcggagtgcttattgtgttaacgtacggcacctactcgtatgagcagacacctagcactcatcgtttacggcgtggactaccagggtatctaatcctgtttgctccccacgctttcgtgcctcagcgtcagtacaagtccagaaagtcgccttcgccaccggtattcctcctaatatctacgcattccaccgctacactaggaattccactttcctctccttgactcaagcatatcagtttcagatgcaatctatgggttgagcccttagttttcacatctgacttaatttgccgcctacgcactctttacgcccaataattccggacaacgctcgccccttacgtattaccgcggctgctggcacgtaattagccggggctttcttctatggtaccgtcattatcttcccataggacagagctttacgactcgaaagccttcatcgctcacgcggcgtcgctgcatcagggtttcccccattgtgcaatattccccactgctgcctcccgtaggagtttggaccgtttctcagttccaatgtggccggtcatcctcttagatcggctacccatcgctatcttggtgggccgttaccctcaccaactaattaatgggacgcgagctcatcttacaccgaaattctttaatcacttcttcatgcgaagatgtgatatcatatggtattaatcccggtttcccgaggctatccctttgtgtaaggcagattgctcacgcgttactcacccgtccgccactaatccagagattcttcactccgaagagatcggattctctttcatcgttcgacttgcatgtgttaagcacgccgccagcgttcgtcctgagccaggatcaaactctcgattaaatggtttatttaatcccaagttaaccttggctcttaaattcgaaattacttatcaataaaaattgattggtttaaatcgttcttttcacttttattcagttttgcttgccttctggtctttccagatgacttatccattctaccatttatttttatctttgtcaagtactttttaaaaagtttttacttatttttaaagttttttctcttttattttacaattgtatcgcctttttctttggcccactatctatagtatgtgcatttatcattgtgatacttaatctcaagatgtaactcttttctttaatgccacagttcatgctactatatgcttcacttgctatatagtcccaagcatcttactatatatcaagcctctcatgtattaggtcgtttctatatcttatctaaaatctaattatcccaaaaaaatccctcatcaactctgtggtcaatgagggttctatttatgtcttatttattcatcatatctctttgttctttcatcttctctaagtactctttcgtgctcggtgtgtaatcttcttttttaatttgcttttcaagtatggcaatcgcgctgtcaaggttgccactgttgtagtttgatattgcaagctgatccatgtactgtgcgctctgtctgtccttacttgcctctatcgcatagtcaagtgcctctttaaaattgcctgtcatggtcattacaacgctaaggtagtagtatactctatcgtcttttgcattgtcgatgttttctatcagtacatcgtaggcttctttaaactttttcacgcctataaagtactctgcaagctctatcttgtattcttcgtagtctaggctcaatacgccctcaacttcttcttttttctcaagctcgttctcaagcttaagatatttttcaaagtaagccttgcttcttatataatcctttttaaatctatagtaatatcctagcttgtatagtgcgtactttgctttgttattatcaaggtatattttttcaaatatctctatcgcctcgtcgatggccttgtctttatacttttcttcaagcagtgacacgtataggtacacatagtttatgtcattataattttcttttagatagtaagcgtagatgagtcttatgtcaatgcctatgtcttcatttaacgcctcatgcaacaagaatttatcaaagtctttcacggctttgattgcgccttcataagcatttttatgtgtaaaattattatctagtgtcaaaactataggcatagcttttaagaatagctttacatctatgtcttctttgttctctttaactatctttcgcatatcttttataagaactgggtagtcaacattctttttgaaggcgccgtgttcttctttaagttctataaaaaatatttcacttaataaatatttaaagctatctaaattcattatctcatgttcctcctaaacgctctcatcctcattgatgaattgtcaagtattttgaatagatgtcctctgtatataaagatgagtggtactaagacgtaatttactaagtatcttaatgataagctgctaaataatatactataattagatgctgccatcaataaaagggctgcaaatagccattgaaggaagttgttaaagaagaattttgccccataagtaaacgtggcgatgctattattagatgtttgatacagcgtttcgaatgatgcgttgaatacaaaggtaactatgatattcacaagtatttgtgcatataaaagtctgtgatctatttggtatggatctgtgaatgcgcctgttctaaaaatcatatttaatgctagaccaaatagatacgtgatgaaaacgtagtttattagctttgttaaatagtacttccagcctataaacgcgctattaaaactgattttctcgccttcaacaactcttgctaagagcactgaaactagtgaaaattttataagcatgagtatatacataaaaaggcttataagcatagtagtgaacactccaccaaaagccatcgacacgccggtactcactatgcttgttacttgatcaaagagaaatagtcctagcattgttaatatcacgactagaaaattttctttaatcgttgcaaatagtctcttaaacgcttctgtgtttgtataaattatatcttttaacatagtcatcactaatcctttctatgtcatcatcaacaaggtaggcgtcctcatccataactatgatagctactttgtttatgatgtccttgttcttctcatctatatatttccttaaatgtgcttttctaaactcttcatctcttaaaatactgtgaagcttgtcacctctaagctttgtaaatggcataaagtcaagcggtgcctgtgatttaacgctcactgcatagtcgaggctaagtgcttttacaaactcatctgttactaggtctttcgcttttaaaaattcgtagacaagtccatataatttttcctttttaatggtcttatcaacgccaaatttttcatctatgaaatttgccatatcttcaaacattgcaaatgggcttaaatacaccctttcaagtatatcaagtgttcttttgaaactgccctcgttatatatcttgtcaaccacataatcaattttcttaagaattattatctcgtcggtcgataaaaaatcgttcttcaagacttcataaggagcgtagtcagtaaactcatagcggaagatatcactttgcgaacgcacaagcgaacctttaagcatcttcagaaagccaagctgtatcttttctatcttaaaagtgtaaagatagttaaaagactctttgaagctctcgaagtcctcataaggaagtcctgctataaggtctatgtgctgatgaatagttcctagcttctttatcatttgcgagtgctcttttattttttctagatcattgtgcctttgaattgctttaagcgtcattgggtttatcgactgaagccctatctcaaactgtaccatatccttaggaagcttcttaagcgtctcatagaatctatccgtcattctatcaagagtaatctcgaagtgaaacttagtattcgttttattattttctaaaatatgctctattatattaatagcaaagtcttcgttagagttaaaagttctgtctatgaacttaactatggatggcttcatagatataagcctatctaaatcctttttcactaggtcgatgggcttgtacctaagaccctttattgctgaagataaacaaaaagaacacctatatggacagcctctttgtgcttcataatagagtgttctatgctccaaagcctcttcatcttcataaggaaagcttaaatctttcatgtcgataagtggtgcttcttcagttttaatgtatctattatccttgatataggctagattatgaacctcatctatgcttatctcgccttgcttataaagaacaaagtccttcatagctctctcaccctcgccataaattatgtagtcgcaggcaggatttgacctaagaaagctttctttttcgaagctcacttcaggtccgcctaggactatagtatagcttggctttatctttttaagagaagtaataacttttcttacttgatcaacgttccatatatatgttgagaacataagtatgtctgcgtctttcttgtgaagctcataaacaatcttttccaaaggctcgtttatggtaaattcctcgaacgaagaatctaccatacttttaagctcattgtttaaatatcttatagcaatatttgtatgtgaaaactttgcgttaatacctacaaatactactttcattacattctgtctggagtttgtactcctattaggttcatgcctaccttaattgctttttgaacaatgtcaactatagcaagtcttgaattagtaagcttttcatcatctgtaattatttgatttgctgcatagtatttgttgaatgccttagctatgtctatgatgtttcttgtgatgtagaatgcttcatacttttccatagctaaaactatagttcttggtaagtcatatacatactttaagatttcatatgcttcgtccttaactagatcaaaatcaaccttatttggatcaaagccgccgttcttgtcgattaatgacttacatctagcataagtgtattgtgcgtaaggaccagtttcgccttcgaatgaaagtgtcttatcccaatcaaatacatagtctttaattctttggttaaataactcttggaaaactatagctccagtaccaaccatcttagcaacttcgtctttgttttcaaggttagggtttctcttttcaatgatatctcttgtcttttctatagccttgtttaaaacatcttcaagcttaagaactctaccttgtcttgttgataaagctccgtctttaagtgagataagtccaaagttaacatgtacgcaatcatctgaccactcgtctcccatgagtttaagaacttgcttccattgttggaagtgaaggttttgttcactagcaactacgtagatgttcttgtagaagtcgtaagttttctttctatatcttgcagctgcgatgtctcttgttgcatatgttgttgtgccgttagacttaactatgattagtggagtaagtccatatggctttaagtcaacgatgtatgcgccgtcatccatcttgccgatgttcttttctttaatctcttcaataactgcaggcatcttgtctgagtagaaagcttcacccttgtatgagtcgtatttaattccaagcatatcatatactttttcgaactcaacaattgatagcttcttcatccaagtccatatttcagttgcttcttcatctccttcttcaagctttttaaaccaatctcttgcaacgtctcttgcttttggatcttcttcttgaagcttgttgtatctaacatataagtcaagtaattcatctatagggttcttttcgatagcttctctgtctccccatagcttatatgctgctataagcataccaaattgtgtaccgtagtcacctaagtggttgatagcaactgtgttatatccaaggtgcttgaagatgtggaaaagtgcgttacctataactgttgatcttatgtgacctatgtgcataggctttgcaatgttaggtgatgagaactcaactatgacagttttgcccttacccatgtctgaagagccatacatatcgcctttttcttcgatttctttataaactgtttctagaagtttttctttatttacaaagaagtttacatatggtcctgcacattcaactttgtcaaaatattcgttatgtgataatttttctttgatctcttctgcgattagattaggggcctttttgtatgtctttgcaagtctgaatactgggaaggcatagtcgcccatttcaaacgatggtggtgtttccactaagttttctatctcttctttagatagtccttcaataactgcgcttaacgcgtcacttactttttctttaaaatttatcatgattacctcctactatttaataactgctacggtagctcctgatccaccctccgtatagtctgcttctctatattctacaacatgtttgctgttttgtaaatactttcttatcgcttctctaagtgtgccagtgcccttgccgtgaataattcggacttctttaagccttgcaaggtaggcatcatctagatatttgtcaagtgctagtatcgcctcatcaacagttcttccaattaaatttatttctgaattaatattttgcgactttgctttgttgatatttttcgcttttttctcaaccttaacttcttcctttgactcacttcgttcaatatcgttaatattgcttctaacgctcatgatgccaacttgtatattaaggtctcccttttcatcaggaagcgtttctacttcaccatacttatcaatacttattatcctaacactttcgcctagcttgatatccttaggcacttccttagttcgcttcttattgtctttaatctttaatctgttttcatcttcaagatctcttaggtagtccttcgcctcttgtagcctccttctatcctcttttttagataaggacgatatgtcttttagctcatcaattatgaaggcgctttcattctttgctttcttaactatctctctcgcttcttctttcgctttgttaatgatggcttcttgtctctcttctagttttttattcttagctgctaatttttctcttagcttttctatctcttcactatcttcgttaatctttaagcgtttattttcaatctcagttctatcttcttcgatggccttaagtacatcttcgaagcgtgtatcattttcattaagtagttcttttgcgctatcaataatcttttgatcaagtccaagcctcttcgatatttcaaatgcatttgacttgcccggtatgcctatgattagtttatatgttggtgagagtgtatcgacattgaactccattgatgcgttcttcacgccctcgctcgtaagtgcataaaactttatctgcgagtagtgtgtcgtcgccatagtcctaatccttcgctctctaaagagctttaatatggatatggcaagtgccgcgccctctgttggatcggtacctgcacctagttcgtcgaataaaactaagtcattatactgtgcattctcaactatgtgcacaatgttcttcatatgtgaggagaatgttgacagagactgctctatcgattgctcatcacctatatctgcataaaccttgtcaaagactgctactgatgagttgttatcgcacggaatatttaaacctgacttcgccataagtgtaatcaatcctactgtctttaagctaaccgtcttaccgcctgtgttaggtccagtgatgatgagtgatgtgtactcatctccaagttcaaccgttgttggcactaccttatcactcgctataagtgggtgccttgcattttttaagttgacatagcctctgtcattaagtattggctctgtcgccctcatctctctagcaagtcttgccttggcaaatataaatgagatgcttcttaaagcttcttcgttcgtttcaaggtagtctttgtactctgagacctcgcttgataattcgtaaagaatcctttctatctctttcttctcttcgttttcaagctcccttagctcgttatttaatttaacgactgccatcggctcaataaaaactgtagatcccttttgagatatgtcgtgtatcataccctcaacgcttgacctatactcgtttttaacaggaattacatacctgccttcacgcatagtaactattgcgtcttgtaaatatttttttgttttatcacttgttatatatgaatttaatttttcttctattgcttggttcttaagtttcttgcttcgccttatgcttcttaaagcactagaggcattatctgcaagttcatctctcgaaactatagccatgctaagctttttcttaaggtcctcaagaaccgcaaggctgtcataaagccttcttaagtgatttagctttaagttttcatcttctatagctgtctttaaatatctcttaattgatccaactaggaagatgttttgcattatatcatataaatcttctatgaataacatcgatccaagacttgccttcgatactagatgctttatgtgcgatgcagctgagtaatcaatgtcaccgtacctaactaaaaccctgtaggcttcggatgtttcttcttgcatacgccttatctcatctatctcgtttgatggctcaagattctctgccaagtctcttgcaagctcaccttcagtcaagtctaaaagcatttctattattttgtcatattctaaaactttgagtgctttgtccatttattcacctataaaactcttttgtagtaatgcgctctagtaaaactttctatcgcgtctattccatctccattattaatcttgtctatatattcattgatttttttataatcactttcattatcaaggtcaatgataatgcttgtagttcctaattttttcatgtcatccatcttgtctagcataaaaattttttgtgagttataaatcttagtataattattttctcgtctaaacttgtaacgttccttatcctcatatacaagctcattcgccttgtttatagggcaagtctcacacctttggtcgcagtcacttctaatatttgctaatgggcaggccttgctcatcataacaattggatatccatatgcccacagtcttgtttcaagaccgtagttcataattttttccatctgagctaatgtcatctcaagcgagtatgtaaagcctgagaaattattttcactcatgtacttcgcagcttccgagttaaagacattcatcatgtatgatacatagaattttttattaaagctctttaacttttgataagcacctagctcacttatttctatagagtcaatgtctcctttgtactgactaagaagctcgtagtactcatcaaggtcttcgtcgcttgctgcgtttgatgtatatacttctttatttatattaactttacttaggtaagtaagattttccttgtttagatatagactcagtgtatcaaccttgtctatgtctatgccttcaagatctttataagatgaagctctaagaataattttttgcttagcacattttttattctcataaggagtcaagatatcttttttctttgtatcaatattaactcccttgaaatcttttttcagaagctcctctataagatctcttcttaaggatttaagctccttaactggtatgaaagcatcttcatccacatcaagtacagcttctgtaacatataaaaaatctataccagtttttatgataggatcagtaattttttctctatctagtgaagctgtctttgctttttgaactatgtattcagactctttggtatattcttcattcatataatgaagcgttaaaattattttttcgcctatctttgcttttaaatcaaagctaatattcttctttgcaaatgaaaaatcattaagttcaaagccgccttcaaagtgtttcttttctttaataagcatattgtccatcttatcttttaagatatgccccttagtaaagcctctgttaaagacttcatcaagtttatgctcgctctcaaagcctagaattttatccttatatagtttagtcaccagataaacataagaaggattcttcatgcggccctctatctttaaactatcgacagtgccaataagcttatcaagagagtccaaagtgtttaggtcatactccgatatagcataaaccttttcactaagtagtcttccctcgctatagacgtcgtacatcttgcggcatggctgtgcacatgtgccgcggttaccggacctctcacctataagtgagctcattaagcattgaccagagactgcgtagcaaagcgctccatgaacaaaggcctcaagctctatatctttctcggcagccttctctaagaatctgtagtccttctcacgtgctatgaccgctctttgaaagccattctcaattgcccagtctatacttgcaaggtttgctatgtttagctgtgttgacgcatgcacctcaacgcctggtaaatattttttaacaagcgaaatcaaaccaagatcagtaattataaaagcgtcgacacccatgttcttgtaatgctctatcaagaataaggcgtcaactacttccttgtcatctaaaataatatttactgtcatgcaaagtttgatctcgtaaagctttgcaagctctatcatagactttatctcgtcatctgtaattcctttagcaaagcgtcttgcgttgaaattttcacttccaaaataaacctcatcagcacccgctttaagcgctgcaatgaacgcttcgtaggtgccgacagggcttagtacttttgtctttttatttaacattattgttcttattttttgaattgttatcgatttttgtattttttgcgtcagcgtcttgtgaatttgttccttctttaatgcggcttagctgttgataaaggtcttcagtgtttaactttgtcttaacaagctcgtccgccttgttattaagctcttcttgaagcttttctatcttattaagagcttcttgatatgcttcgttgagatccatgtactcttgagacttatttataggagtgctctcatactcacttagcttcttttgagctttaaataattcatcagttacgttgacagtcgcaagggttgttgccataagcgagtcaagtcttggattattagctaaaagatcctttattaacttattaacatagtatgcaatatctgatacatacttttcatcatactccgaacgaatattaaaatctcttccgtttatatgaacggttactctctctggcatatcctacctccttactttcttaagatggcagcgaatttatcttcaagtgaagctaaaatttcgctctcaaccttttgtatatctttatctttaagagtcttttcgccttgatacttgatcttgaaagctagtgacttcttgtcagctccaagtttatctgacttgtatacgtcaaaaatttgtacatctttaacgatatcaaagccgtgcgataaaatttcttttttaacatcgccaaatggcacagcgtcatctataactatagcgtagtctctcttaactgcagggaatttatttatcttgacatattttctctctagattaactagtggatatatcttttctaagtcaagctccattacataaacatctgtctttattgagaagttatcgcaaacagcgtagtcaacttgaccaaggcttgcaaatttttcaccattgacgtaaaagtctgcgcttcttcccttgtggaatatacttgtctcgctacttctctttacttcgtaatcttctatagcaagtccctctagtatcttaactaaaacgtccttaatcatgtagaagtcaccataaccgtagaagcctacagacatagtcttgttctcaatatacttgctgccttctttttcaaatgtgtttccaaattcaaagaaagcacctttttcgttcatattgttgatgtttagtgataaaactttaagcatgtttgcgataagcgttgtcctcatcgctctaaagtcttcaccaagtggattgatcagctcaatatattttctaaactcatgattctcttttaaatttaatgcatcatagttctttggactgatgaatgaataagttagtatctcatccatgccttgacctataagcaaagtcttgatgtgtttatcgatttgtctcttgtagtcaagcataccaactgatgtctctgacttgataggctttgcttcgatattgtggaagccatagatacgtccaacttcttcagctatatcttcttcaatagcaaggtctgttctgtaatatggtgacttcgaaattagaagtccatcttcatactttgtttcaatgctaagccttgatagattatcaagcatagtctcaacacttaagtcgcttccaagcaaattattaattctagctggatcagacttaatcacttcatctttttcttcatagttaacgatgtcataataaccatcgactaatgtaccaacgccaagtagctctattagataagcagctctatcaactgccttcttagccattaaaggtgaaattcctttttcaaatctattagaagcttcagttcttaaactaagtctctttgatgtatatcttatttgagatctgttaaagcttgcgccttcaagcatgatagtctcagttgcatctgtgatagatgagtcaagtccgcccatgatgccacctagtgcaaggttctcacttccatctgtaataacaatgtcttcaggctttaaatctctttctacttcatcaagtgtagtgaacttttcttctttagcattctttacatgaatttcattagttttaattgtgttcacatcgaaagcatgaagcggctctccaagttcaagcattacatagtttgtaatatcaacgatattattgataggtctaacgccagactccataagtctttgttgcatccaaagtggagataaagcaatctttacatcttttacgactcttgcgcaatatcttaagcagtcctttgtatcgatagtgatatctttaatgtattttttgatatcatcagagtcttttgcttcactatacacaggctctttcaaatctgtattaaatgtagcctttgcttccctagccatacctaaaacgcttaggcagtcaggcctgtttggtgtaatctctatatctaaaactttttcatctaaggctaaaacttctcttatatctttgcctataggagtgtcctcatcaagaattaaaactccttcagctacttttttattaattacatttgtatcgtatccaagttcagctagtgagcagaacataccatatgaaactactcctctaaagtcgtgctcttcaattttatttccgccagcaattattgctccaactgttgcaagcggaactatgtcgccttctttaacatttggtgcggcagtaactataactacttcacccttgccatcatctacgtagcacactcttaatttatcagcatctggatgcttttctatgcgtttaattttgacagtgataacgccttcaaggcctttaaacgagtcaacaataccatctacatgagaacctgttaaagtgatgtcttcagctagctttttattgtcacaatcaatatttacataatcttttagccatctaattggtaataacatatcgtcctcctaaaactcatctaaaaatctttgatcgttttcgtaaagcaatcttatatcattgatgccgtacgaaaccattgtaattctgtctacgccaaaaccaaaggcaaagccagagtacttctttggatctatgccgcagtttctaagtacatttggatgcaccatgccgcagcctagtaattccatggaccagccagttccaccgcagaattcgcatccttcgccaccgcacttgtgacaagttacgtcaacttccatgcttggctctgtgaatgggaagtgatgcggtctatatcttgtttgtatcttctctcctaaaagttctctaacaaattgatctatagtaaactttaaatttgcaagagaaatattctctccaactacaagaccttccatttggtagaacattggtgagtgagtgttatcaacatcatcgaatctaaaagttcttccgcatgaaaccatctttagtggtgctccatactttttcatagctctaatttgtactggtgatgtttgtgttcttaataatgtttctttatctatatagaaagtatcagacatatctcttgaagggtgatcttgtggcgcattaagtaagtcaaagttgttttctacagtttcaatctcaggtccttctataaccttaaaacccatcctcataaataagtcttcaagtttttcctttaccttgattaatggatgctcgtgtccaagtgaaactatatctttgtcaatacttatgtccaaagtctcttcatctaatcttttttctctttcaagagcgtttaagctgtcaaatttgttcttaagtagagcttcaatgtcttctctaacctcattagcaagttgacccataacaggcctttcttcagctgatagcgagcccatcttcttaagtatggctgttaagtcgcctttcttacctaagaatttaactcttagctcttctaaactctttaagtcttttgcttcttcaatcaaagctttggcttcgcctttaatttttaatagttcttctttcatatgcttcctccgatacttttattataccacatattgttagtcttgcattaaatatctttcgtatataataatagagcttgctacagctaaattaagtgattcgagccttccagtattggctatggtgatcgtgtcatcactcatcttaaaagcttcatccgttaagccactaccttcattacccataagtataaaggccttctcatctgtatagcctatggccttgcctcgtggtgatgtagagtaaactttgtagccatgctctttaaatttatttattatgcttagatcctcatagtgaacatcaactaagaagatggctcccatagacgcgcgtaaaactttttcgttataaacgtcacatgagttcttagacaagataagtgtccttacatcaaaggatgccgcgcttctaattatcgttcctaaattgcctggatcttgtatatcttccaagtacaaaactgttttttcatcaaaatcatattcttcgtttatgttttctttacaaacggcgattatgccttgagatgtaacagtatcttgaagacttttaaataaattgttttcaattcttacaatatcataagacttatcagatatgtattcatcgtcaaagtcttcgttaataagtatgtacactatagacgcacagcgttctatagcttcataaaccaatcttttaccttcaagcacaaacatagaattcttctttctatattttgctttctttaaggagttaatcagcttataaattttgttgtccttagatgtgataaggctacttctcattttgagagtccttttccaaggcacttatatcatcaacttggccaagaagcaccaaaacatctccagcttcaagacccttgtcaggtttcggtgaaacatcaatcttgtcctcgttcttgatagcgataacgttaacaccgtagatatttcttaatttaatatcaagtagtgacttacctatccacgacttaagtatcctaacttcggcgatggaatactcactagaaagttcgatgtagtcaatgatgtttttaaatgttaggttatgtgcaagccttgtacccatatctctttcaggaaatataatcttgtttgcgcctatcttagatagtaccttaccatgtgactcactagtagccttggcaatgattgttttaatgccaagctccttacatgtaagagtcgcaatgatacttgcttcaaggtctgaacctatgctaatgatggcaacatcaaagtttgatagacctatctccttaagtgccatctcatttttcgcatccgcttcaatagcgtgagtaacatagtcagcaacttcacttactaaagctgggtcgtagtctatagctaagacctcgtgacctatccttgaaagctccttcgaaagtgccataccaaatcttccaagtccaattattacaaatgatttcatatatcctcctatccaaccataaggttgcctggtgcatttctataatctctcttcttgtttttccttgcaaaagcgtatgccatggtaagtggtccaaccctgcctatatacatagtaagagttattatcagtcttccaagagtgctaagcttttcagttacgcctatagtcaagccgacagtaccgaaggccgatgttgattcgaaaagtagatttataaactttatagaactgtcagtaatagttagtatgatagctgttgaaaaaactatagctaagcctatcaaaaatatcgatacagctctcttaatagtttcgaatggcagtcttctctttagacagttaacatcttcctcgccctttactactgatatagttgttaataaaagacaagcgaatgttgttgtcttaacaccacctgctgttgagcccggcgagccgcctataaacataagcattatagttgagaatatagttgtctctctaatctttgacatatctacagaatagaagcctgcagttcttggcgagacactttggaaaagtgagttcgcaagtctttgtggaaagctcatagctgctaaagtgccaggatttgtactttcaaatagcaaaaagctaagtgtgcctatgagtaaaagtgatcctgtcataattagtaccactttagagtgaagtgttagctttcttaatctgtccttagctaataggtctgcataaacagtaaagcctagtccgccaaatattattaatacagacagtactaataagacatagtaatcatgttgaaagctaagcaaggagtcaccaagtatatcaaagcccgcgttgcagtatgcgctaattgagtggaatatactaaatgccacaccctttcctagtccatacataggtacaaagcgaagtgaaagtagaattgatcccatcatctcaagaaagaaagtgtagccaataaccttctttgttagcttaactatgccctgtatagattcagtatttagttgctccttaatcataagtctttccttaaaggaaatcttcttacccataatgatgtagccaacagttgcaagtgtcattatgccaaggccgccaaactgtatcaaggtaatgatgacaagttgaccaaaaggcgtaaaatccttagcagtattaagaactgtaaggcctgttacacacacagcagatgctgatgtgaacaaactattgacatagcctatggctttgccactagacgaggcaataggtaagtttaaaagcacactgcctataatgattaaggatagaaaacccagtgccaatacttgtggtgggtttaatgtatctttaaatagtttttttcttatttccataaatacattttactacaaatcaagaatttttgccatatagaaaagaaaaagttcccataaatgagaactttaagcattctttgccatatcaactaaattcttaaagctttctttatcatgaatagccatttcggaaagcatttttctgtttatgtcaatatttaatttctttaaaccaccgataaatttgctatagctcatatcgtttactctgcattcagcattgattctagctatccaaagttttctgaagtctctctttctgttctttctaccgatatatgcatagcttagtgacttcataactgcttcgttagcagttctaaatagcttgctctttgcgccgaaatatcctttagcttgttttaaaacttttttatgattcttttttgcatttactgctcttttaactctagccatatttatcctcctattacaatatcatagagtcgattctcttttgatcgccctttgatactaatgatccttttcttaagtttcttactctctttgcagatttctttcctgttaagtgtcctttgtatgctttaaatctttttaatttaccagaggctgttcttttaaatctctttgcagacgctctgtgtgttttcatctttgccatttgtattcctcctaatttttattattttgagcaacagtcatagacatgtttcttccttctaacttaggtgctttttcaaccatagcttcaggacctaatagctctataaattgatcaagaacttctcttccaagctcagtatgtcccatctctctacctctaaagcgaacggacaccttaaccttgtctccattttgaataaactttaatgttgttctagctttaacatttaagtcgtgatcttcaatgtttggagtcattctgatctctttaatattgataactttttgtttcttctttgcttccttgttcttcttttgaagttcatatctgtacttaccgtagtccatgaccttacaaacaacagggtcagcattcggagaaaccattacaaggtccaatttagcattttgtgctatctctaaagccttatcgttgtcgacaataccatattgagttccgtcttcaccaataagtcttacttttggatttctaatctcttcgttgattagtagctctttaattgtttacacctccattaaaaaaacgggcatgaaaaaatgcccgtacaatacaattaattaaccttatgaacaaccggttataaggtgagaaagcattttcttcttgttttattattctttactcatatagtatatactcacgcagaacgtttgtcaagtactttttttgttttcacaaaatattttttgctatgacaatgctgcctcgcttatactatatgtttatattaacattaatgagtccacttgtcaagtcgtcgtgactgatgatgaagcatatcctttcgtctctagtctcatttaagtaatcgtatatctctttcgttgattccttgtcaatgtttgagcatatctcatccaaaactaatacgtcaggattttttagtaatgaccttgcaaatgatatcttttgcttttctcctccagatagatttgagccgcccataagtatatcatcatcaagggacttcttctcaagtatagatctgatgaattgattttcttctaagtcgatgtgactgccatcatcaaaatcaagtagaaggttcttccttagtgagccgttgactataggcgcgttttgcactacatattcaatacgatctcttatgtcttcgtttttgcacttgtcgatatctatgccattcactttaattatcttaacgtctctaaattttactaggcttttggcaaatgtactcttgccactaccattggctccgttgattctaactatgtcgcccttcttaagccttgcctttgcgttaaagtcaagcttcatatctttgatatttataccattgacatcaagttctatatcatttattgcatcaatagcttctttcccatcactttctttatttgaaatgagttctttttcaaaatcttttgctatatcaaaatttctcttttcgatatttgaattagttatggtcgagacattagcaaagtaaagtgggaagattaaagtaacgagtatgattgagtaaatgctgctgctatgcgccatgtagtcataaacaactatcagtaaaagaagtgtttttataatctcgttaatgccttctaagaccactgtcatcgactgagcgtattcattgacccttgccatgctaccataaaccttttctgtcgctggttctaatttattgtaaatcacagacttatcagaaagctgctttacatagtcaacttcttgtacataagaaagtatctcttgaaagcccatgccagtcatcttttgcatctcttcagactttttcttaagcttcttatttaataatttatatccaaaatagtttataggcagcgccaaaaacattatcaaggctaaatacaaatttacatttgcaattaaaattaagcatactaaggcaactaaaaacgaggaaaatatctgtatgtagccattcatcataaaggagtagatgctattaacagagattgatgccctctctagtaagttcatagctcctttttcgattatactgtcgtagttcatattaaaaatgttttttatgtatgaaatgaaattgcctttgttatactcctttgcaaacttttctctaaaaattgtgaatagtatcgttagcagttttgaggcaagtataagtaagactatgaatactatcttcttcgtatcaagcggcgtgccatttgccttccatagctgaatgaatatcggggcaagtagtgctgatatcgatgaaaacagtatcaatataaacatgattataaaaaattttttgtacttcataagatcctcccttgtaatgatttagcaaaataaattattattaattgtattataccacccacccctaaaatatacaagcaatatcactatattaatacgaatatcttatactttgcttgtttattataatcttctcttatatagttgcaaaagaaaactgagtaagatctcttactcagttttcttgtattaattaatattaattacttttcattgcaaagtctaggcttattgtgttgttaagtatgttcatatactctttgtctgttactagttcaagctttaattgctctttgccctctactgttacgttcgatgcgtctgccctaagcttaaatgtatcttcgtctatcttatctaagactgacttgtatcctttcaagcgcaatgtgataaacttatcgtttgtatcttttagttcgaagtcatcacttaagtttactagctcaaggtttgcaagtggcaccttaatttctctttctgcctcttcttctacttcataagtaacgcttatcttaacgttctcatcaagtagttcaactcccttaggtagtataggcttaactataagctcgccgtccttaggttcgactgcgtcgttaacctctatcttctctgtcttgattgagctaatgccatcgatatcgtcttggcctttgataactaatttttgcggattagttttgatattaactatcttgtaattacttggcaaatggcttacaaaatctgtttcgataggaactgattttgttttatctatctgtgcattgatattaaccacttgtggatataggctcacttgatctatctgattatcttttatatctaccgcatataatttacttgatattgtaaatgttttatccttgtttgttaaatctatctctgcgatgactttgtctacctttgctaaatagctttctggtccagtcaatttaacattctccacgtccatggatatgtcggagagagcatgattttctttaacctcgcctttttgtcttacctctataggtttcttatatgactcgacgctgtcaaggttgaatataatctctgacggtcccactgatgtaacttgtagtgtgttgtactgaccaatgatctctgccttaacgggcactcttgcttgtcctgcgctgtatcctctaaagtctatggctgccttgatgttgttttcgtttatattgtcaagttcgctcttcttaccttttacttgaactgaaacttttgcctcatttggtccaaggttaacaagctttgtattgttaaggtagtcaaggctcttaaacgcaactgttatgtttctatatgtccttgtttcttctgggttaacaagtcccataacatagtaccaaaggaagatggcaatgatgactgaaactacttttgcaatgatattactcttgttcttgatcttgaacttcttcatcttgaacttcatcttttgccctccatttgaataatgttttttcttcgttactttctggtaagtagacgcttaatagtttttctctaagtgtgttctcgtctaagtatctagagataacaccttcttctgctgtggagatggatcctgtctcttcggatacaataactgcaagcgcgtcactcatctctgttacgccaagtgctgctctgtgtcttgtgccaagctctcttggtacgttttgattgtctgtaagcggcaagaagcacgctgcggctctgatcttatcgctcttaataacaaccgctccgtcgtgtagaggagtgttaggtataaagatgttgataagtaggtcgcttgaaacaaggccatcgatatcagtacctgtatcgactatctcattaagaccagtctttctctcgataactataagtgcgcctatcttttgtcttgatagtgatagacaggcgtctactatctcgttaactgtttttgaaaaattttcttttttaaactcggaaattgatttggaaaagaacttcatccttcctatatactcaagtccacgtctcaactctggctgaaatacaacaactaaagcgataagacctacattgaataggttctcgattaaccacctaagtgtatataggtgaaagacttcacttagctttgtaactataagcaaggccaagaagccttttgttagctgctcggctcttgtttgctttacaagcttgtatagttgatatattataagcgcgataattgtgatgtcgataaggtagctgagtttaaaatttacaaatatatcgctaatttgtcctaacataggtcctcctacataagttcttcaaacttatccataaactcgttaaatgtatctaaactgtttagtattgggtccttctttgtcatatctactcctgcttccttaagtatgtcgattgggtactcgcttgagccctttgataagaagccaaggtatttttccactgctccttcttctttagaaagcacttttctcgcaaattctgttgcgcagcttatacctgttgagtattggaatacatagaagttgtagtagaagtgaggtattcttgcccactcatacttgatcttatcatcaacaactacatcatcgccgtagtagaacttatttaaatcgtagtaagttttgttcaagtagtctgcgtttaatgtgccgccttcttgtgcatacttgtgaattatattttcaaattcagcaaacattgcttgtctatataatgtagttctaaatgactcaaggtagttgtctatgaagtataatttttcttctttagtcttagcattgtcaatcatgtagtgagttagtagtgtctcgttcatagttgaagcaatctctgctaagaatatactgtagtttgcgtattgaataggttgatttgtgttagttagatatgagtgcatagagtggcccatttcatgacagcatgtgaagactgagtcaagtgacttgttatgatttaaaaggatgtatggatatgttcccttaacacctgatgagaaggctccgcctcttttgccctttgtttcataaacatcgacccatcttgagtgatatcccttataggctatgtcttgatactctttaccaagtggtgcaattgcttctttgataatctctgttgcttgtgggtaatcaatctcgaactttaaactgttaagcattggcatgtagatgtcatacatgtgttgttctttaagtcccatatacttctttctaagcttcatatatctatgaaggtagccaatcttgtcatgcactgcttcgattaagttgtcatatatcttttcatcaacagcattggcaaataaggcagcctctcttgcactcttaaagtttctaacttcagctctgaagatgttcttcttaactgctgccttaagtgttgctgcaagcatattgatatggtcagcgtagttgtcgtagtatgtgttgaatgtattctttcttaagacttcatcatcttgtgaaagaagttttgtgaagactccagagcttagtggatgcatattgccatctttatctgcaactgaatcaaactttaaatctgcataagagaacatttgatatatgtcatctggcgcgctatataggtctcccgcctttgatagaagtgcctcttccttttcgctaagagtgtgagcttcgtatctaagtatgtcttcaaaagtctttctatactcttcaaggcctttttcttcagaaatgaatttttctatattctttcttcctacctttaaaatttcaggtgattcgaaagctaagatagttgagaattttacttctaatgattgtgccttgtcagcaagttcttgactctttgtatctgtagtgtcttgtgagaactttaagcttgcataaacaaatattagctcaagtctatgaataagttcgtattttagcttagtaaattcaagcaaagtctttgcaccttcgccaagctttccttcatactcgcttaactttaaaatgtcttttgaaatcttgtcgtactcttcggaccatttgtcatcgttttcaaagatcttcgttaaatcccacttaaattgttcatcaatttgatctcttgtttttaattcgtccatgttaacatccctttctatttattgtaattatttattagataattgtttattgccttaacaatgccttgcatttggtagcccatcttcttttggtcttcgctcacaacacagatgctgtagtcaagcttatcagactctataaagcttactagccaagcgttgtacttacccttgccaagctctgcagtaccagtcttagcacctatagtgaatccctttctatacaaggccttcgctgtaccactcttcacagtctctaacatcgcttcctttactttgtcagcgtcctctttattgccaactgtcttatacacttcgctctttgttgattcaagcaaggtgcccttattgtccttgaccatcttcacgatgtaaggtttaagcattacacctttcttggctatggcactagtcatcataagcatattaagagggcttactagtattgagccttgacctatagagtccgctgcaagctctgttttgcctgcatctctattgaacttcgatttagcaaaaactaaatcaaaggtaaagtccttgtctatataaaagtcttctatagtatctaggaatatatccttgttcatgctcataaccttgtttatgaagtaggtgttgattgacctgctcatagcagcgtttagatcaacatcgccatacttctttgcaccagagtttttgaagacataagagtcgactgtttcgctacctgtgtcggtgtagcttaagtctttctttgcctttaatatcgccatggcacttactagcttaaatgttgagcccggctgatatagtccttgggtcgctctatttagtagttctccgccatttgaattgacaaagtcgtcccagttttgatctatagttgatggattgaagccagggtttgagtgcatagcaagcacttcgcctgttctgttatccatgactatgactgcgcctttgtcccttgcaaagttcttctctataagcgcttctaagttattatctatagacaaaactagtgacttaccagctctgtcattaaatatctttcttatgtccttgaagtagtcgtccttgtctgtgcccgttaaaacatcgttgaaggtactttcaaggccttgcttgccatacttcttgctagtgtagccaatgacgtgcgagtacctttttccaaatggatacatcctttctttctcttcgcccttgacctttgtcgcagcaagtataacaccgtttctgtcatatatagtgcctctaataacattctcctcgtctactctgttacgcctgttataaggattgttctttatatcatttgcaagaaataattgaaagtatgttaggtagaatattattccaaagaaggccgctaaaaatattattagtgaaattataattctcttattcgttctatccatcgacttcaccttccatgctcgatagctgaaccatagctagaattatgaaggacgctagtatcgatgtgcctccgtaggcaacgaaaggaagcgttacccctgttagtggtataagctttagtacgcctcctaagattaagagggcttgcactgagaataaaactgcgcagttgaagcttaagaccttgtagaaggtatcgttcgacttaagcgctatcttgaatattcttgaaataagcattatgaataacataatgatggcgatgccaactagtgtacccatctcctcacatatagctgagaagataaagtcgcttgtcgcaactggtatagtcttaggtagacctagacctatgcctgtgccaagaaaaccacctgaactgatggcaaagagcgactgcgttatttgtagtccgatgccatccatatagtcccaaggattgataaagcttaggactcttactcttacgtgactgaataagtagtagctcacaatgctcatcactacagctaagagtaggtttacatactttaagtacttcttcttttcaaagacgaactcgctaaacatcatcataccgtagatgatgactgctgagccaaggtccttttgtaagaagaaaaacattatgaagctgtatgttattagtgtaaagatttcaggtccatacttcatattggcataccttttgtagttcttgtagtagattgcttgcaagaatatatatagtatcttgatgaactcgcctggttggaaccttactggtccaagccttatccagtttctcgctccatatttcgtcttacctagtacaagtgtcaatatgaacagtatgtaaataagtgctaagactagaaagaacatcttgtcaaacttattcttcatcgccgtcaatataaagatggcgagataaaaaacaagtatacctatgcttatccagataacttgcttaaagccacttatctcatcaagccttagtatctcaaaggtccctattgaaaagagcatagagactataaggtttaagtagcgatctgccttcggtgatatcttgataagcaagatattaagtaagtagataagcacaagcacgccagctgtgtaatatataaaattattcgttggcttcatgtctttgtaaaagtagaataaacttagttctaatattacaaacataaagaccagtagcaaaggtcttgctatgtttattctctttctcatctatagctccctgttcacaaaaacaaattttatatcatttacttctatgacgtctccgtcctcaagtatgacctcgtcatcaatcttagtgccattgacataagtgccgtttttgctaccaagatctcttaggtaatactcgcctccgtcctcttcgatgatgaagtggttcttcgatatgaaattgtaatcaagcctaatgtctgagtacctatcgcgtcccacacttaagctctctctaattggatatatcttgtccttcgcttcgtcatcgatgagctttaagtaagcacccttcttcgaagcttgagtagactttatatcttgaaaaatcatcttcgctatttgaaagacgaagagatatataataattatgaatacatactttagtatcatagacagtattgaaaaaaagtccacagccttcacctcatatttattttatcacaaagcaagagtttttgctatgaatattgaaaaatatttactaatctgttagaattaattaaagaggtgtattatgaacgagaaggcttataactatgcaattaaatatttgaagaacatcaagactaagaaggacgtctacgactacctaatacgtaaaggctttagtgacgaagagactagtgaggtctgtgactatatagaagaggtcggccttgttgatgatgatctatacattaagttcttcgttgaagatagctttcgcattaagaacaagggtgcaagaaagatcgcctacgagttaaagcaaagaggcatagatgatgataagatttacgaggcgatggaagaagcaaaagatatggaatgcgatgcacttaaggatgcatatgaaagaaaactcgacgcaacaaagagcgagactgaccagtacaaaagaaagaacaagatcattcgcttcctaataagtagaggcttcgactactcagacattaaggacatagttgatatataatgagtaagctctactacatctacatgcttaggtgcaaggatggttccatatacacaggctacaccgacaacatctacaagcgcatagaaaagcacagaagtggcaagggtgcgaagtacacaagagggcgtggaccctttgagctcgtccactacgagagtttcttaacaaaggaagaagccatgcaaagagaggcagcgattaagaagctgactaaagaagcaaaattaaaattaatagagcgtgacgcaaaaaaagagtagaccaatctgtctactctttatctatatctatatcttgttttttatctgtacttaatctcgtagttcttttcttcttccctctctttgccatcgagcccatcgctatagcgacaaagagtgatgtaaaagcactcgttaacgatataactacaagcttcaaatcaattaccgatgtttgcaatatacttctcttgttgccctttattaataatagaaaggcaaagactatcaaacctatagtcggtatatactttacaaacttatacttcataaagcttacgtgcaagaacaaaacaagtacggcaaagactagtgcgacgacaaatagtatcgcagtctccgtcatatatggtcttacctctgtaagtattttttctaaaattgattttatagtacccattacttcaccttcaatatgattacttattatacaacatatgaggggtatttgcaagcgtaattattttatctttctagctcctaaggatatgaatttctctctccacatattgccatactgaccaagtgcccactcattcattatgatgttcgagtttagatccatagtaaagacttcactagctaaacgagacctatgcacctcgtatgcgcacagagctttgtccttatatatcatcgccatggccttgttaggagaactgaacgcatctctaagtttagggaacttctccttcaacacttcgtaattaaagtcaagctcgtcaaagtgcactaagtttttgtttggcctcttcataacgaagctgtccttatatagaccagggtagtttatgtcttcctccctcttcttaagtatccagtagccgttgttcctagcaagtgtaatgtttcttgcatcgtttgatatgttcttgaactcgtccatgctataggtcttagtgttatcagtctcttcatcttctataagctcacgaagtgatgccttattgttctgactatagttgtctagaaaatatacacctacgtcgccgttgtccttaaacctcgactctatctcatatgaaaagtagtcgttgccaacaaagagaatctttctagctctatctagctttctatttttatttgcgtcatatagtacaagtgactcaaaggtattaacatggtcattaataactaagaaatcttcttgatatatgccgtccttttcaatatttacgcactcaatccttgtaaagccatcgcgccttggcactagtaaataatcaagctcatatgcctcgcccttgtatggctgcatgtatatggtcttgtacttaggcacgccatcttcatcatttctaagccctatcaggaaacctatgtcctcatctatggcctcgtgggcttcatctgatgtgctctcaacaagactaactagctctttaagatgcatctcgtcaagtgtcttgtctgtcttagtaagtgtgtataaatacttaccaagcttagtcatcatcttgtcaccattaatgataaggtcgtatctaaagcttccgtcctcatacactgagtacacgtctgcatatacgcctttgatgtccttaagctctatcttgtagttgaagaagaggtagtcacttaagagcactctcctatactttagcttcgcacccttgataagatcgttacctatgatgtagtcgtcatcacttatatagatgtagtcgtccactcttagtgatgagtcgacttctctttgcttctcttcaacgtccatgatatcctttacttgccacactccatataggtctggattcgataccctctttcctgtattacatgaggctagtagcagcatcattaagatgaggctcaataaactaagaagctttttcatctttgatctcctttgcaagctttactgtgaacttagtgccctcatctacttttgattcgatatatatctctcccttatgcagctcaactatctccttaacgatggcaaggccaatgccagtatgcgactttgactttttacctgtgtagaacttttcgaagatgtacttaagctctccttcttctatgccgactccttcatcaataacatctatgaagtagctgtccttgtcttgataaaggttgactgttataagtcctctctctttattaaacttaacagcgttatcaagtagattaattagaacttgcttgattctgttttcatcaccatagtaaaggtaggaggcgtcagcaatgtttagctctatgctctctttgttcttctcaagcttagggaagacctgcttagtgatgtcttcaacgcaaatcttaaggtcgaagtagtctttattaagtgagattttgcccgagataagacttgagaagtcaagcagctcttctaataatgagctaagtctttcactctcactaataagtatatcgtgagcaagctctgttgtctcttgatcaagctcgccatcttttagtgtatatgcccagcctgttaatgatgtaagaggcgttcttagttcgtgtgagatgtttgctatgaactcattctttaactcgtcatgcttaattatctcgtctgatagtatgttcatcgcgtttgatagcgcgcctatttcattcttaagcttaagtctcgatttgtccttgtagttacccttcgacatacgcatagctatccttgtaaggtatttgattggattaactatggagtcgcttatgaagttagagattattatacaaacgagcaagactaaaaggcttattgccgctatgatgatggaaagcttgttcgtaaaatcatcaacttgccctaagccgaaaaataatcttaaataatatataggctcctcgtcgtgcataactgccgtactaactgttaagaccctcttacctgatgcagagtcgcggcctatccaagtcgcacttgcgttttgaatgagcttgtccatctcaggtgctgtagtgtacttataaccttccgagtcaaacagcactgtgccatctaggtctaaaatttcgagcctttgatcgatattgttgtagaagaggtttggatgctgattgattgcttcctttagcttctcattgcttgtaaacccgtaaaactttctgtcgtagtcaacatacatgtccaaggtgtccttcgcgttctctatagtctgattgtagtagaacctcttgaacatatacgaggagaatatattgatcagtacaagcgatataaagacaagcaagatgaagttctgcatcaagctcttctttaaactattctttgtattcaaaagtaaatccctctccccaaatagtttttaagtgttcaggattcgatggatccttctctatcttctttctaagtctggatatgtttacatcgacaagcttagtatccattagatagtcgtaaccccagacagtctttactatgtcctttctcttgacaagtatgtttgcattctctattaaatacttgatgataccaaactcagttggtgttagctctatcagctcatcatcaacatagaagtcctttaggtttaaatcgactctgaacttgccaagaacaatttctttctcttccttcttctcattgataagccttctactgatggacttgatccttaagataagctcctttgggttgaatggctttgaaaggtagtcatcagctcccgactcaaaagcgtttatcttgtctatgtcctcgctccttgcagtcagcatgatgattgccatgtttggatagacttctctaagaattttaagaagcgtaatgccatccatcttcacaagcatgatgtcaagtactgctatgtcaaaatttatttctttgcacgcttcaagtgcttcttctgcactctcatagtcattaacaaggtagccttccttctctaagtttatcttaacaaacttccttattgctgcttcatcttcaactaatagtattctgtaatccatatcatctactccatatcaataaatttatcttttgatagaataaatagtctcgcacttgcatcctttttgaatatagtcttaacagcttctacatacatagacatctgcttagcatatagctccttaagtgcattgtcatcaagactagtgagcttgtagtcagtaatgactactctgtcatcatatacatctaatctatcaataacccctgtgtatattatatcatctttaatgtaataatactcgaattccttatatgttttgacattcttaacaattttgtaaaacttttcatagttcttcgcacacattagtaataaattttcttccctttcgctcaaagcatatgcgtccactgttgccttaaaaactttatcgaagtcctctccctcatatgcttcacaaaatctatgtgcagctgagccaagcttcttcttgtcacttaagccactttctaaatcgtctctttcgtcatcatataccttaaaggtgtttacattataatcatatgcatatttagacctcgatggtagaggcgcatataaactctcgtacttcaccaggtccttcgttataaggtcattgtcacttgcaaggcactcttcttcatctatatcgagctctctttcataaaagtttgcctcttcactagtcgcatcaatctcttctatatatgggttgaagccgctcttgccgcctgacttatatatgatgagctgctcctttgctctcgtaagcattacatataagtttcttatcttctcttcttcatctagttcactatcgccactttgtgccgccttgaagtttgagtaaagatctttaaaccttaagaagattttatcatcagaaagccttgcaaagctaaagtcgctcgctcttttaaaggccatctgtgcacatataacaacttttgcttcaagacccttcgccttgtgtatagtcatgattctaactatgtcatcgtcctcgctgatgtatgagggctcagctgctcccctatctcttagcataaggatcttatctacaagtgtctcaaaactcgttatgcccgactcatagtatgatcctagtctatctaagaagctacgaacgtttgtgtagctttgcgcgcctctcttccttataagcagcttctccatatacttagtctcatcaaagaaggccttcaatacttcgtcaagcctttcttcatccttcatgtgtatatacttacgaagctcttccttgtaatacctaaagtcatctctgtcctttgtcaagaatatctcatcgtcatctatggcatagaagctgcttcttaaaagcgcaattagtgaaagctcgtcctcataccttaggtagtgaatgaagttgtagatgtcttccatctcgtcacgctcgttcaatgctttgtttgctgtgttatatacaggcacctttgacctcttaagagccttctctatggcagatgagtctctattggaacgcactaagacaagcatatcgccaaaggcaaggccgccctcgtttagatccataatcttgtttgctatggcagtagcttcgagctctctatcgttcttgtcattgtaattaataagtttcacttcactatcattaatgtcgcccttaaagactaggtcctcatagtccactatcttatctttaaaaagtttgttgacagtggcaataattttttcgcctgttctataattttcgttcatgctaatggctgtggacctttcatcatttaaaaagtccttcttaactgagcgatatagactcacgtctgcacctctaaacgcatatatggactgcttgaagtcaccaacgacgaagagtctgtctccaccaagcgcctcattaagtaggtagtatatctccttttgtataggtgaggtatcttgaaactcatcaaccatgatgtagctaagtctacccttaagtgtctttcgcacctcttccgtcttaagtaaatccctaaagagtatctccaagtcattaaagtcaagagctgcctctttttctttgtagctcttatacttagcatgcgccctctcaagtaatgtgaagaagtccttatatagactaagtttatttacttcaagcgctttaagtatgtagcttgcgctgtccgtgatggcatcgtagcactctttcttttttgcattcactccgatattgtatgcaaagtcgttaagtaggtttatattaagctcatctactctcgcagtccttagtgcgtctaatgagcctttatatttatcaatcaccttgtatagcttagaagtctcctttatatcgcctttcacttcatctatggcgtccgccatcttattaagagccacgcttatactagcttcgtcatagcatgaactgatgtaagttatagtattatcatacagcttctcaaggtccatgcccatagtcttctttatgatgctcttaaggctactcacaaagttgtcgtcgtagtttctatcaagagccttaaatagctcttcatagtttttctcatcaagcgcttcccttactgccttatcaagtagctcatctgcttcgtcctcttccacaactaccgcgcgtgggtcaatgtttgcaacgagcggaaatgcctttagtaccttgaatgcaaattgatgcactgtagaaacatttgcgacaggcatattgttgtagtagtctttgaaccttgcatcactctttgatctttcgtagacaagctttgagattctttccttaagttcgttacttgccttctttgtaaatgttatagcgactaccgacgaaagtacatcgtccgaatttatgcatgagaagtcacccttgtccaagatctttacaaacctattgacaaggactgtggtcttacctgtgccagcagaggcgtcgagcaaaacatttttgtctattgtatcaacagcaagttgctgcttttcatttaagttcatcactctctccccttcttgcacatgcttctatattcacaatacattaggcacttatcctcgcttgcttcgtcaatgatattaaagctatatgtcttaattttttctatcaaagatttaatttcttcttcacaagcatcagcatcggtaggcataaagttgatattgccatcgaacttcgatattgctacaaaggctgcgcctatataggcaccacttggcttgtagtataatgcatacgcagaaagctgaagactgtccttcatagtggccttgctccttttgtagtcgatcacgagtagttttccagtgatagtatcctcatcgactctgtcaatcttgcctttgatgatatgtccatctacactaatctttatgctcttctcaaggtctttgacaatgtaattactatgcttcatcctctcctcatcgaaaattataaagtctttgatgtagctctcgatattctcaagttcaaagcccaagacgtccgcgtattcattcgtgctttttatattattaatgcatctttccaagatcccctcatcgaagatgaccttagtgccgataaagtttctgtagtaaaactccaagaccttatgcatgtaagtgccgatgtttctcgccttcatgtcttgctccacaggctttatatcgtagatgtaactaagtagcgctgcatatggacatgtcttaaatgtctcaagaaagctcaccgttaatttatttttcacaaaatcgtcaaccacgctcgtggctgagtaactctctagtttgccgttgtacttcgagatgacaccttccgctctaagtttattaatctcatcataatttattagcttggatttagaaatatttttatgtgcctcgataagtatcttctgctcctcatttgtggcaagtgaagtgctcttctctatagcggcaaggctccttatacgtgtccactcatcaattttaaactcgttaaagaaagatgacgcaccttgatcagcatccgaattcgttcttgctgagtaagatattgtgatcttatctcctgccgccttaaaaagtttcttcatcaagttcttagacagccagggcatatactctctcttgtcatagttaagctctttatatatgctatctaataaaaagttctcattcatagtctttggaaaagcatcaagactcataccaagtacataaacaagcttgtactctcttaaggtatcgaagtcgccattatatatagatacgcctgcagctatcctgtccttgcgtctataaacctcgtatttaaaggcaagcttaagtagatctacgagctcgtctttgcttatagcatcaccgtagacttcatatatcgcgtccattatcttagtaaacttatctaaaaggacctcatcctttgtgtacttagaagctagttcaagtacttctgcctttgtaagttcgtcctcataagaagctagatccactaataatttatcttgccacactaggtctttcatataaagaaccctgtttttgttcctaggcacatggtaggagtcaagcatctgtgttagaagcggctcctctgacttatccattaggtagataagagcgtcttcgtatgagtagccacgcttcaagacagatcttttaatatctgtaagcacgtaatcaagctccgcctcaactgagtccgcacgtacaaaatctatgccctcagtatcaagtatctcttcgttaaataagttctttgagacttgagcaaagcgcgccttgctcacctcagccttgtgatattcatccttaataccatctaagtaagagataagttcatctgatgcaaagtcttgctctataaatatgtttaacttcttgtctaaatccttcgcaagcccaataagatatataagcttattgttaagctcgttaaaaccgatgaagtatatggagtccgcttctttaatcttaagatcatctaatttaatattctcattagaggcaaggtagccctttttctttagaatatcctcgtagtctaagtatatcttcttatactctccgccataggtcataaggtctatgtccttcttatttgcttccttaatcgcttcaaagatgaggtcaatgtaagatggatacttaagaaacggcatagatccaaggttcatatctatcgccttctttatgataaggcgcatagacatatccgaaaggaacttatatgcaccaatcgcataccttatgtaaaactcgtcaatactaatcacacttgtatctacgagcatgccgaggcgcttcaagccctcttggacaatgaagtctttatactctgtatttttagtgatgataagaactttgccaccctcatccatgcgcatggcatcaaataagttctcggcatccttcttcgtttcgtataccttaatcattgaagagactctccttcactttatcataagtcttccaagcgtttgcatagaactctttattgcttaagtagctaaagaaaccatcaagcttaggaaatgaaattttgtatgagtaaagcagctgattattaattaagcttgcaagcttagcgttagtagccgcatcaccatactttctatcacctactataggatgttttaaagtctttaggtggaagcgtatctgatgagtcttgccagttagtaaaagcacctcaagctcagtaaaattgtttttcatatatatagtcttgaagtgcgttatcatctcggatccatcatccgaaagcttcatcatgttcttcttctcgtttttctcatacgaaacctcaaaagtctcatcaacatcgaagcgtcccttgactatggtcttgtagtacttattaatctttctttctttgataagccttgtcatctctttaagcgcttcatagtttttgcatccgatcaaaagacccttggtgttcctatcgagtctgtttgcaagcgctggcctaaaggtattctcgctgcgaggcgaaaattcatttttatctataaggtactttatgaagctatcgacaacgttcttttcaaagccgtccttagtagcatgactaagaagcccctcatccttgtcaatgatggcgatgttctcatcttcataaactatcttcaagtcgataatgtttgggttgtacttcttttccttttgagtaaacttatcaaaggtctcatcagagaagaagaccttaagcacatctccagtaaagaccctctcttcgccactcgccttcttgccatttaaaactatgttcttctttctaagcatcttcattagaaaggacttagtcgcattaggaaaaaatttcacaaggaagcgatcgagtctttgatcattatcattttcgtttatttttatctctttcatcaatttcaccttttattttgttatattatatgatataattataatacaaacggataaaaaaataaagttatcaaataagaggtgtaagaatgaatttttgggaaaaatttaaagactttttgtataattcgattgattacataattatgcttatagtaatcatagctgttgtatgtataataagctggagacttgacatactattcgttaacaacggtgcgaactccatactaacaaagaacattgagaacagtaaggacgacaagaaagtcgttgaaaacatagacgaaggtcaagacgcaaatgctaacaatgaagaaggtgctgacaaggtagaaaaaagcacaagcgatactaacggtgaagaaactagtgaagctcctaaagatggagaagacgcaaagccccaagaggaagaaactagtcaagaagaaaaaccagcagagaaagctccagaagaaaaaccggctgaaccagctccacaagcaagcggtacagttgaagttaatatacctgctaagtcactaccaggcgagataggtaagatacttgagcaacaaggtcttgttacaagcagcaaggacttcgttaataaatgcgttgagttaaaacttgacacaaaattaaaatcaggcaagttcacaatcaataagggagcaagccttgacgatatcgttagaactatagcaaaatctaaatagacagtataaaagccagacttaagtctggcttcttttatgattaaatattactttttcatcgactctcgaattttttgtagagtcttcttttttatatcctcattcgcgcactcactagctagatagttctcaatggcatccttcttcgtaaagtatagctcgcacaaaagccatgcagccgccatattgacatagtaagtgtccacacttatcttcttaataagatggagcaatctctctatgtatatggcattattaaagtgcttaagcatgatgactagtcctaagcgcacagtgtattcttccatgctctgaatgtatgaagatgccttatcaaaggcagcctccttatgagccttatcaaagcgaaactcgctcgcaagtaagtctgtcacctcccaactatcgatataaggcaagaatgcatcaagtgatttcatggcatcttcgaactttgaattcatcttgaaaatgcacaaggcatataaaagcttctcctctctataagtgaatgaagagtcactaaaaatatcaagattagaatttttccttacatcacgagctagactccttaaagcgcccatgcgcacaccaagtatgctccgcttctcaatcgctggagtgagcttagcaacaaagtccttatactttgcgtccttcttagcatatagctcttgaagtatatagttataagtcagcataactacgcctttgccttgcaagttaattccttcacgcaaattttgaaaacacgtgtcctaggtatggctgccctcgcatatacaaatttttcgcttggtatatggtacttttgtacaaggacttcgagtgcatcctctttatcatcatattcaagaacttcatatactgtccccctacctatgacagactcgtagttcatagtgcagtagccgcgttccttatccatgatgagcttatgattagcactcatttgaaaactaagagtagctccgtccttaagaaagtcatactttcttccatccatcgctccatgtatatataaagtgatctcgccaccttcttctctaactccaaagttaaccaccaagatgtatggcgagacttcatcattgaaggcaagcacgacatcatcgcagtccttcattatcctaagtatttcatttatgtcctttacttctctattagcccttctcatatttacctcccttatttaatctcacaagtaagcacagcctcaaagcccgatggcacttcagatattatcatgccattagcaaagtaagctgcacctcccttagctatgtagtcttcatcaaagtcgtagcacacagaattcacatataggacaggtgctttaagtaaggccgcctcttttgcgtactcgtacttttcttcttcgttccaaactttaggcgcaaaatcagtgtagacaggccacagaaccaagtccttgtcaatcttactcgcttcattaagatattcctcgtgccaaaagtcgccgcatgtgccgaccataagcttcttatcttcaaagtcaaaagtgtgaaagccttcaccctctttgtaatgctcatcagcgatagcttccttccagccactagatacacgtctaaagacatctataagctcgccacccttgcctattgtaagctgtgacgagtaaagagcctcgttaaaactctctatcataccaaaactcacggcaatatcattatccttagcacaggcgcgtatctcattaatgatatcatcatcaagcgatatggcaatctccttatcaatatcatagttccaagtcaaagcctcaaagccatgcaagaacgactcaccaaagacaagcatgtccgccttgtgagagtattcattcatagccttgataattatgtttttattatgcaatacatccttagttttaaacgccaaagacattaaattaatcttcatatgatgacctccttttactatattataccatatacatgaaaaaagacgccaagcaaattccttagcgtccatgaatttaatttaaatatttctcatacttaagcttttgaataatgagaacttactaaagcgctcaccataacaccgagtaccattgtaatgactacagtgacaatcgctttctctccgcttatcactcctttaaatatcaatagcgattcagcagctagtaaaaaaccaagtaagagtaacgaaaggccagttgccttagctaaaagatctttattgacatttgagtcagctttatatccagccaataactccaccattttaaatttccatagcattgatccaataattattaatgtaagacctgctaataacgatgcataagccataatatacctcctattcattcagaactatcattcttccacttttgaaatgctactttgaatttctcagcatttaatttaaaagtaagaccatctacatacttacctttaaacttttgataagctttgtctgtgtgtatcagctcaaaacctaactttctaaataagcccagtaccggatagttttcagaccatgtttgagtataaatatcttctttgccgttctccaaaagccaatctatatacaatgaccaagcttctgccccataaccctgcttgcgattttttggattatagatatcgataccaattgttagatttttactctctttagtatattcataattttcgtcaatattatacgagttaatcctacctatatgttctccagtatctatgatttcaatttctctagaactatatatagatattgggctgttcttttctagcttcaataaggaaaactctctatattcttcgatattaaaatcattttcttcccatggagcatcccactccatccactcaatttctatagtattccatcttatatagtcatctatatcacttttagcaaaaggtcttaatttaattcttttacctattacttccataagtcacctgccgattatttgttttatattttacttatatagtagcttgttagaagtgaggcgggctatgcgccctctaatactctatctagattaataccgtgagtcacgagatagaacggttatttaaaattctatcaacgccaaagtttatttactcaaaatttatgagataaaattagtgtatttttgtagcttgagatttttacactccgccaaatttcgctggaaaatttgatgagaaaggcgatgtgcagaatttttgcgagtgagtcgtatagacgatacgtcgcagcgagcaaaaattaaaaacaatcctttatcgcaaatttaacgcgaaattttattcccactcttcttttccaaacatccggtatatatcaaaccattcaaaatactagattttattttttctaatatcagcacatccatctaattataggacattttcaaatttttagtcccgtcccagtcccagtaccggacaataaaggcaaaaataatctattaaattttaaagaatattatcttccttatggaatccttaaatttgtattttatactaagtttataaaatgaagaggaggttcatttatatggaaaaattgatattagaaacgaaaaatcttactaaaacttttggtaaacaaaaagcagtggatagtatttctttaaaaataaaagaaaattctatatatggattgcttggacctaatggggctggtaaatcgactacattgaagatgattaccggaatgattcataaaacatctggagaaatcttttttgaaggtcaccagtggagtcgtgacgatttatcagatattggtgcgttgatagaaatgcctgccttgtatgagaacttatcagctagggaaaatttaaaagttaggacactcctactaggattacccgattctaggattgatgaagttttgggaatagtaagtttaaaagatactggtaaaaagaaaagtggtcagttttctttaggcatgaaacaaaggctaggtatcgccattgccttattaaataatcctaagcttttgattttagatgagccaactaacggacttgatccacttggaattcaagaattgcgtgatttaataagaagcttcccaaataaaggaataactgtaattttgtctagtcacattttagcagaagttgaacaaactgctgatcatattgggattattaataatggaaaattgcaataccaaaacattattaatcatgatgacaatttagaagaactttttatgaatgttataaaaagtgggataggagtgtaaaaaatgatattttatattcttgctgaaaatttaaaacataagggcactttcttgaagaagttagtagttcttatgccaatatctttaatcttattgtccttatttcttatgcccagctactttactaccaattcctataactggtggtatgtaataataatgccagcaacttttgccttaataccagcaatgatgcatagaaaagaaagtagaaaattaaactacagagcagttttccctctaaatattaatctcaaaaagttatgggtttcaaaaataattacagcatttatttatatgagtattgctgctataattcatatgctaggagtgtatatttttcaatttttaattggagagcaattaacacctaactatggattttcaacattactatttgctagttccttactaataatagccaatatttggcaaatcccattttgctttttcttggcaaaaaaatttggatttattgcaagtattataattaatgcagtattagggttaggattaggaatcttgttgtcagacggtgctttttggatttattgtccatattcttggggaattagattaatgattcctgttatgcatattttaccaagtggtgttttgacggaagtatcaaatccaataatatcaagtacatcattatatattccttgtgttttatctgtatgtctatttacattacttacaataataagtgcaaattggttttcaaagcaagaggtgaaataatgataaacataataaaatccgaaatatataaaatcaaacacacctggcttccttggattcacataatcttacctatagcctattcttcattattctatgtggcatcaaaaactactggattaaaaaattttgaagagagtgatataatacaaacttattttatacttttaggagcagtaatcccaataatattaagttttattacttcaaaagttgttgatatggaaataagtgctggaaaatttcaaatgcttttatctactacaaaatctagaactagagcctatataggaaaacttattgtattagaattgggatttattatttctctgactttagcgattataatttttgcaatattgtcgggatatcaaaatatcttagattgggttattgaatttttcttaattgttattagcagcttttctctatacatgattcatctttgggtatcaatcatattaagtagcggtgcatctattggattgggttttctagaaacaatgattaatttactttcaataactgtcattggtgatagtatttggtattttttaccttgtacctgggcatctagacttccagctatgtatattactatgagcaaggtttcggattggtcttatttttacaaagagttgagactgtggagttttgtagctttgtttattatattaatcctatttgtttgctcattagtttggtttaataagtgggatggaaaatctgttagcgaatagaatagaggcatttttatgaaaaataaacataaattattagtcattgcgataatctttgtttcttgtttctgtctttcttcttgcagaaatcttagatataaaatggatcaatattctagtgataaagaatcttgtattttgaacgatgaagatgtaagacaattttattataaaaataagtcctacaccattcttgatgaagattcttcaaatgaagatataaataaatggattggagttattagaaaactagttgcagttgatgatggaggtaaaataattaaacaagttgatgccaccaatttaggcataaatagtctagacaactttgcaaaagatctaaataatgatattcatgtccttcaattctttgatgtatatacaaatgataaagctaaagacacattaaccgtagaagtaaatggtagcaattacaaagcagttcctacaaataatataaataatgagacaaagatttttgattttaaggaacattcgagagaacaaaattcagaatttcaaataaaccccaaaaatgctactcagttattttatgatggagcaacctatcaagttactgatcaggttgtctcagaagatgatttggaagattttataggtattattgccaaagatgttgtatttgatagagatactaaaaatataattataaaagaaaacttaggtgaaattgactggctaggtaaaaataagtctaaacgtgaaacacggttttatttagatgtttacaaaatttccgaaatagatattgatgatggatttgcagtaaaagtaaatgaccaatatctaaaagcaaaatccaagtaatatcttaatgataaagtaggtattttataaaaaatgaggaggtgataggatgtctttaattcttgcagttgatgacgagttagatatgcttgatctaataaaaaacattttaaaaaagaacaaccataaggtcgatgtatatcaaaaccctaaagatattgataatagtaaacttagtaaatatgatttgattttacttgatgtgatgatgccagatgttgatggaattagtttttgcaaagaaattcgcaataaagtagactgccctattctttttttaacagcaaaaactatggaagaagatatcgtcgagggattattaattggtggagatgattacatcacaaaaccatttggagcagcagaactagtagctcgtatcgaagcccatttaagacgagaaaaaagagaacgccacaccagtttaaatcttggtgaaattcgatttgatttatcttccaatgaagtgtttgtagcggagaaaaaagtttatttgacaaaatctgagtatcaaatttcagaattactagcaaaaagaaaaggacaagtattttcaagggatcaaatatacgagcttgtctttggatttgatggtataggagatgcatctgcaatatcagaacatattaaaaatattagggcaaagtttcaaaaatatgggaaaaatccaattgaaacagtatgggggatcggatataaatggaattaaaatcaaaaggtcaatctcttaaaaatattctttttaaatatttgttaagtattgcactaggactagtaatctcagttggattaataatagcttttatatctgcttcttaccaatttaaatggatatttcctgcaaactatactgagaatttaattcttgaaaaaagaacagatattgccacttcaaaaaatttcgaaaaatcatcacttccagacaatacatcttatctatttctatcaaaagacgataaagttatagaaacaaatatgaataagaatatccaagatgtagcttttaactatcataagggatctggtaattccaatgccaatttatcctttatggaaataaaaagattagatggatatgtacttgtagcttatgaactaaagccctattataaaagttcttggatgcaaaaaaatctaccacaagtaaataatttatttctaagctcacttataatattttgtcttattagtattattactatcacattaatttgggcaaagaaaatatcaaatgaattaaatccattactagttgcttcagaagaaatcaggaaacaaaacttagacttccaagttaaaaagtctaatattcaagaatttaatgccatattagaaagtttagaaaaaataaagttagggttaagtgaatctttaagaacaaattggagagaggaagagaaaaaaagaaatcagatttcagcattaagccatgatataaaaactccagtttcaattataaagggaaactcagaattattaggagaaacaaacctaacagaagaacagcaaacatatctaaattatattagaaaaaacacaagccgtattgataaatatatcgaaactttaatgcttgttaataaatctaagcaagcaaatgaattaaattttcttgaaattaggacagaaaaatttgtagaaaatattgaaaaactagctacagaattcacatcaacttacaagttaaatcttttagaagatattagttataagaatgattttttaatagtagatttgaaaaattttgaacgagcctttctaaatattcttagtaatgcagaagaaaacagtcctaaaaactcaaccattaagctacttataagttccaagaatgataagcttcaaatatcaatacttgatcaaggacatggatttacaggtgaagacctattatatgcaacagatcaattctatcaaggagacaaaagtaggcattcaaaagaaaactatggtataggcttatttgttgcagaacaaattattaagatgcatggaggaagtcttattttagacaatagaactgatgaatgtggcgctaaagtcagcatactattgccagtaaagaaaacttagggtctgtaaataattttgtgtatcaacctaaaacctgatacagtggtaagggttgatacatttttttgtatcaatgtttgtgctttcctaaggaatagacttttacttaattttacacaactttaataaactgtcaattttttcatgaaaatttacagatcattttatatgatgtatttttgtaattgccatgctaatcccagaactttcttttgatttattgagaagaagggaatggatcttccatatttctcttgataagttttctatttctttattcattgaatcaatttcacttttgtaaataacactagtcgtattagtagcctttgcaatctgatttatattatttgttgcatttcaaagtaatcattgaagatatctaaataaattaattcttataatatgtaagcaaaagaccgtaactttatgatatgtaccctccttactggtttgttcagtaaagagggtacatatcatgacttctaccgtcttattacagttaatcattaaataaattttgttaaatctaaatagctatactttctactttcttttataggtggagtatcatatacataattaatgaattgattccatgataacatctttgtgttttcaaatacttcatttataacttcaatttcgttaacatctaagccgtcatagtgtattaattctttatcatgtttaggtcttactatatatttaatagtaccaaaatttgaaaatgtactttgaatactaactgtcttatcttcatcagcctcatcaagcacatcggatacgtatggaccataatgatcgaaataccatgaaatttccgtcatttgcttcccatatttttttgtatattcccaatctattaaatagactaatttggttattctcgtttttgttaaatcatctccgtaaggataattcttaacaatatatagtaaaacatttcttaatttagttttcataagactcatcctccttcaacttattacttatttcaagcattgttttcaaatgaggtataattaatttttcaatttcatcatttaactctttgggtgaaacacttatgtctggattaattgtttctattaataaaattcctacattatttttgttatcatctttgactaatctagcaaaatacgccctgctcttcatggaaagtttttttaaggattcaacagacatacctgtttcttttgaaactgtgtcaaaatactttttctgtgtattttttggcaaattatttttataaaaatatggttttccatcattattttcaaaacatttcgctatatatccttcatttctaggatattcctctctattgcaaaaatcatataatggattttcactatacctcccaataatttgaaatttagtttcattaaaaacatataatgatattctatcactattgcttaatcttaaataatttgaaacctgtcgcaaaatctttggtaaaccagctaatgattgacctaaatattccattgataattctaattccttaatctctttattttcatttctagattctttttaaattttctttctttacttctttatctcagaaatctcattaataaaataaataaaataagcaaaagaaaatatccagaaattctcattaaaatattctacaaaggaatatctcgtaattattataggaaaataaataatgcaagtttacaaataaaacttaatttattttctcaatgcttttatccacaatggaaaatcttttattaaattaaatttacttcatcattaaatccattataactaactcgctcttttatactaacattatatgttatttaccaatattataacaaatttatttatatgctatcattcgattaataattgccattaaaatatcaaccgcaatagaatttccggcctgcttatacagtttgcttgaagtacaattttttcttcttggatgtatttcctctaatttgtctatatcactatcatcaaaacccattagtcttaaacattctctttctgttaaatacctatacctaccatttccaatatctattattccagaattaggtactctcatctgttttgtagaaatagtataagaaaaatctttaatcacttttagtcgccccctaaaactgttatctattcctttatttaaaaatttcagcatataaggttgagtcattgtgtaaagtccacttacatcttttgctaaaaattcacttagttgtatagtttcttttccctccaattcattaaaagaaaagttatttactccaagacgtgaaacaacaaatatcctcgcccttttttgaggtattccaaattccattgcatttaagcttttaaattttcttttatatccaagtttttctaactcctttagataaataaaaaaggagtccctcatatttctgatgtgtgatgtgtacccagaaaactacggtctaattttttgcccaaatgtaaaccacttggaactattatttagtttattctttttagcttccagtaccatttgagtaccagtagccatttttcattctcttcataacttgtaattaagccatattagaaaattttattcacataaatacagtgtgtcacgagatagaacggatgaagtaggcgaagatggaaaaaatttacgatgattcgtactaaatgtacgttgaagagtaaattaaatcctatcaacaccaaatttcgtttattcaatttgtgagaaaaaacggaattatttcgttcagtcacattaagcaaatttatgagataaaattagtggatttttgtagcttgagtttttcgctctcccaaatttcgctggaaaatttgatgagaaaggcgatgtgcagaatttttgcgagtgagtcgtatagacgatacgtcgcaacgagcaaaatcttttttatcaacaccaaaacccatttattcaaatttgtgagataaaacggaattattttgcgatgtgcagaatatttaggagtgaggcgggctaaacgccctcccatatcctatctagttcaatgccgtgagtcacgagataaaacggtttatttaaaactctatcaacgccaaattttatttattcaaaatttgtggaaataaatggatggattagacgtagatgaggaggctcacaaacgagtcgtatagttaatacttcgagtttgtgagccgacaaatcaagtttaagccgccatttaggccgcaaattttactcccactcttcattatcaatcatacgctgtatctaaaagcatttaaatcaagccattttatttttataaatattaataaatccgcttaattataccacattttattatttttatacccattccagtaccagtaccagacatttattcacacttaatcaattctaatacaagtgatactaacgatagcattctaaaatataaatattcgataaaagaactatttggtaatttcttttgtgttgtttctgaatgtcttatattgtatgaattaccaatttctgttaattcaataaattctttatttattagttcttcaatttcttcttgattacttgaaatcttttttataattttatctacggaagattttttatttgcacactctaaagtcttaagtcgttcaaacgcatcccatattttttcaagtcctattttcttttctctagatccttttttactaatatatattttagactcaagaatcaaattttttaattcttcttctgctgaagatgttgtacataaatttagcaattcttttgaatcattactaatgttatttccttcaatttctaattcatcctcattcattaatacccatgttaataatgcggcttttaatttttttaattctggcctgtaatcatattcttctccaagtaatgctgcttttccttcaactttaataactgaaattatctttggtaaaattagtacatatttcgtactcaaactattccacaaatcttgagaaccgtttctatgctctaattgttgttcaattacttctatatcagcttgtataatactaaacactttattttttttcatatttatcacctagctatatctaatttcatatcgttaattttttgatctaaatatattataatatctttcatagatagtttttttagagcttgcattaaattttccataaatgtaaagtcaatttctccatttttatctactggaaatttgatatatttatttttaactacatcccaaccacctaatttgtttttatatgaatatataggcaaatcagtaactttatttatacaagatacaaaaaacaaataaacattagggcttaaatttttatttttatctttccattcaatagcataggcatctgacaatactgaaaattctctagactgatagtacgatctatatacatcgctattagatgggatagaaataacattttttattatagtggcacctgtcttaggtgcaaaataatttaagccttgattcataaagcttgaagttaaaacgggaagaatatactctcctgtaggttctttaggcaatttctttgctttatatggtaatttctttgtttttactctttcaaaataatctcctattttaagttcttgccacttaactttctttaaattatctattgcacttatttctacatcctttagtttataatcttttaatcctgtaacatttagataagcttctagctcggagaaacgctgagcttccagttcggcgacaaaggattctataaactcaaaatctatttcattgtttttttgaggaagtaaaatttgtgaattcaaaaaagtgtcatttacatctctaactaaaacatttaataaaattggttttaatgaatttaaagctgttgtaaaaaatggtacagtactactttttacattaaatagcgggattatttttcttacaaattgaccagcataccattgtttttttctataaacaaagtataaatttctaattatctttttatattttcttaaatgctcgtaaagccttattctatgtgctttcgagtatttttactgtaggaagatacttcacgtttctttgcatatttcctcatgtcttagctgtcagaagtggtaaataagtagtaaattcatttgtactactaagcaacaagacgctcctgttgcttctctttattcaagcgtttcatttctgccattgcagaatcgaatgttgcatgtgcgtaatagttcagcgtcatggctatattagcatgtcccataatgtactgtaatgcctttggattcattcctgcatttgcatagttggtacagaatgtatgtcgcaaactatgtggagtgatgtgtggcaatttatcctcgttatacttattgtatttcttaacaagacctttcatcatgccgttgtaatcacttgccacttttggatagttctttctattaagaaagaggaaatcactatatccatcaatctcaacacgcttatcattctttcgattcgctaacactcgcttaaatgcttgataggcttcttcaaccataggaacttgacgttcgccacttttggtctttggtgtttcaatgtagtacccaatttcagtatctctcaatagctgatggtctatattgacaagacgattctcaaaatctaaatctggaagtgtcaaaccaccaaactctgaaatacgaagacctgtttttaagagtatcagaatttcatcataatttttgctgtaggttttatcagcttttgcaaaggctaacagtttttcttcctgttcttctgttagtacggtcttagggacagtatcatcatcaagaactgctttcagttgaaagtcaaatggattcttccgaacacaatcatcttgtatagcaatatagaatgaagcctttaaagaacgtttgtagttattgatggtttgataagcataaccattttcactcattctaatagcccattctttagcgtctgatggcttaatactgtcaatacttcttacacctaacttgtctttcttcaaaatatccataagatatttgcgtccagtttcagtgttttttctaacctttggtctttgagcgttctgttttgcgtaaagctggcagagtgtcattttctttcctacaacatcaataccatcatgaatgtctttctgtaactctgcgattttctctctaagtgagatacaatcacgctttcctgctggtactcggtctgtagccacaagtttccacgagtaaacaaattgcggttctccaaatgaatctatatatttgtataagtatcttccgtcttttcgttggctctctccagtctttaagattcgacctttattgtcacgtcttttttctgacatggcatttgctcctttcctttatggaaagagccttgatacgacttaatactattttatcatatacaagaccctttggcgacgctagattgcgtccaatgtatctataattttttcaaattgttttcgtttaatctgaatacgattgccattcataatcagccaatttgcatttttattttcctctgccaagcgtcgtagcttgttttcgccaatacgaaaatattttgacgcttcttcaatggttagggtataacgttcccaaataggaatgtcagtctgcttcataaaatcctcctttccaaatcacttatttggatttcataaaagttgttttaccagcaatcgaacagctttagcaaagctcacgggagttccacccctgcatggttctcatgtagccatactcattgcctgcgacggttttatcacgctcggactattgactgtatgggagtatcattatcacgataagaatgtcgttgcaggcaatcctgctaaagattgcttctcggatcactaacatgaatcgctcgctatctttataagataggtcatggcggttagttccgttggctcttttcttatcgaaacgtattcgattacttttattcagttttcaaagaacaatggctcgttagcctatcaaaacacattgaaagctcaatatgctttggtggaataacaaacctccctgttcgggaagcgtggaatggtttagcacgcttccacgaaaggagagaggatattacttaatttcaaatgacaaaatctttgtaatcagtctggtttccattcttccacgtaagacttcatcaacgaccatactttgattgccatattcatctttcataagtcgtagggaacgcttcgttatgtaccctctgtaatgatgtagaatctggttaatcgcttcggtatcgccatctgttgcctttacaatgagaggaaagggaatcataggatattgtgttttcattcttcaaattcctccataaactttttaattaaggctagtccactggttctatgccgatagacagtagaacggttcaatttcaacaggtctgcaatttctgaatcgctcatgtccataaagtaaaacagcagtagaatttcacgtttcttgtctggcaactcacgtaatgcttcactcaacaaatcattttcaacgcctactgataacccattgagtgtaaaaatctgaaagtcagttgaatagttatctgttgtcgcaaactggctaacaagataatcgccaacatccgaaaaggacacctcacgctttgcaatccttgaaagataaagcatataattctttcgctcgtcttccatagcacgtttacagatatagtcaaactgattttctattgtggtctgaaaagaagatggtttcatgtttctcaccccctttctgtctaggaaaggaagtgagccttgctcgtttatctcctttcactcttagtcccaatgtgaaagggggatttgttgcattactgataaataaactttgtaaaaaagttctgaatagccaaaaaagcatataaacagatttatttctctgtttacatgcttctgttattctatctatatgatttataaaaccacattggtggacgtacttatctattgcagatagacgactttttttgacaagaacccaatgtaaggaaatttattgtatatgatgtacttcatggcgacgttgacctccaacaaaccgccatttggaagtaatatacaatattttaacagcgtaaatagcactaccatataacggttttttttattggcgtttagtagtgctttttattaaatataaacctataaaccatataacacgtttttctatacctgtttttaattcagtaggaacaataaaatgtatagaggtggtctactatgcgtaaaaaagaagataaatatgattttagagcctttggtttagccattaaagaagctcgattgaaacgaggtttaactcgtgaacaagtgggagcattgattgaaattgacccacggtacttaactaatattgaaaataaagggcaacaccccagcatacaagttctttatgaccttgtatcgttacttcatgtttccgttgatgaatttttcttacctgctaataacttggtaaaaagcacccgacgattacagatagagaaatacatggatagctttacagacaaagaactatccttaatggaatctttagccagcggtatcaacgaagcaagaaacatcgaagactaattaaaagaatccatacataacggaaagagccgataaaatgagattgtattaatctcattttatcggctctgcgtctttgcgtctggctctgtaatcacagttactttgaactgctttatttcaattaaattttcttgtctgcatttcggacaatagagggggaatttttttaattcagtatcttcccttatctttaatcgtgttttatttccacatacaggacacaatatccacttgtagtttataataactatctcctcctttacactttaattcaaatctttattaaaaaatatttcatcttatttaacaagaaaccatatttatataacaacataaaatacactaagttattttattgaacatatatcgtactttatctatccgactatttggacgacggggctggcaaacaggttcaccggtagtaacatggtacccttttaactctgttaaacaaacactacgtccatttgtaaagaaagttaaatcactacgatattcttgaatacaccgagcagggatttctccactaagaatgacctcattatttttcaattgagtgtctacgatgttcgcacaatatttaggagcatcgttgtatgctcgtgaaagatattcctgtggcgcataaattttaaaactaagatatggctctaacaattctgttccagctttttttaagacttgttccaatacaataggagcaagcatccgaaaatctgctggggtactaacagggctatagtataagccatacttaaaacagattttacagtccgtcacattccaaccatataatccttgttcgcaaccatagcgtatcccttccataactgcattttgaaatgattgatttaagtatccaagagaaaccgagctctcatactgcattccacttcccaacggaagcggtgatacagataaaccaatggaagcccagaaaggatttggcggcacttcgatgtgaatggtatattctgcattttttaacggtctctccatataaatgactgtaggctcttttagttctatctccacatgatacttttcttgcaacagtgcactaatcacttccatttgtactttccctaagaaagaaagtataatttcatgtgtcgtagaatccacgtaatatcgtagaagcggatcactatctgagatttccaaaagggcatcaagcaacatttctctctgttcaggtttactcggttcaacagttgtttgtagtagagggtgcggattttcaatcttttttctctgtggcaatagttttgtatctccaagaacactatttaacttcaaaaactcattttgcaaaataacaatttctccagaataagccttatcgattttacataattcaccatttattgaagtatacatttctgtaatttttattttttccttttccgatattctaaccgaatctcgcaaatgcagtacgccactataaagacgtatatatgcaagacgctgtcttttttccgaatactcaattttgaaaacttttccgcaaagttcagactgacctcgatgtgttgatgaataaaatttattcgtaatcacttctataaggttatcaatccctatattgttttttgcacttccgtgataaacagggaacagggaacaattctgaaatcttatgctttcctcttgttcgagttccaatgcttctaatgatttaccggacatatatttctctaaaaggtcatcgtttccctctattaccgtatcccattgttcagattcggtaaagttcgtcacacacatattaggatacagttctaccttctgtttgattacaatttcggcagaaagtttctctttaatatcctgataaaccgttgataaatcaattccattttggtcaatcttattgataaaaaagattgtgggaatccccattttcctaagtgcatgaaataatatacgagtttgtgcttgtacgccatcttttgcagaaatcagtagaattgccccatctaaaactgataatgaacgatatacttctgctaagaaatccatatgtcctggcgtgtctatgatgttcaccttcgtattttcccactgaaaagaggttattcctgtctgaattgtaattcctctctgacgttctaaaagcgtattatccgtcctcgttgtacctttgtccacgcttcctaattctgtaatcgctccactgttatataataagctttctgttaaggtagtttttcctgcatcaacatgagctaaaactccaatattaataattttcatgtgattttcctccattcaaaaacccaaaagggcataaaaatcccagtgataaatacttttatcactgggatttttatgcataaccataggtatacaaagcatacagatattctctggatactttagaatcacatgataaaggtattcttaaactgggtacaaaaaactaagccctcctaaaaaaggacatctaattatttgttcccactatcaaattgacagtttatttaagaataccttgccgcatatttattaactccttttaaatagatacttaaataatagcacgtaagagcatatttgtcaaggaatctccaattttttatcaaagagagtacgtgattacaaaatagctgtaataatgtaccaatatttgttattctataatcttccaattactcccgttcttttcaagtaccaaatcaaattgagatacctgcgttgctttggtctgctggtcgatatactccactgtcagcgataccgtgacttgattatccttacgattgtgaataggatttaccagttcttgaaagatgtactcttttccgattggttttaatatcccgtcattcacatagtaggaaagttcactggctgtcgctgtaggatagagcttgaagaacgtcgttaaaaactcattgatttcattggttgtaatggaatcaaccgtcccctcactttcaatggcttttggtttataacttgatttcttaggtatgttggtaatggtcggattcttaaccagtaccatatttccagaaccatctacatagacactcactatataagcagagtggacggtctttgtattttctccctctgtaatgagctggtctacactgtaggttacattaaactcattgtcgccagttggctctaccgtccatatctgaaatcctcttacagaagacgatacaggaatatctttgcgtactgtatcaacattgagagcttgaagttcatctgtcagatagccttttagactttccattcgattatcaatggacttatcggattgctcccatgaatagtagactttcgcaaagttctctacaaaattttctacatgatgagtatcaacgtattccttttctatgatagttgtttcgtgaatagtatgagtatctatagctgtaaagtgcttgaatatcgcaaagctgaaactaagccctaaaagtacccacaaggcaatcacaacctttttatgaggattgaccttatagtagacacgaggtttcttttcctttggtatctgtttttctttattctgattttttctaaatttcatcattaaatcttcctttctcattgtttgattcgtcctgctcccactaaatgctgttgccagtaggggcttgttaagtcggcataaccgattgggtcgcctgcatgaaacatacggttattgccaaggtatatcccaacatgagtaatataagagccagcgttataggtagaatgaaagaaaaccaaatcgccagcttgtgcttccgatagtgggatatgctgggtcacatcatattgctgttgtgcggttcgtggtaagttaattccagcttttccatacgtccattgtgtcagtccgctacaatcaaaagaagtagtcggggaagctccaccgtaaacgtatcgccagccctcatatttcagtgcttcgtccatgatggcttgtaccgtatcatcatcaaactctgttgtgacaagatactgcgttaccagttgcacataaaacatattgccatagttgtatcgccagcccccattgataggtatggctatgggattggggtaagacactttttcgccacctgaatactcttttgagaaactttgagccagttcaaaggtatatttatttccacgattagccacataccctaagaaaccaccaccataattgtaggactggataaccgattctaaatctacactgagcctttcgctactggctaataattcactgaaatacttcacaccttgcttaatggattcttctgtactcaatgaattaggtggaagaccgagggattccgaggactgcataacatcttccgcagtaccgcccgattccacctgtataatcgcaagaagtatgttgacatattcttcaacgccatattctttggcatatttttctaccataggcttatgagccagcacttctgcggaaacattcacacctccataatgaatattggaaattccgctgtcctgttcatctgaaaataaaatggcaacaaacagaagcagtgagaagaccatcaagaataatccagaaccaccaatcactaaagttttcaacttcatggtttcttaccgactttcttaatggtggcggttttgattggtggtctacttcttgtattttgtagtggtactctttgaacagtagacggacgttcttttgtgattggacgttgtgaagttctatctgctgtagtggttgaagttgctggcttttgaacggttttttcttgaacggtattgccttggcgttccacttttggacttgaaaaatcggacttaactgctggacgctcttgtttggcttgttgagattccttatatgaagtctgaatattagactgttttgaggtctgttcatcatgatattgttcttgtcttgtagtcggtctttcatgaacagaagaagcaggctgttttttctgtttgacctgttccatttcagagcgacgcttcgcaatggtttttcgcctttgttcctgctgttccttgcgtccactggctctgtccgctttggtttgagaaatactactggttaaatcacggacattctcttttactttggattttccttgatatactgcatatcttgcattggtcggcaaatctttaacctgttctttcaaaccactagcagtgtctaccattctgtctttggtatcagctactgtaccgatggtttgaccgatacgttttccaagtgttgatttttcctttccgtctggtcgggagtgatctgcttgtgtccttgcagaactccccgaacccgactgtccttttttacctgtaacaatggcagacccagcccctagagtagtcatggaacgtccaagtttccgctgtagacggtgcatgtgagcgtgcataagcatacgaggttttctcatcacacgacttcccacactttgagaatcgttactctgtagagaaaacatactcattaaatcgcccagcttgaagtagattcctgcaaaggtcacaatctgtagaaaagcaatcaaaaagaacggataaccagccgataaggtatagagcatggttgaaatactaaatgctgtcgtaataatcaatgtgattccagctcgtgtcaaaatggtattaaagagctttgttatggctcgttttgacataccatcaaatgatggaatcatgcttaaaataaagctcacaggcagaaacatagcatagatgataaaaagtacctgcgagaaaatcatgattcctgttaataggaatacaaatatggaaatcccaatattgaagacaaataggaagaagactgtacctaaacggttaatggtctttgtaatggttagattggtattgcttctgtcttcaatttcttccgcaacaattttttctctgtcttcgccattgttggaatctgggctggtggagagcaggctttccacacggtcaataccgatactttcaatgtctgaactgttgtattgaagcagtagccacggttgctgaacctgtatggaaaacaggctatctctgattaagtccacgctgtccttgccttgactatcggaatggggcatgacaatcttcgtgccaagtgataaactggcattactgatgtctgatgaaaagtcattgatttttttaatgtagtcgggagcgtaggcaataaaggaagccgataggataaacaccagcacaaaattcataatggcatgaattgcctttgtggtttctctctttatcagtcccgtataggcaacataaaccccaagaaccaaaatcaagagtaagaggaatccaacatagaaaccctctgttgaaaatccgtttgcactcacaccagctaaggtctgcatattcttaccaatggaatctgctgtagcggaaatgaagtctaaggaataggcttcctgtactaagtaacctgtcgcattggaaacatacaaactgattgtccaaataaaattggtaatggcatatagtccatacatgacctgttttccaatcccgtccgaccagttccacggaagccagccccagctattatccacataaaaatccagttgatagttttcaagtgggtatcggctgtattcatttgccacattgaccgtatcatctaccaagcccgcagcttgaaccaccgttcccagcatggctaaaagaaaaatggcaatcacaagtgtgaaagccactgtcattgccactttacctagacgtttcagcatccagtttgattttattctgtttactattgatggtttcacatttacacctcttttcgcacaggtggtctggtatcaaaggcatggagcagttcttcaaatacagggtggaactgtatcacaccgacacgaccatataaatcactgataaggcattgcccgttttccaaatcacgcaatcgcttctgattgttttcgtcctctgggtctacaccaaaaaaggctaaggtctttttaatctcgttaaggtcagtggaacgaaatgcaaattttaagccgaggttatttttcagtttttcatctaagaggtcgtctgtattttgggtcacgaaatataccccagcgttcatagcacgaccagcccgaaccagcttcatagatagtgtttttccttgtgctacctgtaaaaagctccatgcttcgtctaaatctacaatcttgaaaatgcttcggtctgtatggataaagtctaaagcaaaggtactaatgacaatcagcatagcaacggataaaagctccatagtggtatattcctcaaaggaagtttccttgtcgggaagtaccaagtccgcaacctgtataatgttcagttgtttttctaagctgatagactgctccacataaccattactgaataataaatgtgcaaagtcatagtctgtaaaactttcgatatggtcggctatactggtacttagtggcgtattctcaacccgtaattcctcaatcactttcatcaaccctcgtacttcactattggttactgcacgaatggcttttctaaggattgggaagcgttccccatcacgagaggaaatccccgtaaggaatgtcagaatatcaatagccagtgattcagaatctttgggatttttcataatcacataagggtcaagtaagcctttgtttttctcatcagaagtcagagtgacgatattgatttcatgggaaatctctggcaaggtttctttccatctgccacgttctgcttttgggtctacaatcactgcttgtgccccataaagcaccgcataatagacgataaggttattcgcaaaggatttaccaccacccagcgaaccaacaaaagccgacgctaacgcattggttactgaacccttaaccccttgactggcaagagcaggtttcagatagacattgcgtccagtatctaagctgtagccaacataaatcccctcattttcccccagcatttgagtagcaccaaaacctaaaccagcgaggaaatcagaggtcacgtattgaatataatcattcatataacgcttgctggcaggtaaaaattcttcatgtaagccgagcatatccccaaatggtcgtaccagttttacgcttaaatcgtcataaaaatctttcacttcattacaacgacgtttgagttcgtcaagatcatttgctgatacccttaccacataagacagcttgtacatagattccttgctttggtctaaattggtttccagctcattcacactttccagagcttccgccacattggagctggtttcattatcactttgccaagcgtggttatccaagtctttcagttctttctttttattgcggacagtagatagggctttacgattcgctacaatttccacattcattgacgtatcaatcgggaatgtaaattgctgttgctggtagtagaagatttcagaggacgggaagtccagttctccgacaatgctgttaatggtaaagtaagctacatagacggtttcatcttcctgctggattttcaaatatcgctgtttttcttccaccaaacagcgagtaggcttaatcaagtcatagtatttaatcagcgtttcattatccagctttttctttgatagatggtactcatactcttcataggcagtgcctgtctgtccgtaaaggtgttcaatcagatagccgaagtcgtccttatctaacctgcggattttgaaacgacgagagattttattttctaagagcttttccatcttctgaaaacgcaggatttcatcattactcatactaacaaaatcgcccatcagcttatggttcacatcatagacaaaatcagacaaagcattttttgcttcaacggtaagacttttcatagaaaactcctgatcgttgagaagcaacttaaagccgataaagaaacggtagttcacttgattttcgccaatcatggatattaaagcgtctgtctgttggtcgattttgtcataggcaaccgctttgagcttgccagtgacttcatttttggaacgctcttgtgcagaacgtatgctggattctgtactgatttgtaaagcatgaattttgccatcacgattttgtgcgataagctgtctgaaagaatcatgcacttgtattttctgttctggacttagaaatgagtaattgtaaggaacaagctcatagtaagcataacattccccgtctttattccagacgagattgttttcaatgtatttaattggatatgccataaaattcactcctaactgctgtaatggcttcttgtggctggtttctgccaagcgttactttttttcctgcataggtcagctttggtcgcagtgcataagcaatgacagacttcaaaaatccataaggctttttaccatcaaaagtttttgtagacataaaccatgtgaaagccacaggaatcccaaagtatttgagaaatgctccctctatcatggaaagagggggcaagttgccaagtatcatcactgcaaagagtgacacgacaaaccatgtcatttgcgtaaaggttatgggaaacggaagtctaaaatcattgatagaatacagtaccttttccacagaccagatactggtatagcttcgtattttcttcatgtaatcaatcctttcataaaaaataggggtagctgattgagccaccccgtaaaatagaaaatctgccagtagtaatgtaccgacagatttaatagacgatttcaaaaatcccatgattggttgagataaacgttcctgaaaggtctaaatcccgaccataggcttgataatcaatatagttttgaagactagctggtacttcgcctaaagcacccgtttcttcaatgtagtagcgtgccacgtcatacatatcatcacaatcggaatgaatgataatatcctcttgatgttcgcttagttcttcaatgcttgaaaaatgagtgagcagagcagatagctccgattgtaattcttcgggtaattccgataccatttcccatagtcgattgagttcgccaatggaagtgtattcgtcaaccgtaaagggtaactcgtagtcatgaatggcgtattcctcatattcatcattcaagccgattttctctttgacttcctcaaagtcaatgggaaaggtaaaccacgcaccgaccaattcgccctcattgtatttgcctaaattcgcaatatagacttgcatatcgtccatatattcacgtcctttctttgtagagattcaaaaatccctaccgcacttcgtttggtgtaccattcctttgcggaacataagaaaaccacttatattccacaaaagaacggttttatttaagcaccaataatgcgattgaatagctctagtaaaatgtcttttactccagcagcgttgaagactaagccaaccgcaataatcgcaataattaaaaagccaatcagtttgctaaactcacgcttgaagccaagatacaagccaatcacaacgattgctaaaagcaccagtgattgagcgtttgatagaaaccagttataaaggttttgtccaaaattcataaaaatgttctcctctctatattcaatgaatttgtatttgagttatttttttgttgttatcacgtcctgttcttttactgactgttgcttcaaaatctgcttgtgtcggtctgtcagtttcgcatggtcgagaatgtcttttacaacctgcgtctggttgatttcatcaagtttaatcgcaacctttaaggtcggggcaacttgatgagatagccagttcagcgtcctttggaaggagtaaggctctggttttgtggttagttttaatcgttcacgattgttcccaataaaccaagcccattcttcattcagtttccaatcagaacgaggtttggaatcgtctttatctacaaaacggatataccgattgataattttaaaggcggtatgctctggattgtcatagacgagtaaatcacggactgcataataggcacgctcatttttcaatcgaatctcaaaacggttttttacttctgcgtcttcaatgggaatatcatttttcttgtactgctcgtagtccttttcatagatacagaaataaacttcactttgtaatgaaccgatatagagggtgtttcccatacattccttttcctctttgcgtaccagttcgccactgcgatagcttttaaaactgcggaagacggagatacattcttcctgttggcacttttcagtgagtacagggatatttaaaatccctgtcttatcgttaatggcaaggtcaaggcgtttcatcacaccgccagccaccaaaacgtccataaagaactcataccagcttctttgttgtgccagaagatagctttcaaattgtctgcacccacgacctttcaattccaccagaactcctttgtccagttcatgggagcaaaggacgaatatgtcgcctaaagcataatgctctgaataagaatagaaaccatagtcctcatgaagaaaataggacagtttcagttgtaagatgttttcgaccacctgctgtacgtctgttgtcggaaagcgaattcttacataatcaaacagcatttcaaggggagcgtcgggattgaagcgttccagagcttcccaaagggactgctgtaaatcctctgatggcttgacttttcctgtttcaatatcgcttagatactgccttgtaataccagtcgcaacagctaaacggttttgagatagtccataagccaagcgtttttcttttaaatgctgtaaccaagtttgttcattcagtaaaaatccctccaatcaaaaaggcgtatgtcaacttttaaagcccatttgacatacgctgaaattttgtaaatcccttgtaaccaaaggattttctaatgtttttttgactgtttcctgtcgatttgtacccccctgttagatacggggggttaagtgctggcgtggctattgccacaccagccagcaagatcagtccacacctgcgacttccgcttcgcacgtcgcctgcgtggactgtctgctgttggataactttttaatttcctccaagaaatcatatccttttggtacaaggggagtataaaactctgatatgacacttgttcctacatcaacatagccacgacctttgattcgctttaagaagaaatccttttgtacgtcactgccaaacatcatgccatagcccatttcagacatacgacctaaagccactctgaaattaaactgatcacggattccgtcgcctaaatattttgcgtctggacgttgacaagccagtattagaaagaagccagcttgacgacctaacatgacaatctgtttcagcttattcataactgcggtgttttcttttgttcccagcatttccatgaaagcgacgtattcatcaaagattaagaagtgtgccgggagacctaagtaagcataatttttgccagtcttatagttcttcatctgcttcatttcctcactacgtttcatcatttcttcatagaatgtttcaatgcaagaaagcaagtcttcttttctatagtagacatttgccatcacagaacctaagtccgcaagatcagcatttttcgggtcaagaatatacagttttgaatctgtatgaagcaaggcttcaatcagtgtcagtataaagtaagttttaccgccacctgtaccaccagcaatcaacatatgagggagcttatcatattcccaccatacgtttttcattaagcgaagtttaccatctttagcttctacttcatcaatagaaatacgactggctatggtgtcatagagcaaagtatattccacataggaatcctttaactctttatccgtcagctcacagtacaagccactctctaatttcttttccaagtgtaagagttggtcttgatattttcccagcgtgatttccacccgtatctgtatcaagccatttttaagtcgataatacattttagggaagtaggttatcttttcctttgtacgaccagcactatctttaaagaaaccctctgttttgacctgttcagattcataccacttgttttcaagtatcatctttgccagtttttgacggtggtaaagttgtttaaccgtatcatagcgaacccgtttgaatacaaacgctaccagcaagcagataagaattgcgacactgaaactgataattaaatagggaatgtcaatcttatctgcttgtgataggttaaaatcctgccagttgatctgctggattgtcttcacatgaaacagtccgacaaccagcaggaaaacaggcaggagtgacgctatcgtaaaatgaaagactaaatctttaccagatgggcgaatccttttaccacgctgtttcatgcgaaaaagtctcctttctacctagcgactatttgtcttgtgtcggttctttctttgcttgtggttgagctttgaatgaactagaatcctttgtcagcacaatatcgtctgccttgatataccagtcaacatctgctccttgataggtggcagtagcaacggtgtccgcaatgggattgataagttccacccgtgcgttataatcaaactctttcaaaggcacgctggcaggaatacttacttgaatcatgcgtccttgtcctttggattttaagtcataggtacgttccttgatttcatctgaaaccgacccgtcttcattttggattctcacttcacgacgtagagcagagaatttcaattctccaaaagtcgtgtctttatctaatacaatgccatttgctaatctcatcatttttcctctctttctttattcttttatcatgtcgtcagcatgtaaaaggtaatttgtaaaaccacgagtgccgattttgtagccctctgcggtaatacgtggattgactaacttcacacgttcctcaaagccgaaatgtttttcgccagcttcagcaggaagcaccaccacaatatcatctgctctttgaacatcagaatagagattatagcttcttgataagacagttagccgtccgttgattcttcgctgaacgactttatcctcgccagcaaattctaaattgccgaatgttttttccatgttgggaatcacaaatttaagttccatatttttacctatcctttcttttttattggctgaatgaatgtttgatggtcttaaagagtggggaacgaccttttgattcttgattttttgttttcataagttcacttcctttcaaaatcgggtaaaaaaatagacacctcattttttgaagtgtctacctattaaatattcaaattttattggaagtatctttatatcttcacttttcaaggataaatcgtcgtatcaaagctcattcataagtagtaaattagtagtaaattgagtggttttgaccttgataaagtgtgataagtccagtttttatgcggataactagatttttatgctatttttaaattaaaaaaagtccatttgtaacaatcccaagctccaattaccagctaaattgatattctcttcatttataaatcctgtcgtttgtaatactccctgattgtaggatgttcttgttatataatcatattctttaccatctactaatttatcagaattaaagcttgatgttttttcaatattaaataagtctccaactctaaattcgccccactcaacattttggagtttctcgtttagtgaggcatctatttttttaagaatggagcctcactttcatttttcataacagctgatacttcccaaaccagaaagtctgctactgtttttttaaaatcatcaagtgtaggccttttatcaattggtgctgattgattccaatccgctccattttctgggtcaatgttgctttcgtagtattcatcttcagtaaaaatatttaattttgacttgccaaacctaactaggtctaccacttcttggtatctttcctttgctctatcagtatctcttaggttgtttgatgcttttttcctgttgctccttgtatatccgtcattagaaaaatcaataaaccttactatatcatctttttgatgaccttctccaaccctaaacacatagacattggtctgtacacttgattttcccataaacaaatcaataggcatccttatacttgctattagtgtattgttttctaatatttttttgttgtattctttagcctttccacttccagcagaactttgaataataattgcagcatatcccttattcatcatagacaaggccttttttacaaaaatcattccacaaccatcagctgaataaggtggatttaatacaaaagctgtagcgggaaagtcttcatcagccttgccaaagccatacctcccatcaaaatctataagagagtcttggtttatgatattggatgaaccgtcacccataagaatcatattaagtattgcaagcatataaatatttggcaaaatttctatacccaacaattgttctgccttgatttgtaggatttttctctctaattctaggggcgattttattttgtttttagcatcaatcatcatttcgttcattgctgctactaataggcctgctgaaccagttgcaaaatcccatacataagaatctttgtcaactcttgcaagtttaacaagcaggtgtgcaacataggatggggtaagaacaacatcatttaatttatcttggctaaaaccaagccaagaatacatttcattgaataactttcctgtaaaatcagttgttaatccaattttgtaataaattcctaagtcatctacaattttacaaaaaattctctttaattgactttctccattatatggtttatttatattttctgataataaagtgttttttagtgttcttacaataagattttgttttttctctgttaagtttttatttttaaggaaggcttctatttttcttacgataatttcgccatctgtatctccttcttcagtagatgatttaaggtctgatttttctagtggtctaacttttccagctatgcccagtgttgccataatagaggcagaaactagataaaccctatcattttcacttaagcccttttcttctttatagatatcattgttaagctttgtaagagatgtctcaatttctttttctcttttctctcttaatttatctaattcatcattagataaattaagttcattaatcttttttataaaatcattaaagttatctttattaaggaaagataaatctgtgtaatcatcaactttttgacctatgcctaaattatttttagatacataatatacccctatagaatgttctattgaaccatctaatctcttgaagccagtaacacctatagaaattacatctgtataagaagtatagtgtagtattgcatttgcataatgaatagctccgttaactgcataagaattaatatttttatagtttggttcatttttgctagttgtgttatctacatttccatctttatttagtttaactaatttatccttatatcccttgtattcaatcaaaataggataataatttaaggcttcatcttgcaataataatttagcatctggtctatttcctccagctcctccacttttagatgcatactcatttaatgctttatctatttcatcattcaaactttcctgttctagtttatagtctaaaccgtaactcttcaaccaaccatttactaaatcagctatgttaggttcaatggattgtaacttcgccatattaatacctccagttttacttttattaatgatattctttttcaataatttttttaatgtttacacctaaattgttaatagagcaacttattgattttaattgatcattttgttttttaagtgcacttactatatcatcttcaattgaatttacagtatatatagtcatataattttgcacatctatactaaaactattgttataaactttaccatttgagcaataagttatttcacctttggcaggctctttatgttctttctttatataattattagctccaaaaaataataaatagctttggtgtgttcctaaaatgcatattttccctttttctttttgtaaaagatttttaaagtctggttctaatccattgataaattcatctgatatatttatactaatgttattggcaattctattaccattatttgtgaattttaacccgaaaaatatcttatttatcaacacaaattcaacatcaatatatggtctagtattctcttcaaactgaactttcatctctttaacttgtctcatagatgcctttgccgattttaaattagctacgcatataattatagaagcaacaacgtttattaaagtgagaaagaacattgcccactctactgacatttgctcaactcctttattttaaaataaatcaaaacttgatttttatattactattataaatatatttatttcattatatcacatttagctttatattgttattaataattttctatgcacttcgcattatccttaaatttaatttgtaaagttctataaatgtaagatgtacacatcaagaaatgtatattttacacttcttgatgattactatatcacagatagtattttattttatttaacgtagatatagcctctatattatttttgagcctttctgatggagttagtttttcaactagaacctcattcgtgatttgaaagttttttaagttttgatcaacaaaaaaagaagccttttagcttctttctccaaatctattcttctattatttcctttattagcatctctctcagtgctgacatcatcactggatattgaggactgtcctcgctctctatcttccacgctttcatcattctcggcttttccgtcttgatgaagttctctgctctcacttgcgtctctttcaagtggtctatcaaggtcttgtcccaatatagttcttgaagtttcatccagttctcgtccgtttgttccagtgacagataatccagcctcattatcgcccaattcactccatgatttttttggaattcctcgtccgctagtagctcgtcctccactatctcgttcatcttgtacgctatctcctccgtgtcctcgcattgatcgaacggactctctatcccaatctcctcgtattctttcagactctcctcgaagctcattttctatacctcctatatcttctcttttactttagtgctattgtacaatatattattaacatttgtcaagccttttcttcttttttcttattaagcaaaataaaaaaggaactataaataattatagctcctctatatgatttttaacatgtttccgaagatacctccatctcccacgctagggtctacagataaatctaaactgtaatgtttttcgctatctcgggtatttccgacgctcccggttaagctaaaggataaaacattaacccccaattctcttttaattgtaagtatattatagcacatctaagatagtctttcaactacaaacaaacaaataaaattgtgtttcacataaactaaacacttctaatgcaaaaatcaaaaaggagtaatgctgattcatcactccttagtcaattttattggctttttagcaatacaacctcactagcccttgagtccaccgataaattgtaacggtgatgtttttagctatctcgggtatttccgacgctcctggttaagctaaaggataaacattaacccccaatcctctgttaattgtgaatatattatagcacatttagcttaatctttcaaattctttttcaagttctttagcttgtaacttaagctctttaattttttcagccgaatcctcttttttcttattttctttctcaattttgtcaagaattctctctaatttattcataacatacctcctttttactcattttaattttaagctatctaaaacgctcatatctcgattttatatacttagcctgctaagtatatggaaagactcttaaaagccgtgctacgcttaaaatatgattaaaaatagagtgagcataaaacttgctttataatttaaaaccaagcttttcttttcccattcttaaatattttcttcttaatcccaagcagtttcgatggatatttttctatcacttctgcaaaatttattgaaccgtaaatttctccataattcattgcttctaatatatcatctttattttctttaactttaaaaaatcataggctgatacttttaattgcataggtaaagtttttatttctatatttaaacttaccacctctttttatattacattataaatttatttactattaccttcaaatttcttagggttttttaataactgtgaatacaatttatataaattctttgataaattattcaaatcttcttgcatcttttttacatcatttttataaataactgcgtttgtatttgcaacttttgcaatctgatttatattattccccactttagaaatttcccattgcaaatctctaaacggattaagatcaactacattaatttctttttctaaaacacattctcttataaaatggctcatagttttgcacttagcttttctcattttctcttcaaaaaggtctcgctctttttctgtcaatctgatttctaatcgttcatttctaactctgtttttcataaaattctcctttcactacctacttaattggggtcttagggctctccctaacatgcataaaattattaaaaaataaacatagtttgaaagttttttaatcaaatttttcgcaagtgtacggacacttgctgtgcttgctactaacatatttacaataaacaccaataaattgttcaacagaaaatgtaattgtaattgtaatttgcaaaattaaaactattaaaatctgataaattattttttacctattaagatgtttatattatctagcttttatttttattaattctatttgaaaagtttttaaagtacaattacaaattacaaaattacaatttacttaaatttaaatctcctattattttttaattatcttttttccattcttcaggtatgctttttttatctatttctataaaatcaaaattagaatttattttcttttcataatacatagttacagggattgatacaccacttggcgatattcttttagttttagatagacgaatcggattccattctggaaaatagttatacatgatttctgaaaatgattttgacttaatttgatatccttgcataagtaattccttaaaacatgtaatgtttggttctacactacttcttttatattcttctaagaaagatcgaatttcttctacatctggattcaggtatttaaatttttcttgttcttcttttaagtcttttaaaaaatcatctggcaaagtccatgagtgagatttgtttttatatatttcataccctaacgcaaatgcctggctaaaatctttttttattgtattgagataatcttcttcggacgctcctcctagaaaatctttatctaaataaattggttttaatcgtttatctttgttgcatgcaactggaagatatctcctctcgcctgtatgatcattaagaaaagttatttcatttaatgtgcctataaatatacaagttcttggaacatcttttgaaaatttttcataagggattctaattctatcatttagttttgataaaaaagatttcgcctcattagcagattttgcatttcttaatgcaacaaattcttcgatttctacaactgttttgcccatcatattcattatagaatcttttccttgtattgtatctaaagtgcaaaaccaatcgtcttttagagcaaggtatcttgcgaatgtagatttgcctataccttgtccacctacaagtaccatcatttcatcaaacttagatcctggttcaaatattctttttattatacctaaaatcatatgttccataatccagttatttaagtctgtatcctccgaccctaaataagttggcagcaattttcttatggcgtttttatctccattccaaacaagactttcaatatactgtactggtggactaatttcattcttattagcaacgtatttaactgcctctaacattttattagaattgtaatttattccaaactgtttttctatttcaatgcctagcctattatttaatgaatcatcccaaagacgaatttcatttggtttaatatttttttcacctataatttttccttggaatttaatctcctttgtaaagctatcacgaaaaattttgccttcaattatgttgttttcaatacagtatttaggatttaaaatcgttgttataacattatttacattttgatttacagtgccatttccattaatcttaaggtctgaatttaaatatgttttatcagcttcaggaaatattaaattgctataactcatgataaaacctccactttttaaataacctataattagagcattcgcaaggagtatatttcataaattttatagtattcttaataacatttttaaaacacttaatataatttacatcatcttttttacaagttactttccttttcttttttttcatttccaccagcaaatatttacacttatttaacatttttttacctcctagcttgtataaatatagctcctgtggtataatgagcttgctacagaacacttcacaggagtgtgggcctttactcgctatagtaaaggctcttttcttttttaagttgttcataaatttctaatacatataataaaatgtcgctatcttctccatctaatttcccatactttttgataacttttgctaattgaaatatttctttagatatgctatcagcaagtctatagtcaggcacaatattaatcatggtattagatagcatactgataaaataatcttgttttttaagcccactaagttcaatttttttacatattacatcatattcttcttctgaaactctaaaatttaaaatcttatttctttttctgtttatattaggctctttttctttctttttagcttttaaattttgcatatacttatttctaaacataggtatcatcctccaataattcattccagttattttgtgtcttctctctaagatgtgttaaagaaatagccatttctttttgtttgcttgggaataaatgtgcatatcggtaagttatatcgattgattcatgcccaactctatttgctattgccgttgcagaaaaaccaagctctatcaataatgatacatgagagtgcctcaaatcgtgtattctaatccttttcacgtctgctttttttgaacctctatccatttcatggtgcaaaaaacttcttgaaaagttaaatatcaaatctttgggttttaatttgtaaaaccctttcaagtaagatttaatttcatccgataaaaaatccggcataacaattgttcttatgcttttcttagtcttaggttctgtaataatattctgtccatcaattctttgcaaagactcattaattgttaaagagtttgtgtcgaaatcaaatttttcttctgttaaagctaaaagttcccctaatcttagtccacaccaatacaatatctcaaaagccacaaatgattctggtttatctttaatcacattagcaaataattcatactcatcctgtgtccaaaaaagcatttctcctgaatctttttctcctattgatcctacatctctagcaacattagtttttaagttatagtatctgcaagcatgatttagtatactactaaattgagcatgaattgttctaagataagtattagaatatttattacctctgtcatctttaattttcattaactcattttgccactgtataattgttactttatttatatctttcattgataaatttgcaaaatatggcattattttattatctacaatgtattccttagttcgccatgtattttctttaacacgtggctttttatctcttttatatagctcgaaaaactctctaaatgtcatatcaatagaatcagcgtactgatttaagaattctttttcccaattattagcttctttttttgttttaaaccccctttttttctttactagtttttcgcccctccaatttgtgtaattaaatttgcaaaaccaagttttgtttccgctttcatctctaaacgctggcattttatgcctcctttacttctttagatccataacaatatttttccataaaatatcttctattaacttttcctctttgtactctatatcctagttctataagatctcgattcatatcattaataatttgatatgctgttgttctactaatatctaggaattcttgtacttcttttgcattcataaaaatactgttcatatagtcctcctttcaattttattgtaagattctacattcctaagataattaggacgagcactaatttaaataacttacttttttagttcatattcgaactgtttaaatatattatatcagttcttttatgttctgtcaatagtattttttaaataattattagaaaatattattcatatttcaaataatattattagaacatttttgttgctattttatttttattatgataaaatatatttataaaatataatttgggtggtgtaattatgatttctggaaaaaaattaaaaaaacttagactattacggggtttaacacaaaatcaattagccattaaatctggcataaccgatgcagcaataagaaactatgagttagggaatagatctcctaacaaagaacaactaagaaaagttgcagaagctcttaattgtgatatatcagcattaattgaccacgaagctaactcgccttttgaaataatgcaaataatttttgactatgaaaatgacatgaaatttaggcctataacaggaggcggagaaacaacaagtctgttatccaatgatattgattttaataattttctaatagaatgggatgaaatgaggaaaaaacattataatgatgaaataacagatgaagagtttgaagaatggaaattatcatatccaaaaaaatcaagatttttaaaataaaaatatgtacgcaaaaagaccgcagcttgaagctacggtctaatttttttacatttctttttcaaatttagaatgccaaaatactgcatatatttgtatagaaagatagattgcaactagtattattatttgtaactcatcaacacccatcaatgaaaacataataagcatggctgcaaagagataggtcattaagtcgtaggcctttgcctttgatttttctgcaatcaatacgtttctttcgtccttcttatcaatttcaagctgtcttattaactctttgttattttttgtagagaaatatttaattatatttcccatgaaatgtccgaaaactccacatccaataccgataaataaatacggaatagcgaggactgtcttatttacactatcgatgcttttgtgaagatagaatcccgttaaaaccagtgctactccaaaaaatactaaaatccaatcttttaagatgcttttgtttctattcattttcttcctcctcataaataaaaatatcttcaattgtcaatttaaaaaatttagcaattttaaaagctaaaataattgaaggattataccttccattctctagagaaccgatggtctgccttgacacttcaaggatatttgccagttcttcttgagtaattccttgactttttctaatttcttcaagtctatttttcacatttaattacctcccatcaaatgacaagttaactttacatatattataattctttttagagtaaatgtcaagtaaactttccattttttgtgatgataaattttatttatggtgttggtttaatataaatttttgatattttgtttagtcttatttctggtctttttcttgccataaaaattcctcctgattatgattatctaatcaggaggagtttatatacacaaactaattcaaagtctcaattttttgtccaaatgtaaaccacttggaactattattcaatttattcttttttacttccagtaccatttgagtaccagtagccatttttcattctctatatagcttgtaatcaagccattttagaaaattttgcgattactcccactcgattgttcctggtggcttcgatgttatatcatacaccactctattaattccttttacctcatttatgattctatttgaaatttttgcaagtatatccatatctatagggtagaattctgctgtcatgccgtcggtgcttgttactgctcttagggcgcatacgtagtcgtatgttctttcgtcgcccataacgcctactgtttttatgtctggtagcgctgcaaaggcttgccaaatctttctatataggccgtttttctttagctcgtctatatagatggcgtctgcttcacgaagtatgtttagttttgcctctgtaatctcgcctataactctgatggcaaggcctggtcctgggaatggatgtctatagataaggtcttcatctagtccaagttcaagtcctatggctcttacttcgtctttgaataactctcttagtggctctataagtccttcgaaacctatgtcatctggaagtccgccaacgttgtggtgacttttgatgactgctgaaccgtttgtgcctgattcaactacgtctggatatatggttccttgtacaaggtagtcaatcttaccaagcttctttgcttcttcttcgaagactctgataaactcctcgcctatgatttttctcttcttttctggttcggatactccagctaatttgtctaggtatctcttttgtgcgttcactcttatgaagttgatcttgaatctgttcttaaatatctcttcaacttgatcgccttcatcttttctaagtagaccgtggtcaacgaagatacatgttagcttgtcacctatcgccttgtgcataagtactgcggctactgatgagtcaactcctcctgatagtgcaagtagtgccttcttgtctccaactttttctctaatctctttaactttattttcaatgaaattttcgctcgtccagtcgcccttaagacctgctatgtcataaaggaagtttcttatcatcttgtcgccgtcgatggagtgctttacttctgggtggaattgcactgcgtatatctttttttcttcgttttccatcgctgcgataggacagttgtctgtcgatgctatgcacttaaaaccttctggtaatttggatatgtagtctgtgtgactcatccaaacttgaccgctctctacacccttaaacagctttgactcttcatagtggcagatggtcttgccgtactctctgttcttctctgaacccttctttacctctccacctagtaggtgtgctgttaattgagccccataacatatacctaagataggtatgcctagttcgaatatctccttcgatattgatggtgagtcatctaggtaggctgagttcggtccgcctgtaaagattattgccttaggcttcattgcttttatctcttcaacgctcttagtgtaaggaattatctctgagtagatattgttctctctaacacgtcttgcgattaattgcttgtattgtcctccgaaatctattactaagactaaatcgtgtttcatttaatcacctctttcaataattatatcacaagtttatttttaaagctataagtttatcaaataagttacaattttatcgatattgttatataactatagtaaagtggtataatatatacaaaggagatgatattatgcttaaaagattaaatgtacttgtttgtgctatcatcattatggctatagtggtatcggctatgccagggcgtgcgcttgcacaagcaaagactagtgatgcagcttctgataaggctgtagagaaattagttttaaaagcaaaagaggtatttaatatcaaagacgtctacgacaatttcgaggtcaatagttcgactgacaacgaatacggcactatatacaacttgtcatggactaagaaggacggctcgagtgatgttaatgtcagcatatcaaaggatatgcacatcactaattacaacatttacgataacaaaaagtatgagacgcttaaaccaaattattcatatgatgctttgaagaaatatgctcttgatatgatcaaaaagattgacccagtaaatgctaagagccttaagctaaacgaaaactcttatcgaaacatcgacagtgacaacgcatacaattttaacttcgatagatatgtaaatggtaaacatgttttaggtgacgtcgcaagcatcacaatcagctatcttgacaagagcatacaaatgtactcactaaactataaccatggttttgacttttcaaagactgatgagttcgactctcttaagagcaatttaactatggacgaggctatcaagatctacaaggacaatgaatatctaaagcctatgattaagtttgtgatcaatgaaaagaaggaaccaaggcttacttttaagactatatatagcaacgagttaaatgcaaactactatgttaattcgactactaagaaatatgagcgctacaactaccctatctttttaaataattatatgaagaaggacgctgctgctacagaagaggctatggatggtcttagcgagtacgaagttaaaggcattgacaagattaagggcatcaagtctaaggacgaagctgttaaaaaggcaaaaacttttgtgaaggacgctagcaaagcaaaggtgactttatcaactttaaatcaagactacatctctaaggactacgtctacaacatcaatatggaaagtggcaaagatgagaaaaagactttctataacatttctttagatgcaaaggacttaactcttctaaggtacaatgtttatagtaactttgacaaaagcgatagcaataaaaaagatttaagtcctgacgaattaaagaagattgctatggactatatcaagaagaatgcaagtgacatagctgacaagagcctagaactaataaacactgagaataactctgtatactttgtaagagtgatcgatggctactacgttcctgaaaatttcattaacatagatatatcaaaggatactaaagaagttaattcttattctagaacttggtacagaaaagcacttaattatgataaggcaaagatatctacagatgaagcatatgatctagtgaaaaaggaaattgattacgaagaagtttatcaatatataagggataattctgatccagctaagtcaaaagtagtaatgagctacattccaaagagtgctagaatcgagattgacgcaataagtggcaagcttgctaaaaattctaatgaatttagaaactactctgaccttgaaaagtctaagtataaagacaaggctactctacttaagcaaatgggctacagctaccttgaaaatgaaattatgccagagaaaaacttgaagcaaaaagatttcgtaagcttcatgtatagatatggctctaaagatattgacaaagatgacgcaatagacgatgcttatcaaagagctataagaaatggcatcataaaagaaaatgaagtgaataaagaaaaagaattaagcacaattgacctagctaagtacatggtaagactaaaagacatggaagagcttgtaggaaaggatatatttaagccagtgaatgcaaaggctaaactaacaaacgaagaaaattcttatctaagccttgcaaaggcacttggctatataaattatgacacagttgacaagaacgcaaagattaatagagatgagtttataaacatagcttataactacgtattcaagtaaatatacgcataaaaatgcttacagcgatcgctgtaagcattttcttttatacaagtattaatcttctaataagtaagctagtgctagtctaaatgttgcgtcaactgcttccttgtgtgttctttcaaagctgtgtgatgcgtcaacacctggtcctataagtgcggctcttacgttccagccagctcttaaaactgctgatgcgtctgatccgtaatatggatatatgtctattgcgtatggaatttcgtgttttctagcaagtttgataagtttttcgctcatcatcttgtcataaggtcctgaagaatcttttacacaaacagtgcatttatattcagatgatgtttgtcctgtacctggcgctgccatgtctacagctatgaactcaactgtcttttcaggtaggcctgcacttgatccgtgaccaagctcttcatagtttgagatgaagaagtttgttgtgtgctttggcttaatattattttcctttaaatatttaactagtccaacaagaactgcaacgcatgccttgtcgtcaaggtggcgtgacttaatgaagcctgatggtgtaacccatgtgcctggatataggtatacatagtcacctacatttatgccaagcttctctacatcttctctcgactctaccttttcgtcgattctaatctccatagagtcttcgtctctctttgtctcgtcagcttttgctccataaacatgtgttgaagaaacattagtaagtatagttcctgtgtactcgccatcgtcgatagttgagataacgcactcacatccttcgataacattccatgggtagccgcctaatttagtgagtttaagtctgccagtagatgttatgtccttaaccatgcagccaagtgtatcaacgtgagctgataatgttacttgttcttcatcgtcttcgccttcaactgttacataaaaaccgttcttagcattcttgtgtgcctttaggccgtacttattaaattcatcttcaactaagtttagtgccttgatagtgtctcctgttggtgatggtgtttttaaaagtttcaccataaactcgaccatgtagtctaaatcgtacttaatgtccattattattcctcccttaatatatagtcgattgctaatttatatgattcaaaattgaatcctgttatcactccgtcacatgctggtgctgtgatagatttttgtctgaactcatcgcgtgccaatatatttgttaagtgcacctcaacttttttaagcttcaaagcctttaacgcatcgtatatggcgtagctgtagtgcgagtaggcagcaggattgatgataagtgcgtcgtagtctttataaagcagctcttgaagcttgtcaatgatgacgccttcacagtttgattgaaactcatcaaggcttgcccccttatcacttgcataagctttaatttcctctactagctccttatatgttttattgccataaattccggtctctctcataccaagtatattgatattgggtccgttaattacaattatcttcttcatttaatcactccttgtaccttaaggcgtctcttgagctccttacacatcaagaagactgacttgtccgtctttatactcatgtctttatacttttcgaagagtggctccctctccttatatagcctagccatagggtctgtaccctctcttagtagaggtctgcggcttgtatcgagcttagtcattaaaaactcgagcggcctctttaggtagataacgtagccatgctgcttgagatatatcatattctcctcgcgtattactgtaccgccgcctgttgctatgacccttctgtcaagactagccgccttcttgcatgcagccgtctccatcttcctaaactcttcctcgccatacttttcaaaaatttcgtttatgctcatgcctgccttcttctcgatcatcctatccgtgtcgatggctctatagccaagcatccttgcaagctcatgcgctatggtagtcttgccactgttgggcatacctatgatgactatgttcatgctctcaccaagatatcatagagagcaagtgccgcatagcacttcataattgtgtagacgcgtggcacgactgctgcgtcatgtctaccttctatattgatgctagtgttctccatggtcttcatgtttatggttctaagctcacgtgatattgatgcgataggtttaaagacaacacttactactatgtccgcaccgtttgatatgccgcctatgatgcctccattactattctttaatagcttcactttgccatctataacttgcatctcgtcagcgacttcgctgcctaaactatgcgcatagcctaggccatatccaaaggagactgccttaactgatggtattaagtataagtacctcgcaagttctccatcaagcggagcaaatggcggctcgccaactcctgctttaacgccttttattatgagctcaacctctgaacctacactgtcgtttgctttctttatatcagctaagtacttatcaatctcatcgtcactgtgcttgtacatatggtagctcttcgataaaaattcttcaccgcactcttcgtcaattatatcgcccaagcgctttagatgcgtttcaaaagtgatgccttgcttctcaagctcctttagtactatggctgctgctgcacaaactggtgctgtaagacgtgcggagaatatacctgagccgcgatagtcattaaagcccttgtactttatatatgcaccgtagtctgcctgcgacggcctagcaaggtctttgttcttctcgtagaagctactgtcgacatctgcgttctttataagtatgctaagtgctgctcctgttgtgcgtccattaaagacaccggatatgatctcgtagtcgtccttctccttacgcgcactcgcagctactgaggagggtctcctagcttcaagtaccttgtcaatgtagtctgtatcgacctcaagtccactagcaagtccatcgagcgttgcaagcatatacttaccgtgcgactcgcctgatattgttagccttatattatttccaattgtcgatgacattgacctcgcctcctaaactttggtagtcttcaaagaactttggataagacttcttcacgcactcgtagccacttaagaatatgtcttgatcaagcttagtcgcaagcacagagagcatcatcgctatcctatggtcattatacgcgtcaaacttgttagtgtacataactatgtcctctagtggattcacaatcaatgcctcatcagtaaaacttatcttcgcaccaatctttttaagctcatttattatggcttgcactctgtttgactccttatagatcagcctctttatcgatgtgaatgtcgtcttgcgctttctaaataatgcagccatggctagtattggaactatgtcaggagagtctttcatatcgataataaggttttgcgtttgatcgtatctagctaagatgtctatgactcttctgtcgccttgtatgctacccgccttcatatccataatctcaatatctgagccaagatagtttgctacgtagaagttcgcagcattcgagtagtctctctctatagtgtactcgcctttagacttgaactcttgtccgcccttaatcttaaattcattctcactcgcatcgacctctatgccgaagtcttcaaggcacttgatactcatgtctacatacgagcgtgacgatagatcacagtctaaaactatgcgtgagtcaaaatccatgcgtgcaagtttaaaaagtagcgacgaaacaaactggctcgagatgtcttctgtgattatgtattcatcctttaccaagtcaccctttatgcttatggttttcttcgcatcgtttctgtgaaactttacgccgttgtcgttaaagattttaaagactggatcgttcggcctttcatatagcttgtcgcccatgtatatctcgtgcagcttgccatcaagtatattaaagagcatgaagcgaagcgttgtgccagatgcttctatacgtattctgtcaggactcttcttattctcacgcggcttaacaagaacgtcaccgctgtctaaaagatcaaagtctgcaaagcttatcaggctaagcatagtgtctttgatgtcttctgataagtcaaagcccttgatgatggtattttctccagcaaaagaacttgcaaagatgtatctgtgcaagtagctctttgagtggtttacataaactttaccctctaatttagaattttttattcttaatatgctcattataaagctctacaacctttctttcattcatcctcttgactatggcattgtgccccttcaagaagacaaaatttatctcatcacccaaaatcttcttgtcgctcttaagtgattttatctcataatttatttcttcaagtggataatatctgtgaattaattcaaaacttctcttgtaagtttcttcatctgttatacctaaaaccctaccaagctctagggcaatcttcatgccgatggcaacgcattgtccatgcgagtaagtgtaattactcatcgcttctatcacgtggccaaatgtgtgaccaaagtttaacgccatgcgcgcgcccttttcatttctgtcttcacaaacgaagtgaactttcgtagcgatggacttctctaagacatcttcaatgtccctctcattgataagcatctcatataggccgctctcgtatataagtgcgtgcttaatgacttctgcaagacccgagatgtactcctctttaggaagcgtcttaagcgtgtctatagcgatgtataccttgtatggatcgtagaatgttccgactatgttctttttatcacagaaatcgattcccgtcttggaaccaatagatgcatctgtcattgcaagtagactagtcgctaagtttatatgcttaatgcctctatatagtatggacgctgcaaagccaccaaggtccgttactacaccaccaccaacgtttatgattaatgagtacctatcaagtttatcgcaggcatactctaaaagcttttctaaattagagaagctcttcgactcttcgcctgcgtctatcacataaaggtaggcagagtatctcttcacaagctcatctataagtgctctttgctctctataaaggtttctatctgttaagacaaggtagtgtgtgaagccttctacatctatctcactcgccttacgaattatttttatctcataagaaagttcttctttagtcatcgatcttgcccattgccttaagtatcttctttagatcaagcactaagtcatcgaactccgcatagtttattgcctgctcgccatcagaaagcgcctctgtcttcttgtcattaacttcgatgatgatgccatccgcacctactgccgcgcttgcaagactaagtggctttacaaggtagtctatgccgcctgcatgcgaaggatcaactatgacaggaaggtttgtgtacttcttaagtataggtacacttgcaatgtcaagcgtgtttctcgttgcagtctcaaaggttcttatgcctctttcgcataaaatgacatcttcattgccgccctttaatatatattcagcagctgctataagctcttttatcttattcgcaaagcctctttttaatagaactggtttatttatcttaccaagctctgttagtaatgaaaagttttgcatgttccttgcgccaacttgtatgatgtcaaccgcatccataaagtaatcaagctctcttaaatccattagctcggagacgaatttcacgtcatagagctttttgatctctttaaagtactcaagcgcttcacgtcccaagccttgaaagctatatggcgatgtcctcggtttgaaggcgcccgctcttataagcttgatgccgcgtgatgataaaaattttacttcatcaagaagcgaatcataagactcacacgcacaaggaccggcaatcaccgtaaagccgtcgcctatcttttcgcctgctatattaataattgtcttttctttatatgtttttgatgatttttcttgttcaaagttcatttctatcagctccagtccaaattttaaacgcttcctcagcttgacccataaacatgccccagccgttcatagtgatgagacccgcttctttagcaagtgccaaaaactttgtctcttcggggttatatgttaagtcgtaggcaaaacctgccctgctcatctctaagtcttctattgatagtgggctctcatcaagccttccttccatgccaagacctgtcgcgtttataatgacgtcttgctccataccataaccgtatggatatatctctatatcgtcttcgaagttctttagcttgtcgtgcgcttcaatctcatcacgcgtataaactgtgatgtggaagatatccatcttaagtagcgcgtatatgatgctgcgagcagctccacctgtacctaagactgcataagagtacctctcgtactttggtattaagctgcttatgtccttcataaagccaaggtagtcagtgttgtgaaggcacagcttatcatctttaatgtaggcagtgtttgccgcctttaaaaagtctaccgcctcacttacttcgtctgcgtgctttagcacctcttcctttagaggcgttgtgatgttaaagccaagcacctcgccagactttgcttcacttataaaacttgcgagactatctttattcacttcgcgcctttcgtaacttaagtcaagtcccttttcatcaataaaattcttcatcacttctggcgacttcgaatgtgtggtagggcttcctatcacgtataatttatttctcataagtctttacccttctagtctttatatagtaatcaatgatcatcctcgcaagcttgtcactatcgtgtctaacataatcctcgtcatcatctaagcagtcaccttcgatgtaatcaaccctctcttcatctaagaatttcttgtcatcatccgttaagaatatttgctcttgacactcatcaaggtacttttgcttaagctcttcactgaggattttgttgttaataatgacagcgtctataagtttcgccgagtgctcatatatggcttcgatgtgatctttaatactcatctcgtcagtctcaccgtgctgcgtcataacattttgcacgtaaatcttctttgcagatgaagacagtatcgcttccttcacaccctttacaagaaggttaggtattaccgatgtatatagactaccgggacctataagtataatgtccgccttcattatggcatctagcgctccatcgataggctcaacatccttaggacaaagttccaccctcttaatttttttattatctttaatagcttctgccggcaatatgctctcgccaaaggccttgctcttgtcatcatatgtcgcttcgatattgacatcgttcacggtgatgggcataacagtacccttgacccttagtatgctcgatgccatcttgacagcttcttcaaaggagccgtatatctcattcatagcaagcaagaataaattgccgaaggattgaccctttagctcgcccttctcaaagcgatgcgaaagcaatgtgttcatctcgggctcaatgtccgacagtgctagtaggcagttacgcacatctcccggtggtagcataccaacacttcttctcaaaacgccgcttcctcctccatcgtccgccatcgttacaagggcagtgatctctgatgagtagttcttgataccctttaaaagcgtcgatagtccagtgccgccacctatggcaactatctttgggtttaagcttctataattaaacattgcgcgcctctttatacatatccctgttctttaaaacagtaagattcttcttttctttcaaatattcatataacctttcagccatgtagacacttctgtgccttcctccagtgcatcccatgcctatagtaagctggtttttgccttccttgatgtagtttggtaacaaaaactcaagcatgtccacaagctttttaaaaaattcttcagtcgcgtcaaatttttctaaaaattcttttatttcatcatctaagcctgatagtggtcttagatcgtcaaggtagtacggatttggtaggaaccttacatcgaatacaaggtctgcctcctccaagatgccatacttaaaaccaaagctctctactactatggtaagcttctttctagtgatggtgtttgaaagtatatcgtagagcttatcctttaggtcgctgctcttcatagagcttgtgtctatgatgtaatccgacttgttcttaagctccttaagtatctctctttccttttgtataccgtcttttaatgagccgtccttgcttaatggatgcggccttcttctttcgttgaaacgcttaataagctcactatctctcgcgtctaagaatattagtttgaaatctaaattctttttttcaagcccatctatcacagtgagcatatcgttaaaaaattccttacctctaatatccataccgaaggcaaccttgtttatgtcttcattgtcactgtctattagctcaaagaattttggcaataaaacaggaggcatattgtcaatgcagtaaaatccattatcttccataaaattcaataaagaacttttgccggcaccactcatgcctgttactacatatatgtccatatttcgcctcctattctacataaatatttttaattctcttaatatcaatttgagcttcgttcgctcttcttaatgcttctttaacatcgccaacacgctctagtttgtgcgcgtccgagccaacatataagtcaacatctatatccttaatcttgattaagtctttaacactaaggtttttgtgcgatgaatttatctctagcgcaacgccgtgctccttgcatgcctttgcaagtctaacaacattgacatctatcttgtcacccgggtgagtaatgatgtttatagggtacttctctatcgccttgatgtacgagtcggtaaccctttcagtgattttttcgtgccactttttgaatggctttgaaatctgcggcaataatgagagcttcatctgctctacgaaattattcgtcttgatgccgtagtgaaagcccataagcacgatgtcaaggtagtccatgatgtccgcgtcaaggtccacagtgccgttgaagtcaagtaggtttgcttcaacacccataagtatcttaaggcccttctcgttatattcctcgtttaacttgtctatccttgctctaagaactggcaagttgcttctttttataccaaacatatagtgggataggccgtgatctgttatcgcaagctccttaagacccatcatatatgctttcttcgcactctcttcaggcgtttgtgaggcatgtcttccaagattgcccttagttcctgatgagtatatagtgtgcgtatggtagtcgccatataatctaattttattcatttattatccttatctcctctttgagatcaacagcaaacttttcttttattatcttcttcacttcacttatcaaagttactacatcattaaaagtagctcctcctgtgttgataataaaacctgagtgcttaggactaaccatagcaccacctacagagagtccctttagtcctgcgtcttcaatcagcttcgacgcatagtagccttccggtcttttaaataccgatccagccgatggatactcaagtggctgcttgtcctttcgtctttgcgtgtaatctctttgttctttctctatatcttccctagatttctcgtaaagcttgaagtatgcacctagtatgacatagccttcatcttgaaagacacttcttctgtgcccaaactttgcttcactcgcatctatctctactatctccttgttttttatacatcttatcttagtcactagatctttgatctcgctaccatatgcgccggcgttcatatatacaccgcctccaacagtgccaggtattccagagattgcttcaaggccgccaagacctagctcaagcgccttgtttgcaagactcttaagtgatgcacccgcctcggcatataaaacatctccatcaagcacctttatctttgcaaaatttttgtcaagcacaatgacaggtctagtgagtccctcgtcactaataagtaagttgctacccttacctatgagcatatatggcgtcttcgtctcgtcaaagagccttacaagatttagtacttcctcgtcactctttgcttcaatcaaaagttctgccttgccacctatcctaaacgtagtgtacttagataagctttcattctctttaactgtttctatatttaattttcttatctcgtcaattatcttcttcatacattcctccaatgtaattatatcataagtggggcacattttctatatctatgtaaaaaagggtcaaagttttttacgctttgacccataagccctctttgcttatgtataaagctagcatatatataagaagcctctcactatacaccacgcctcttttatatatgcaagcgacctattatatgcctcgcttactatatatagacaaacttctcactatatacctcacttactatgtatatgaagcctcatcatatagcaacgctttgcacataaaaaagagtcccttacgggactcttttgtaatagtaaacaatttttagaacatcatcattgcaacagtcaatacaattattgagaatattactgtgaatataagaggtttcttaacccacttataccaagtacctaattccatctttgaaatttgtattgcacccataacaacgcctgatgttggtgttacatagtttacaacaccttctgcagcgcagaatattaatatcataacttctggtgagtagccaagtttagcagctaatccgcccataactgggatagatagtgttgcaagacctgatgttgatggtatgaagaatgatagtgcgatataaacaacgtatgcaaatggtacgaataagaatactggtaaaccagatagtgctgttgctgatctgtctagtataagagcgtcaatgtgagtttgagccattagtactgatgcagctcttgctacaacgataactaaaactactgacaatatgtcttgagctccagctatgaatgcattaaccatttctttttcagataatcttccgatacaaccgataatgattgatactaggaagaataatactgaaatttctgggaagtaccattcaccaagtggtgttccagttaatactgctgaccagccttcaaatgctgttacaccaaagtctggccaaggtattaatgaaataatcataataatgaaagtaattgcgaatacaacaaggataaatttgtgtctacctgtaaatactaattcatcttcactctttgtagttctgaactctttgtccataacttctctttcttgaagtgatagtattgttgatcctttgtctttgtgtactttgctagcgtattttaatacgaagtacatagctgtacctaaagcaactgcccaaaggatagcgcctattaatataacagtacctttgttacattcaactcctgcaccgttaagtgcgtccatagctgcacctgtagcgaatgggttaacagttgaaccaagtacgccggcacctgctccaagaagaacagttgctacagcaactagtgtatcaaagcctgcagctaccatcgcagtgatgattaaaggatatagggcaacagtttcttctgccataccgtaagttgatccaccgattgagaataggatcattagtacaacgataagagccatttctctacccttcatgttcttaactaatctgtgtataccagcttcaagagctcctgttttgttaacaactgctaggaaaccaccgataaccataacgaagatggcgatatctatggcgtcaacaaagccgttgtaaaaactcattgctatgtctggtaatttcgctgctgatacttcagtaacagcttcttcagctcccttaggtactacaggggcaaattgtgctccattaaaaatccatgataagattgcaacaaatagtattataaggataagaatactataagcacttaatgaacgtttctttttttgtttttccatcattttacctccttaatgattgtttactatccttaatattaattatactacaacgcatctatttatgcaacacttttttatcctatagtgataactttatcaatatctaattcagttgtattgtctttatgctatcttccatatataatatataagtactcactcatcatattgggtatcatatgtctattggaggtgcaatatgaaattaaataatataaaggcagcgttctttgatatggatggcactatagtaagcttcacttcgcatactataagtgagagggacatagctgcgattaataaattaagagagagagggattaaggtcttcatctcctcaggtcgtgatgagagtaacataaagaaggtcttagacaagactcttgaggtcgatggctatgtgtcgatgaatggtaaccttaacgttgttaatgacgaggcggtatctaagtactttatgccatatgatgatgttaagtttttagtagatgcatcagataggtttggctttgccttatcgctctttactgaagaaggcgtcttcttgaacagaatcgatgatagggttcacgccgtgcatgactatgtagaggtgcctatgccgaaggtcattgactttaataagctcgacttaagtagaatctttcaaatgaatacctacactactagagcctttgatgaggagcatcttgttccctatgtaaagaacactgtctttaaaaggtggaacgacgactttgctgacatcaacagcgcgtctacatcgaaacttcacggtatacatgacatcattaataagctcggcatcgatataaaagataccatcagtttcggtgacagtgaaaatgaccttgagatgataaagggtactggcatctctgtcgcactaggtaatgccatggacatcatcaaagatgctgcgacatatataacaaaggactgcgacgagtcaggatctgctcacttcatcgaaaactacatcttataagcttgattttttctatgctatgtgataaaattcaagaagaatttaaaataaaagaggtttatagatgtcaaataaaaaaactgttataaaatcattggcaatgatatccgtcttcacgcttataagtaagatcatgggcttcttcagagagaccatgatagcgtcgaagtacggtgccaatcttgaaactgatatgtacactgctgcaacaactgcagttatctttttaataggtgcactaggtagtggtcttaacacaacactagtgcctatcttttcagaggtagaagaaaaggaaggcaagcgtggcaagcttaagttcatgaacaagattatgaacatcataggtcttatatccatagtcctatgcgttcttgcatacatctttgctcctttcatcactaaggccatagctaagggcttcacaggcgaaactcttgcctacacaagctaccttatgaagataggtatacctatcatacttttcttgtcgatcacgtatattttctcaagctttttacaatctgagaacgtttttggtccctatgccatcatgggcataccatacaacttaatctacatcttcttccttatcttctttgcaagaaaaggtaacattgacctgcttatgttcataagcgttgtcgcagcgtctatgcagtttcttatacagcttcctgctgttaagcacaaaaggtatagattcacacctgaccttgacttcaaagatccatacgtacagaagatgtttaagcttatcgttcctatactcataggatcgagcgcataccaaatcaaccttgttgtagataaaactctagcctcagagctagtaagtggatccatctcggttctaaactattcatccaagatatatcttatgattatatccgtctttattatggcactgacaactgttatcttccctaagctatcgtcttctatggttagaaacgaaagcaaggaaatcagaagcataatcagtgaaagcgttgacacggttgcgcttatcactctacctgctacctttgccatagtctttttaagctaccctatagtcgagattttattccaaaggaatatgtttaacgaaacagcgacacttatgacatcgggtgcgctaacattctatatacttggactcttctttgcatcgcttaggatgatatttgagaaggtcttttattcaatgcaaaaaacgaggatacctatgatcaacggtctcatagccgttgcagttaacataggcttcgacatcatactagttaggtttatgcagcatagaggccttgcccttgcgacatccatctcttcactagtttcggcaacaacactatacatcagtttgaagaaggtttatccagacatcgagatcaaagataatcttatctcgctactaaagatactcgcctcttccatactcatggcggtgactatgtacttacttttcactcttggagtaaaagttttaggcgaaaagaagatagtgaagttcctgactatggctgtcactggatgcatctctctaggcatataccttgtatcacttaaggctctaaaggtacacgctttagatgctgtattaaacttcaaaaggaggactaatgaaaaataaagaactaatcaaacgctttttaccctactttaaaaaatatagaaaagtactattcctagacttgttctgcgctgttctaacaacagtgtgtgaactagtctttcctttattattaagaagcatcactaacactgcttcgaaagacatcttactcgtaactaatgagtatatattaaaggttgtatttatctacttttccttacgtatagttgagatagttgcgcagttctacatgactaaggtcggtcacatcatgggcgcatacatagaaaaggatatgcgtagcgacgcctttaatcatttgcagcacctatcagatagtttctataacaacactaaggtcggacaaatcatggcgaggattaccaatgacctcttcgatgtaacagagttcgcgcaccattgcccagaagagttccttatagcaggagtgaagatattcatctccttcatcatcttggtaaggatcaatgtcttattaaccgtagtcatgtttaccatgataccgattatgatctacgcatcaagctcgtacaatcacaagatgcgccgcgccttcaaagagcaaagagaccacataggcgacttaaactctggacttgaagactcgctgcttggctccaaggtcgttaagtccttcgccaatgaagatgttgaagtagaaaagtttgagaaagacaacgacaagttccttgaaatcaaaaagaagagatacacatacatggcaggctttgcgacagtaaacagaatattcgacgccatcatgtatactatgatcataggtataggcggcttcttaatcaaggctggcaagatatccgcaggagacatgatagcctacgttttattcgcaacaagccttcttacaaccatcaaaaggatagtcgacttcatggagaacttcaacgccggcatgactggcatagaacgcttcatcgagattatggatacagacgtggacatcttcgacaaggaagatgcagtagaattaaaagatgttaagggccacatcgagttcaaggacgtaagctttgcctaccctgacgacaagaacaaagtcctatcaaatatcaacctaacagttaatgagggcgaatccgttgccatagtaggaccatcaggctcaggtaagactactttggtaaaccttataccgcgcttctacgatgttactaaaggcgagatactaatcgatggcaagaacatcaaagacttcacactaaagtcactaagacaaaacatcggctcagtgcaacaagaagtctacctattcagcggcactatactagagaacatcaagtatggtaagatagacgctaagaaagaagaagtcatcaacgcagcaaagcttgcaggcgcctacgacttcatcatggaactaaaagacggcttcaatacctacgttggtgagcgtggcgttaagctatcaggtggacaaaagcaaagaatcgccatcgcgagagtcttcctaaagaatccaaaagttcttatacttgacgaggcaacatctgctcttgacaacactagtgaaagacttatacaagagtcgcttgaaaagctttcacaaggaagaacaacactaaccatagcacacagactatcgactataaagaacgcaaagaagatcatagtccttacagacgacggcatcaaagaaagtggtacacacgacgagcttatgtccaagaaaggtctatactacgaactatatactggctcgcttcttgatcttaaataatttaacacttttgtaatctctttttatgcatttctatgttataattaacttagtaatcatagtaaaggaggaaaacatatgaagaaaagaataataagcgccctacttttaattgtaattttgcttacaagcacagccatggccatggatacaccaaaattaaaaggacactgggcaaaggataagatcgatacaggctttatggataaatatttcgcagagcttgcaaaagaaaagtacgcaaagttcgatccgaacgctccactatctgccatagttttcgccaaggcacttgaagacctctcaaacgagtacggctacttcaaggtcaatatatatgctaactccgaaacacttacgagagaaaagatgatcgactacatctttgacggtgtgaagaacataaagttttcgcgtaatgacaataaagagcttgacttcacagacatcgaagacatggacaaaatcagaaaagaaaagctaggctaccttgtaaacaaaggcatcatatatggtaacattaacaagacttacgcaccaaagaacaagcttagtcaggcagaaggcatactagtcgtgcaaaggatatacgagatcttgaaggcaaacgagggcgagaagaacgcaaagaacctctccttcgaagtgcaaaacatctcagaaggacttagcaacaacgaccaaaacatctactacaagaaagttgatgatcaagtgctcattaccttcacactaaagtttcctagtcccggctacgaagtcggtgtagaaaaagtactgcttagtgaaggcaagataacgatatatccgcaagtgcatgcacccggacctaaaacaataacccttcaagtcatcgcatacaagacagtgacacttgcactaaacgcaagcgaaacaggagacggaccatttagcatcaaagttataggtaatgatgacaacaatcttgaaattaatactagataataaaattaagcacttcattattgatgaggtgcttttttcatgtcaaaacacaaatttaagaaattcttaagacttatttaagaaaaaattaagaattgccttgtataatgagattatgaaaggatgatcttatgcgttatattgaccccgatagtaaaacatataaaaggagaagtgctaaacgcagcggcagaagaagaaagagaagcaaagctagaagattagtcttcttcgtcgttgtgcttctagccttatacctagtctttggaagaaatattttaaaaagagcctacaatagactctactcctttgtagaaaggtcgagccttgctagactcatagttcctagcccatacacaactataaaaatggatactaacgaaaagtacgcaggacttggtcaagaaaaaacttccggcgatggatatttcacaaagttcacaacagtggatgctaataaaaaaacttatattgagtataaacaaaatatcgacccgtggaagaataatgattattggaacggcaatatggaagactacggctgtggcatcacagctatgtccatagttttgtctggctacggtcaaaatcttacgccagaagacttaaggacaaagtactaccctcgccttgattatgccaagctttcaaaagagctaaaaagctatggcgtagacaacacagacttttatttcgatgcaaaatctttatcaagtgagagcatcattaatcatcttaaaacgaataggcctgttatagtatgcatatggaacaagcctgaagagaaccgcttcacgagtaagtcacactacatggtgctcttagcagcaacagatgatggcaaagtctacatctcaaaccccaacggcggcgaaaacgactacagaagctcaggctggtactacatcgacgagatacttccttacctagccaaggcgatgtacatcacatcttattaatacacaaaacaccctatcaatcgataaggtgtttttttgcatccgttattcactttttactagttgatacgcccttctctcgtcgccgctttttagataaatgatgccagtgtatgcaaagcccaatttctttagcagcatgcacatggtcttgttatcttcgtgagtgtcaatgcgcacattgtccaccgtcctcatcgcatagttaacagcgtccctaagcaagtgagtgcccctacccttgctcgctatcctgtgaataaccgcgtatctttcatcattaagccacgcgccatcaatcacttcatacgtctcctcgcccgcgtagctcagcatgaaaaccccgtacacgccctcagggccctcagctacatacaagtctccccttgctatgtcagtaagtagcgcctcttcgtcagggtatttatcactccactgcttcatattgccctcagcacgcatcttcgccttcgcttcctcgtatataggcatgatactctctatatcgtccttctttgcctttctaatcataaatcctcctacgtatatgtataaaaaaggcagcccctatggactgcctttcgcattgtttcttaaattactttaatgtaacttttgctccaacttcttcaagtttcttcttcatttcgtcagcttctgcctttggtgcagcttctttgattgtcttaggagcgccatctactaggtctttagcttcttttaagcctaggccagtgatttctctaactactttgataactttaatcttttcagcgcctgcttcttcaagaacaacgtcgaaatctgttttttcttctgctgctggagctgctccgcctgctgctggtgctgctgcaactgcaactggtgctgctgctgatactccgaattcttcttctagtgctttaactagttctgataattctaatactgtaagtgattttacttcttcaattaaatttgtaactttttctgacattataaatacctccaaaaattttttatgcttcttttgctttttgttcagcaatttggttaagagctacaactaagcccttcatagttccatttaatacattggcaaagccttggattggtccgtttaagccaccaagtacttgtgcgataagaacttccttcgatggtagttctgataattgttttaattgatcaagtccaaagatgtctttgttaactaaaccaactttgatttcaagtttgtcgtttccttttgcaaacttgtatgctacttttgcagctgagcttgggtcgtcgtatgcaaatgctactgcatttgttccttccaagtactcgtctagtccttcaacgccgatttcgtgtagagcaaatctaagcattgtgtttttgtatactttgtactctacgttgttttctctgcattgttttctaaggtctgtaacgtctgcaacgtttaatcctttgtagtccataagaactacggattctgatttttcaagtttttctttaatttcttgaactacttgtttcttttgttctaaaacatgttctttcactatttcacctccactggaaaaataggaaccttagctctcggctaagcccgtttaagtctatgtcaataaaaaaccctcttatagacataagggggttgatactggctatctatcctcggtaggtaattaagcttaacgctcctactgtctacggttatatattcctattaaattaactctgctaactagtttattatatcaaatgctttgtgagttgtcaacagtttattcagtaatttttgagctgtttactcttactccaggacccatagtcgatgtaagtgtaactgatcttaaatactttccttttgctgcagctggtttagctttgatgatagctgacatgatagcgtcaaagttttctccaagcttttcagggccgaatgatacttttccgatagggcagtgaataatgtttgctttgtctaaacgatattctactttaccagctttgatatctttgattgccttttcaagttcgaatgtaactgttcctgacttagggtttggcattaagcccttaggtcctagtaccttacctagtctaccgataagacccatagtatctggtgttgcaacgataacgtcgaagtcgaaccagttttctttttgaatcttttcaaccatgtcttctgctccaacatagtctgcgcctgcttgtttagcttcttcttgtttgtctgcctttgcgataactaaaacttttttagttttacctgtaccgtgtggtagtactactgcgcctcttacttgttggtctgcatatcttgagtcaacacctaatctgcagtgtagttcaacagtttcgtcaaatttagcctttgctagtttaactactagaccgatggcatcttttgcgtcaaagtattcttgtctatcgaattcttttaaactgtcttggtattttttacctctttttgccattttctaacctccttgtggtattaacgatttttctcccacctgtaagtagaattactcttctacttcaacgcccatacttcttgcagttccagcaaccatgctcatagctgcttctacacttgctgcatttaagtctggcatcttcaattctgcgatctccttaacttgatcttttgtaagttttgctactttcttcttgtttggttcgcctgaaccgctttgaatgttaagagctttcttgatcaatactggagctggtggtgtctttgtgataaaagtaaatgatctgtcttgatatactgttaaaacaactggtataattagacctactttatcttgagtcttagcattgaactcctttgtaaattgcataatatttacgccgtgtggtccaagtgcagttcctaccggtggtgcaggtgtagcttttccagccggtatttgaagtttgacaattgcactaactttttttgccatattcgcacctcctcgattattgtgctaatgcacttatatatattatcttaaatgataatagctatttagtgatagggcttacttggtagtattcaaactctactagtgtgtccctaccgaacatattaacagaacactttattgttcctgcgtcttcgttgactgaatctacaactgcttcgaaacccttgaacggtccgtctgtaacggctaggtggtctccgtgtttgtagtttatgtctttctttgtatcgtcgattatcgactttgtatgaacgcctaggttataaagttctttctctgttaatggtattggttttgattgtggtccaacaaaacctgttactcctctggtatttcttactagataccatgatttatcgttgataatcatcttgactagcacgtagcttgggaatatctttctggatttgatttttttgacgccatcctttttttctacgtattcttctgtaggcacttcaactttaaacactccgtcagctgtgccacgattaactatcatcttttcaattgtagcttttaccttgttttcatatcctgaatacgtatggattacataccattgggcatctgcttctctatctgataaatcgatagatgtagctttgttttcgtttaaatctaaatcactcattgttatttaataaatagtttaaataatgcaccaattcccaggtcaataaggtaaactaatgctgctactgcaacgctaattccaattacaactaatgtgtaattagttaaatcctttttactaggccaaataacttttctcatttcagctttaacgccttttaagaatgtacctgttttacctttcttttccatgctatcaactcctaaaaattattttgtttccttatgtgctgtgtgtttcttgcagaacttgcaatacttttgaagttcaattctttctgttgtgttctttttattcttctttgttgtgtaatttctttgattgcattctgtacaagctaatacgaccttttctctcattatatacacctcctactcatataatactctaaaaagtattatacaactacctatatatattatcgtagtttcgtcaatttgtcaagcgttttttaaattattttgatataaaatttattatattattcgtcactctttatattagtcgtcatatctgtatttatatctgttgtcatagccgttgtcatatctatagtcatcgtatctatagtcatatctgtcgtttgacttgtagcgatcaccaaagccatttttatcaaggccatcgtttaaacagccgctgtttgcacttggatacttactttcgttccacctgtgatcttttgacatctctctatcgtctataagaaaatacttatacctaagcatatctcttccactgcttgaaacagggtcgtcccacgtagtatctatatgataaagccttccatcaatctcaactaagttccaagcgtgtccgccccagcctgaagagttatttgcctcgccacttattaattgcgattttaatccaacttctttagcaagtagctcaaaagtttccgcatatccttgacaaattgcgatgccgtacttgaatattgatataggtgagtagacgttgagtccgttttgaagttcatagttacctgatttgtattgatcgtaggcatattttgtcttattaactatccagtcatgtatatactttactttgtcgtagtcgcttctgccattaagctcgcgaaccatatcatcgatttggcttagatacgtctctagttcatcttttgatactggatactcatactttagtgttactttattaccgctttcgctatagcttttgggtacggctccaaagtgttctttgaattttactgcatcggttgctaagaaagcacttgagtacttactcttgtatgcatatgggttgtatgtgaatgtaaatgtctcttcacggtttctaagtgctactcttagtttttctagagcttcttcatatgagtttacaaaatcttttgattcacgagctttttcaagttcacttttttgggatatctcactttggttttgcacattattttcttgtgtagtatttgtatcgttatccataaaattaaagagattttgtttaaattcatctatcatattgttaaggtcgttcgctgctccaacattgtagttttctcttaatcctactacgttaaaatcgaaattaaaaagattgttttctttagcatgatttaattcgtccctatctatgaagatgttttttgtttgcatattatatataagacttgcgacttcagctctcgaaagtggacttgctggattaactttatttttgttatctcctctaacgatgcccatgtcttttaaaatgcaaaaatctctcacacgtttaactagcttactatcgttaaatgttaaatttgcttgcggcgttttatttggaaataattgcccaagtagtccaaaagcttcgtctcttgtaatcaaagcactgccatcaaagtaaattccattttttataagtcctaaggctaccaaatcatttaaatatgctgagaaccaatcgtttggaacaacatcttgtgactgaagaatgtagtcttgattgtcaaaaccttttagttttgcaagtatcgttacgaactctgctcttgtaatctttttgttcggtttgaatgtaccgtcttggtatcctgtgaagtatccaagattcgatgtgtactctatatatggttttgcccaatgctttgctacatcggtaaatgtttgtgcgtctgtcttattagtgaatgtgcaaagaagtacaaatgctagcaatgcgagtataaattttttcttcataattacctccaaagtatatttataaatttaaatcttttagcttttctagttctgtctcatcgatgccggatatcttcatattgtttatcatgttaatcttcttcgaaattctcttttgtgttcgctttgagttctctatctctattgcaagctctctagagctaagtcttgaagcgcctctttgaaagatgaggctctgctctgcaaggtcactggttgcgactctgattctatagccatatggcatattcgcaacttctctttcgatatatgagtctgctgtaatattctctttagtaaaaactatctcaagacccttgactattttcttttcgccttgattgcctttaatgaggtgaccgtcgtagactagtatgatgcgttctttgttgtagcgcatgtactcttctaggatgttctctaattcatcgcgagctgcctctagcgactcttcctttctatctctcaaatgctcccaagagttgatgatgttgtagccatcaacaaagagtatctgcctaagctttttctttttcatccttttgtcttaagatttcatacatggcaatagctgccgcatttgatgcgtttagtgagtttgttttgccaaacataggtaggctaatgatagcgtcgcagttctttcttactaagtccgaaagccccttgccttctgagccaactactagtgcaaccgggcctaataggtttgcctttgtgtacttttctccgtccatatcaaggccgtagatccaaacgtttctttccttaagctcgtttatggtttggttaaggtttgtcacgtttacgactagcatgttgtcaactgcgcctgctgatgccttgtaaactgtttcattaaccatggctgaccttctctttggtatgatgactgcgtgcactcctgcgcactcagctgttctgatgatggcgccaaggttgtgtgtgtcttctatgccatctaagattacgaaaaatggatcctcgcccttttcttctgcaagcttaaagccatcttccaatgttttatattcgaagcctgctgtgaatgcaacgactccttgatgcacctcgccctttgatagtgagtcaagcttttctctctctactctttgaactatgatgccatgttcattcgcaaggcttagtattctacctatagagccttttagctcgcccttttgcacatataatttgtcgatggctctatcatttttcaaaagttccataacgggatttcttccgtatatatattgttcttccaatttaatcctccaaacatttcttaactaaatctagtagtctagtgtagtctttcttcaaaaacagatatgcaatgagagcttcaaagcctgttgataccttgtatgcactgttgtctgtgttcttaggtgccttgtgtgacttgtggtttctggctcttttaaatacataaagctcgtcttccgtgagatcttccttaattttctcaaaggcatctctttgcgcataggcacttacatactttgtcgatagcttttgcagctcgtacgcctttagcggttctttcgcaatgtagtagcgcacgaagagctcgtagacagcgtcgccaatgtaggcaagccttatagggctcatctcgtttatctcggcatcagagtactctatgccgaaaagctctgttatatctagatcctttcccatctttgtccgtctttgctatctataatctttatgcccatagctagtaagtcatctctgatcttgtctgccttagcataatctttatttgctcttgcttcgtttctttcgtctatcatctttttaatcttgtcttcatcttcgccaagtgatgcatctgactcatcttctttcattacggcttcgctatcgtcaagacctagaactcttaataaatcgtttagctttgcttcgatgtacttcgcgctttcgtagtcgtcgtctccaagcttgtttatgatcttaactatgttaaaaatccttgtaagtgcgtccgcagtgttgaagtcatcgctcatagctgcaataaagcctgctacttcattatcaacgtctttgataatctcgtctgaggcttttttgcctgtatccttaatggcttcaagcctcttaagagcgttgtgtatcctcttaatcgagttctttgcgccttccatgccttcttttgtaaagttcataggctttctgtagtgagtcgatagtataaagaacctaacagtatccttgtcgtagtcatcaagcaaagctttaagcaagatgaaattgcctagtgacttactcatcttcttgccatcgacattgaccatgccgttgtgtaaccaatacttagcgaatggcttacctgttagagcctcactttgctgaatttcattctcatgatgaggaaactctaggtcgctaccgccagcatgtatatcaagcgtatctcctagtatcgccctactcatagccgagcactcaatgtgccagccaggtctaccgtctgaccatggtgatgcccagtgcggttcgtttggtttagccttcttccatagagcaaagtctagtggattcttcttcttttcatttatatcaactcttaagcctgagataaggtcgtctatgttcttctttgaaagcttgccgtagtccttcgccttagtagtgtcgaagtagacatctccatcggactcataagcagcgcctttctcgataagacccttgatgaagtctatgatctcgtccatatgctcagtcgctcttgggttgatgttacgatagtcatatatgcctagtctagtagcaacttctttgaagcgttcaatgtacttttcagcaacttcgtttgaagtgatgccactttcgttcgctttattaattatcttgtcgtctacgtcagtgaagttaaaaacatactttacgtcgtagcccatgaatatcaaaaatcttctaactgtatcaaatacaactaaaggtctggcattgcctacatgtatatcgttataaacagtaggaccacaacaataaaagttcaccttagtatcgtttataggtttgaattcttctactaaaccacttagtgtgttgtgtaatttaatcataattgcctccttgtataataatatagttattttatcatataaatggcttttagtcaatcgttttgagctccatagaagctaagttttaagcgtgaaagacgttgtatatagtagtgagtcacttatatattatgaggcttcatatgtagtatgaggcttcatatatagtgagtggcttcatatatagtgagtggcttcatatatagtgagaggcgtgctatatagtaggtggctacctatatagtgagaggcttagtatgtctctttgcgtttacttaagatgccctttatgatataatgaagaaagtaagcaaagaatatttgccaagattataaaaaaacatggaggttaaaatgaaaaatttaaaaagactatgcgctttaatgctagtatttgctagcatacttttcttgagtgagaatgcatttgcgtttactgatgtagacagctctgactactactacaaagccataactgagctttcaagtaagggtataattaacggctatgcagatggaagcttcaaggtatacaatcaaatcactagagctgaggttgcggcgatacttgcaaaggcctttaactatgacgatgcaagtgcgaatacatcattcaaagatttgaaagctgagagctgggcctttgagcctgttatgaaggtagtgaacaaaaacatcatgtcaggtgttggagacgggtttttcaaaccgcaaaacaatattagagagaacgaacttatgaagatagctgtctctatacttggacttgacgagtatgcaatcaaggctggtgcatggccaaacggctacagaaacgttgcacaagacatcggcatatacagctttgccggtgatggtagtaagtttcttaatagaggcgaagtggcgttgatcgtacacaatatccttacttacaaggagctaatgaatgctgatgaaagcaagggacttgtactaggcggcaagaattgctacatcggtatgagtagtagtgagtttggaagtcctgatgaagtacttaactctaaatataaggacgcttcatggtacgtttatggcacaggtgactacgataacttctacgctgtcctagtgaaaaatgatctagcaataggtttcttgtcttctggcaatggctttaagtacaaaaattataaagcaggagatactacaagtgaagacattcctgagctagatacagataaaaatgacggcaatatcattcacgcactttactacgtttcaaaaagtgttgattatgatcaagataagaatgattactcaggagaggagaagataaacttccacctagtaaatgcttttagaaagttccacagactaaatactttgcgttgggacgaaatactagctgaaactgctagacgtcatagtgatgatatgcttaagaaaggctacttcagtcacataaaccttgaaggcaagagtccatttgacaggatgcaagatatgggcatcacatattattcggcaggcgaaaacattgcatataactacggtgatggctatggttcatatgttgcctgggttaattcaaagggtcacagaaaaaatattctaaattcatcttacaatacacttggcgttggtatagcctgtgacggatccttatacgctacacaaaacttcataggaagatagtttatagtaaattcataactatatcgaataaaaataccctccttactggtttgtccagtaaagagggtatatatcatttgggatctacttctcctaaaaatttatttttcattattcacaaatttttttataattttctagctaaaaatactagatgctctttctcgttcagatggtattcgcatttaaatcctatcttatttaatgtttctgtgagatattcgggagaataaacttcaaaatctagcatatccgcccatttttttatgtttttatgctctctatatgctccttcgttgcatattagaaactgaccgtccttaactaaaacacgatggatttccctaaaagatacttctatattcttccaaaaataaattgtttcaaaggcagttactatatttatggattcatcttcaaaaggtagtttagacacgtctgcttcaataattttacacctgccatctcttatagcttcgctatttactgaacttgctatatctacacttgttttagaatagtccattccatatacttttttagcctttgttaagaagtattgaacattacgtccaccgccacatcctagatctaaaactacatccgaggttttaatattcagaaaggatctgccccatttagccaatttttcgtgaccaatgttcattcctttcaccatgaagcgaccgccgaaattatttttaggattttttacattttcaaaaaatttttttaacatttttatctcctgcctcccgttgataactattatcagtgtaattttatcataaattttacgtttattcaataatatatcctatccaccttgatatttgccagattttcgataatcgaaattcttgatttccgattttcggaattctggacttctgcttttcggaagtcttgttttttgtatctaagggtgtaacttttcgttactccctttagatttctctggtcatatcttttttgcttggttttacttctacaattttttctaagactttttttcatctatgatgttgtctacaaaatgtccttcatgatccagtgctgaaattgatatgtcattgtgcttccactcctttctttggaaatacttttcatgttctgttatcttccagtaggctttgtagacttcttcgcttacaggtacggctttgccttttacataaaggtaatattctttattagccattgtgttatccttcttttctttttctctgttttgctttttgagaataaaaaaagaggacttctacactttggcgtaaaaagtcctccgaaaataacaatcaaattaactcttattgttattgaattatttaatttttgtgtgaaaagttactttcaaaaacttttattatcaaaaaacatcgtcatctcccattaaatactcatttatttagtcaaagatcaaaatagatgtatttacttaaaactccatttatttgcttgctctcttattgaaatgaatgatttatatatcccatcttgagttataagctcattatgcgttccttcttgtactatttcccctttatctaaaactatgatgttgtctgctttcctaacagtttctaatctgtgtgcaatcataataactgttttattctgtactaaattatcgatggcttgcaaaatatggtgttcattttctacatctaaagcactggtaaattcatctaaaatcacaatgggagcatctttgagtattgctctagctatcgctattctttgtttttctccaccggataaagtgctacccgcttcaccaattttagtttcgtatcctttttgcaagctttttataaagtcatgacagctcgctttttttgcagcggatataacatcctcatcactggcatttggctttgccaaacgaatattattcataattgtatcttcaaacaaatacacattttgaaataccatacttatatttttcatcaattcttcggtggagatatttgttatttttgctccaccaatcagaatttctccttcgcttacatcataaaatctcggtataagcttgcaaaacgttgtttttcctgaacctgaaggtccgataatcgctgtaagtgtgttcggtttaagagctactgatactccctttaaaacttctacttttccgtaagaaaaactcacgtttttaaattctatttcgttggattttatattttgaataggtgataatacctttatttcttcagcattttccatactgcttatatcctttagtgaactatctaaaagtccaatcatagaaagaatagaacctgcttgacttacagactggaatattacaaagctcataatcaataaattgatggctttttgaggagaaatttctccactattccacataaaaaacgcatagctaataatcataatttcaaacagctgtatcgtaagattggcacatatgcttgagggaatagatttttcggataaatttatattattagcacaactaccatctatatctttttttactctttcatctttttctcccataccaaaagccttaattacgcttattccctgtataaattcaatagcactttccgttaattttgtttgtgctaattgtcttttgggagcttcgcttcttgaaattttcatttgataattaactacaaacaaatatgttaatatgcctgcaaatattacaacggaaactttcatttcatagtaagcaaatcctaaaactattgatatagcagataaaattccacctatcacatgaattaaaatgattggtgcaacttgttctacagttgaaatggatgtagtcagtgttgagtttatatttcctactgaatttttgctaaagaaccctaaatagagttttttaaataatgagccaaaatataaccttttatctttcgccatctcaaatccaacggatacagaacccagttgtgtgaaataaccaaaaccaaatacgccgatgatacatacaattccgagtatcattaccttataaatataattgtccattaaattgctattaaacatggcgtttaccgctaaaattattgctatcattttcagcataacgaatatgccttctataaatgatagaattaaaattttgactaaactgccttttcttttctcactaaagttccatacactttttagagcttcaaacatattctcacctccaatcaatttgctatttcatataaatgcttatacgcagaacacgacttaataagttcttcatgttttccatcgcaaatgattttcccattttccatgtatatgatcttatctgcatttatgacagttttaattttatgtgtaataacaattagtgttttttctttggtaaattccagtaacgcttcttgaattttttcttcattttcaatatctgtacttgcagttgcttcatctaatatgataattggagcattttttagaattgctctggcgatagctattctttgcttttctccaccggataacctatcccctgcgatggtgtcatatccatcaggcaaagttacaataaaatcatggcaaccggctcttttagcagcttctatcacctcatcattcgttgcatcttttttacctattctaatattttccaaaatagtatcatcaaataaaaatgtattttgatccacataggagataagagtattcaggtcattcattgaaaggtcttttaccgctataccacctatttttatgtttcctttctcaaaatcccaaaatccggctaaaagtttcattagagttgattttcctgaacctgaaggaccaataattgcagtcatagttttttctttaatggttaaattcacatcatcaacatcattttttgtcccatcataagaaaattgtaaattttcaaactctatgtcgtatgtcattttttcttttaaattagaattctcacttctcttaagttccggataatctaagattccttttatttccttagcaacagttcccatctgtgccaattggtcaacataactggatgctttaacaatcggtttaaatattccaagagaaatcatcataaacaaaaataaactttgctcagtaagaaacccattattaaaaaatatcaatcccacaacaattgttggaaatatagatacaggagctatgctataggaaagagacgcataaatctgtgagcttttcatccagtttatagcatactccgcatggcgtatgactgcatttttatatttagcataggaactatcttccatattgaaagttttaattacctcaatccccttgacatactctataaccgcttgattcatattcttttgtgcctgtacttgtccctcatattttttcttatatccaatcatcataagcattccgattgatagtccaaatataacccaaagaaatataatcccggtaagcttaatattaactgcaagcatccaaacaatcatggcaataggtatcaatagatttgcagtcatctcaggaagtagatgtgctaatgttttttctatatcttccaccctgtctaccaatatagtttttaatgttccactaggattcatatcaaaatatcccatcggcaatctaacaaatttatcacaaattgcatatcttaagtcctttagtgttaagtatgctgctttatgagatataagtgttgaaatatttgaaagcagcacccctgatattttgcagattatagtgaaaatcaagacatatatcatgttgtttccatgaaatcctttgaagatatatcccgctaaaattccaacaaaagcataggataacagttcgcatagaacagaaagcatacttagcataacagataaaatatatctttttttgtatggctttataaacgaatccatttctttaaaaaagtttggttctttctcttttttcatgactttaccctattaattagcttctttttctaaaatatgtttccttacgaccttgctacctatataagctcctgcgattgctgaaactataactaaggcaagtaaaatcagcgttccccaagaagaaatcattttgcctgccgctataatatttgaagctaactccttttgtttcatggctcctatagttttattcaaggctattgtatatggataaattacacttccaattgaagccaaagtttgctgaataacatagctgattccaataacttttaaattaccataaccttttttatataataaaaactctgctatcaatcctgaaattacaaacatcaaaatatatggtggatagaatgctatcactccttgaataagggaatatataaaaaacgctcctctttttttcactttcactccgataacatagaaaacaataccctgtaataatgagtaaagcaccggtgttaaaagtatggtaattggtgttgcatacatgaatgttcctatcgaaaatatcaaaatgttacacaatgataataaagtaactgtaatgatatctttcgctttcaatttgtttttgtgcatgattaagtcctcctatttttataaaatatttatcatcaaaattactatcattccaatcatcaatatgtaatcgcataaattgaactgtaaagtaacataagatgattttttatgatttaaagcaattcctcttgtttctgctgaagctgataaagtttcgcctattcttaccactcgaaaaatgagtgatacaatcagagcctcaagatattctattttttcttttattatatttttatgcttgcaacttcctctatttctaagcacctgtctaagtaatttaaaatcattccttagcaccgggaaaaacctgaaagaaactgcaagaatcaataataacttctcaggtattcttatttttctaagtccagcaagcatatttgttgcccctctacctccaagaataataggaaatagtagaaatattaaaataaatctaggaaacaaatttgccgtaaatattgtaatttcattcggatatataatctcaagaccgtaaataagccctataatgacagaagtaattcctaaagtcttgtatcttctatttgcaagagaaaaaacgagagctaataaattgcattcaaaaatcaaacttttattgtcgattcctactgcaaccatacaaagaagccaaaacaaaatatttgttctcggatctaaaagatttttttctctttttgccggagcttgatcttctaaatctttttcaaatatacttttaatgctttcaatatctctattctcttttacttcacaaatcctttgtatcgttccatcatcaagttccaaacatttatccgcaactgatgaaataaattctaagtcatggctaattgttatcacgatttttttctttttcatatcgtttatcaatcccactacagtatctaaactttttttgtccattcctgaggttggttcatctaaaataaccacacttttatccgaaagatacgccatcattaaggttaatttttgcatttgcccacctgaaagagaaaatggatgtctatcacgatatttccacatatcaaactttttaagtagagcttctatctcatcatatttgttccgatttacaccgtacttcagttcagataatacagaatttgtaaaaaattgaaattcagcttcttgcataataaagaggctatcctgcgatagctgcctatggctcaattctttttcctttagaaaaattcttcccttttttggtttcaatagtccacatatacattttcctaaggtggttttacctgaaccatttttgccaatcaagcaagtcacttctcccaaataagctgtaaacgacaaatcatttaaaatatgttgttttttatataaaaaggatatattttttacctctaatttatcattgacaacattagaacacttcttctgaacctcaatctgcttcaaatccgtaactcgtaaacacaaattatttaattcatccttagaaaatatcttaaaatcgtccttatcatacttttcataaaagcttccattttttattagccagtattcatcagccaactctttcaaatagtaaagcctatgttcactgattattagagtttttccatcttcttttagaagcaataagatatttttcagtttttctatggctaaataatctaagtttgcagttggctcgtcaagtaaaataatatccgtatccattgcccaagcagacataatcgctattagttgacgttctccgcttgaaagtttgaatacttccctgtttttcaaatactccaagccaaattttgaaaaagcttcttctgttcttctttttattatttcatggcttaaccctttattttcaagtccaaaagatacttccgtatcgctttccatcgtaaaaaattgacttcttggatcttgaaaaacggacgaaatcaattctccaacttctccaatgttcttgttttctatattgttgctatttaccaagatatagccattaaatatcccatcatagaactccggtattaaatggtttaagcacctaagtaatgttgattttccacatccactttcgccacaaagaactatgcaatctccttttgatatgctgccaattacatcatctaacgacttttcctttttgccttcataggaaaaatctattttaaaatctaaaatattttcatccttctcgcctttatcgtacataaattcaatacctctttataatttcatcaaatatctttctccaacccgccccaataaattcgccgagcatttttatgtattcgattgtctcctctttgctatatcctttttcaaccactaatttaaaagcactaaattgttgattcattaaaagctctaccaaatctaatttcatctcacttatattcggatctatattttcccttataaattgttttgttatggaaattttattattcatcatttcacgaaacattccttctacagaactgcctttacttgagcaaagtattagtttgcactcctcgtaatatttaaataacacatctacatatcctttggtttctttctgaatgctacgcaaaaaatgatcaaagtttttatctacgcaatattccctatacgagtattcgttctcttttcttttcacacttatagcttctaaaaattcttttatcaaactataaaaaagttcatctttccccttatatcttgtatagattgctcccgttgtaactcccgctcttttagcaatattgcctattgtagcagcctgaaatccatatttcaaaaactctattttagcagcttcaatgattggtttatcaagttcatggtttctatttgccatgtccattcctccattcttacaaaactttaattttaatagtataatcaataatcgaattatcaataatgatattatttattatacatcatttagtgttatttagcaatagttgtaagatgtttttttagaaaatttactgatttacatatttatttatattaaataaaatagtcggtgcagttttaaaactacgccgaccacaaagtcataattttttccatactagcttttttcttttttaaatatctgtaattatactctctcttcttctctctctttttccttagcttctctagttcatcaagttcctcttgcgtaagttccttaggttcttcttgtgacaattcaaacttgccaataaagttcaaagccagaatatttaagaggattttaaaagataaacttaatttaaaactcggaaatttccagattttaatttttgataggttgtaacgaatccttactccctttttaaattccattacatagctttttattctcaacctaatgaaattaatctttatttttttctttctaaaattattctttcttaactcaatattactaatattttatagttattctccgatttttggatttctagaaatctgttattagaagttcttgaatttcgattttcggaagtctggacttctacttttcggaaattagattttgtattattagtatattttaaatttatatgtactcacttcctagaaaaaaaagagcagccttatttaagctactcttgtagaaagtataaaatgggttttattttattatatttttctttgtgtctcctcataccagttgcaaaactactcttacgtccatgtaatttttttgggtctttttgacgtatccttcttcatctttatcgaagacaaaatgcttataacctcattaaaatgcaggatttctaaatttacatcttttgtatcaacactatagtctccacatgtgttgtcaataggataggaatacaaattattaacctcgtcgcttgaatgaggatacaatttgttgtcagtttcctcattaacttccttggcattttttcttctgctcttgaataatcttccgtcctgagaatctttttttccagtcttatatatgatagtaatcattgcaggatcaatttcaccttcatcgttagttcccccaatgatgattttatctactatactttcaaatactgccctatcaaattcctcaagatatttattggactcaagtaattttttaaacccctcgagccttttcttcaacgctttttcatcagtgagtgttacttctaaagtccttttttctgcaagtaatttctctttactaatagctatttcattatacttatcctgatatatatccatgctgattgactcattcagccttaactcaacaagatccttttctttctttagtatcttatcaagttgatttgttatcttcttcaggtctttagctaaactgttgtctttcaattcttcttccacagttttaaggaattcattagtaatttcaacattattgtggcatacctgacgataactttccatgaatgctttttctatggcttcttcttcaatccctttactatgcggacaatacttctttccgtttttagtagcattgacacactgccatataacttttgtatactctgaactcgaatgccaatttcttcttgaaagattatgaccacaaaatccgcattcaagcatactgctaaaagcatattttcttgaatacttttctctcttaccgccattattagcaacggtatttctgttttttgaccttcttaatctaataccttgagctttttcaaaatcttcttccgaaatgattggctcgtgatggttctctatataaaacttatcctgttctccgaaattatccaatcttctctttgaaataggatcaaccgtataggtctttcccatcataagatcccctttatatttctcattttttatgattcctaaaactgttgtttccgtccatcttttatttcctcttggcgataaatatccttgttcttcaagttctctggagattaccataccgccaacaccttcaatatatcttctgaaaatatatcttacaatctcagcttctttttcattgatagaaatgcttttagtttccggatcatagtcatagcctaaacacccttgaaagcctaccatttctcctctttccatcttcattctcaaaccttttttgacattggctgaaatgttctctacttcctgttgcgcaactgaacttaaaattgttaaaagcaactctccgtccattgttaaggtgtttatgttttcctcttcaaaaaagaccgcaacattaaactctttcaactttcttacatactttaaggtgtctaatgtatttcttgcaaatcttgatatagactttgtaattatcatatctatatcgccgttcatacagtcatttattaatctttgaaagtcaattcttcgatcaacctgtgttcctgttatcgcctcgtcagcatatattccggcaagagtccactctttatttttctgtataaattctgtgtaatgttctacctgagaattatagctattaatctgatcttcagtatccgtactaactctgcaataagctgccactctctttattgagcgttgaacacaccctgatgcagttcttttcagtgtggtatcacctttaataactttaacatcctttttcactgcactgcctcctttttgtatctttctatgcagttctattataccacacttgcaaaacattataaatataattctgtagagatattatacttttttcatcagctttagttttatctttttatattcaatatcactgagcaagtgcttagaaagtaacatagacagcatagataattggaggctatatcttaatagttcattattcattctaaatcctcctcatataattttatctaaagttttatgacattaacgggtgcttaggataagcaacattggaatctcaccaccgcccctgttaagatgagccggctttcactaaagaagtatcattatcattacttaggtcatcgctcgcaaagttatcctcgttctttgctttaagaaaatttatttatcgctcgtttccttctatccttgtctttgacagtattcatttaaaccgaatttcttcagcaggaaagtcatggcgtaaattcctttcgctcactaagtaattaaaagtcccgccatggtctattcagttttcaaggaacaatagcctaacggctttaagagagattctcttcaactttattgttttcatcacttctttaaaaaaatataaggacagatctcccttcaatttataaaggaaaatctgcccccatctacaaggcgtttactttataaattctttcaaaagcacctttagctttttaagaatattgttttttcgccattgtatagcttgatagcttactttcttacttcttgctacactcgataatgtttcatcattaaaatacaaacgctctatgatgtccctttcttcatcattcagccttgacatagcctttctgactgtttcaattaagatctgagtttcaattattttttctacatccacactttcatcagcaaggttatccacaaaattcccgtcatgatccaatgatgaaaaaaagagcaagtggtttttcttgtccacctgctctaaatacttttcgtgttctttttctcgccagtagactttataaatatcttcactgacttttacctttttccctctgacataaaggtaatactcttttgccataaagtttcctccatttctttttttgtctgcgtttttagacaaaaaaaggaggacttctgcacataggcataaaaagtcctctaaaatgaacgaaacccgttctttccttaattgtatttaattgtttagacgagtgagtatatgaaaagactgacagatataaagtctatagaaaaaagggctatttttattgcgacttattatttgaaataaacatatagactttcccattttattcctccatttatttaccgtttattatcaatcttttacaatccaaatatcatcttgattaacaacacaattcgagcatcccgaacattgactttggcatttacttgttgcagaccttttagtttttaccaaatatccattattttcgagatattcaattttcatttttacactatctaaatcctcacctgtcagttcagcaagttcttgcaaagtgcaagtctttttctttttcaatacttctaatagttgtataagcatacttatcacaccttaaaaaatcagtagtccaatatgatatgcaacacaagatataattagagccgataatatataatacagtgctatttttatcgtccatttttttgaatgtgtttcttgtgcagtagctgcaagagccattaaacaaggcatattgaagaaaaaggcaaaagtaaatgctaaggcttccggctttgaaatcattgtcaacatattattgcttagaatagcggtatctactgtccctttaacctcaactgcatgccatattcctgaagaagtaaataatgatgccattactccaaatgccgattcttttcccattgcagaagcaacaaaagccataaataattgccatggtaacccaaacaattttgttacaggctctataaatgttcctactttataaataaggctgttagctatatttccatcaggcgtataggcaagaatccaaaatataacagaaataaggataatgatactcaatgcccttttcagtacatttcccatcctattcattacagaagaaagtaaatttttccaatgtggcttgtgatatggtggaagttccataatcattccaaaatgttcacttccctcataaagcgattttctaaaaatcctatatgtgattagtaaatgtagaaaagcaactgcaaataggcttaatatcacaaatactgcctgttttccgaagaatgttcctgtaacaagcccgactactccccatgttgacccgcaagggactacccaagataatgcaatcgtcataaccctctgtccccatgaatcaattactctcgttcctgtgattccacctatattacagccgaaacttaacaagaacggcataattgcttttccttgcaatcctaatttcgacatagtgttgtcaaagacataggaaactcttgccatatatcctacatcttccaagaatccaaatactaagctaattcccaatacataacttgccatttgcaatgcaaaagtaattgcagtcattacagctccacacaaaagtgaaatcagccaatttgatactccaatggcgacaagcccctttgccaacaatgttgatattttaggtataacaaacccgaacaatcccattagcggaaagccgataagcatggaaacaatcaaacctaaaatgataactccgatagccataggttttccgaaagctttacttgtggctatacgatcaaatttgcttctcttaaatactctctttttctgaataacatttgcattgataagtttatctatccaatcgaatttgcaattaccggttatcagattcccatttttgatgcctcttaatatatcctctatttctttaaatttgtattcatcaacattatcttttaccaattcgattactttcacatcttgatcgaataatttcccgacaatccatgattttgaaaatacgcctatcccttcatcaggaatgtaatttttcagcaatttatatttatctccggcgacactttcatatgctctttcaaaattattgtctgctaaaatccttccgctgtctgaacgctccagaaaaacataaaactctttgtatttctttttatctgccgcaacgataggaatgacaggtatattcaaggatttttgtaacccctttatatttatatttttcccttgacttgtagcaacatccatcatgttcatgattaagacaaccggaatatttattccaatgtagtcagagagcataaatagacttcgatttaattgtgaagcatctgccataatagcaattaagtctgcgttcccggtttctatatattctcttgttataacttcttcctctgaatttgctgataagccgtatgcaccgggtaaatctacaattttgtattgggtgcctttatgtgaaaattcaccttcttttttctcaacggttttaccgggccaatttccaacatgttgatttgagcctgtcaacccattaaacaaagtcgattttccggaattaggctgcccaagcaaagcaatcgttattttcttcatatctcaaagtacctccatcattattttctctgcctctatcttattgacagctatcatcgtatctctacaataaatgagaataggttgctttttataattctggataacttcaacatcgcttccgacagttattccgatagatattattctgctttgaaaatgtgtatcaccaataatttcaacaactttaccttttgtcttttctttcaaagtactaagcctctccataactattctcctttatcatccactttttcgctctttcctgtgtatttaccatttcatagtaatgtcctttttttccataaagttcattatgatttccttgttcttcaattcttccgttatttatcaaaataatttgattagcgtttttaatggtattcaatctgtgagcaataacaaaaactgtctttccttgcattaaatgctccaaagcattattgattttagcttcattatcaggatcaagagaagctgtagattcatccaacaaaagaattggtgcatccttcagaatcgctcttgcaatagcaatcctttgtcgttcaccgccggataatgtacttcctccatcttttatttccgtttcatatccatccttcattttcaaaataaattcatggcaacaagctaattttgcagcttgataaacttcttcctttgttgcattaggttttccaaccctgatattgttataaacagtatcggttaacagtacattatcttgaaaaacctgactaacatatttaagcaacacatcaggttttatggattttatattttttccaccaattataatttctccactatttacatcccaaaatcttgcaatcaaattagcgattgtagtttttcctccaccggaaggaccaattaaagctgtagaagttccttcttttgcttcaaaagaaatattgttcagaatcgttttatttctatcatatgaaaaatttacattcttaaattgaatatcaaaattttctaattcaacttcattttcagaataaggcaatggcttcgtttcataagctttctcaagattacttgcagctaatttcaaatctttcaatagtccataggaatgttgaaaggcaataagaagtgcagataatgctaaactcataagcataaaagccacaaactgttcagttctaacactaccatctataagcaaatatcctcctataagaagaactatcggaagcaaaaagttaactgtgataaagtacatacttgtaggtaacgccattttcttttctgcgtttacgcttgtctttctaacattttcaagtgtatttatcattctttcaaaatgttcacttgtcatattagctgacttaaacgctttcataccttgaatgtactctaaaataatagaaatcatcttagaatttaaatttctttttcttgccccgtatttttctatcaatttgttgccccatatcaacataggatatgcgataagcaatactaaacactctaataatgcgagcttccaatcgataaaaaatgtgcctaataaaatcaatattgctgtaactgccgttttaataaccgatggcaaggtgtgcgttatgatcagttcaaaactactcaaatcttttgtaagagttgataatagataaccactactatttttttggaaatgaccaaggctcaaactcctataatgatttgctaaatccaaacgcatatctccacacatttcagctcctcttgaaaagctcaaatagtatgcatgcctataaatcagtatccttgcaatcatactgatgaaacatattaccgtatattctatgattaaggttttagttaatgtattttgcaatatattaacaacggtaaaatagagcattaaatacaaaacaatgcttcctatcgaatcaataaccattagaaaaatcggtaaatacaatttttcttttttatctttcagaagtgttctaataatcttaagcatttgcacttaccccctctccaaagtaatcttttgtgtatgtattccacatactttcatagaccccttttctttctaaaagagttttatgtgttccaacctctacgacttccccttcatcaaatacaacaatttgatctgcattcttaatagtatgcaaacgatgagcaatcataatgattgttttatttttcaacaagttttgaagtgctaactgtatctgatactcattttctatatctgaataggaagttgcttcatcaaaaataataattggagaatctttgagtattgcccttgcgattgagattctttgttgctgtccacctgacaatttcaccccttgatccccgattcttgtctgatatccattcggtaaactcataataaagtcatgaatttgtgctgcttttgcagcctcgataatcttattttcatctgcatctgttcccatacgaatattctcatagagagtgtcctccaaaagaaatacatcttgaaaaacaaatgatgtaatatccatcaaattatctatttttaattcattgatcggtatgtcgttaattttaattgctccacttgttacatcccagtacctcccaatcaattgtgcagcagttgtcttgcctgcaccggaaggtcccacaaaagcatttattgtattcggttttaaggataaatttatatgttgtaatgctttattttttgtttcttcatcgtcataactgaaagtaacgtctttaaaatctattttcatacactcattcttgtttatgatttttgttccgtctttcaattcatccatatccattattttttttatgttatccaatccgcttccaagctccatagattgcataaagattgttaccatatttaagaacgaaacaaaaaagcacattgtaagcataataaatagcaaataggatgttgctgataaagaatttctcaaaaagaaatatcctccgaacggcaatgtaaataagattgctgaatccaaaatcactaaagttattgataaaggatagcaagaactcacacacatctttttccaacaagtaatatacgcattcaatgagcttctatattgttcaaatttttctgctgttaaatgatacatttttattacaggcatagcctttataaattcgtttgccgaagcatttaaatcagcaatatcttcggatagctccgttgacatatccggataattttttattagcatcataggaattcctaatcccaaaatcataggaataagcataacaagtgccatcatccaatttaatttcaacatgaaaatgaacataataaccggaacaactgctgcctgagctaattccaaagtgctatgagccaaaaaattttcaactctatctacatcatcaaacaacaatgttttaatttctccgggggcatgctcttgaaagaatcccaaattaaattttgaaatatgatttacaactttcagcttaattctgtgtattgtgttaaaagctgctgtatgagataaaatgcccgcaaaggacattagtattgcttgcaaaacagcacttataattcctatacctgcccacattaaaatttctgtatacgaaatatttttctggaatatcattagtaatatcttataaactacaaaataaggaactaatgataaagccgcagaaatgacagataaaaacattcctaaatgtagcttttttctctcattttttgctaattggaatacataagatatccctgtcttctttttttccattagttattccatctcctttcctgaccgttagctatatctaactaactacatttattataaagctaattttttataactcaaaatctaaccacgaatttcggtatttcttgtaatccctttatttgtaagcttttcatcagtatttctatttacatttttataaatttgtgatataattaaataaatttgtgatattaaaagaggtgagcagaattgatggatagaacagttattgattatttaacaaacttagtacatgacgctccttttattcctgttccaactttatcaactgaaaacaaacaaatctttcaaatagatccccattttggcaaaggtacttttcgcatactaaaatttgacagcagtttaattctaattttaatcgctaactttactccaaacaaaacacttgaaaaaataactgaagtatctgaaaagtatttagagattagtcaatttgaaacagaaagtagctcatttaaagttggtggaaggaagttaaataatgtagaaaaaggtatctattgctacttaaatacagaaaagaaaacttatacctattgtgaggcaaataagcctgtaaagtttacgaaaataatcttaaccaaagaatactttgatactttcttaaaattaaaatatgatgattttgaatatgaaaaagcaaagattctcaattcttatttgttaaaaactcaaaattctccgcagttgaattttatatttcaacagataagagaatcccaagctgaaggaaagattttgcctttatatttggaaagcaaagttatggaactattatctatcataattacagagttagaagaaaaggaaaaaaatatatccgttgtcttaactaaaaaagataagcaaaatctgaaaagggctgtatcggctatgaaaaaagatttatcggttcatattgacggacttgaactctctaaaattgctttaatgagtcctgcacgatttcaattagcttttcgcaaatactacggtgttcctccctacgagtacttaaaagaattaaggcttaataaggcattattattgctgaaaaatcctgagtataaaatatctacgatagcagaaaaagttggctatacacacacaggacattttgctaaaatattcaaatcaacttatggtatcacaccaagtaaatatagaagtacaattacttaaactaatattagaattcaatatgtgcttaacgcttgctaccatgatcagtcttttgtagcaagcacagtaagtgtacggacacttacgaaaaaattgacgaagcagccctttgggatctgcttctttttttatcaatttttaacttgtaccctcgcctaatagtttcatcaattcgagcaaactctcattggaaactattggctggggcaaacttttagggagaaccctaagaccccgaaatacacctaaaggaggaaatacctatggcaaatagaatacgaaacgaaagacttgaaattaaactaaccgaagaagaaaaggctctttttgaagagaaaagaaaactttcaaagtgcagaaatatgagccatttcatccgcaaatgcgttttggaaaaggaaatttatcaagtggatttagagcctttcagagatttacaaggcttactttctaatgcaacaaacaacatcaatcagattgcaaagcgagtaaattcgacaggtgtaatctacaaagaggacgtcagtgatataaaaaaagagattgaacatttctcaaaagagctgtggcaaattcattcactacttctgaaaagaacatctgaaacggaaggtgaataataatggctattacaaaaatacacccaataaaatcgactcttaatcttgctatcgactacattgtaaatggagataagacagacgagcagcttttagtaagcactcataaatgccacgaagcaactgctcacactcagtttttaaggacacgaaatgacgcaggaacaaaaggaaccgttcttgcaagacatctcattcaatcatttttaccgggagaaacaagccctgaattggctcaccagattggtatggagctgtgtaaaaagatactcaaagatgagtacgaatttgtcttatctactcacgtagataaggggcatatccacaatcacatcatcttcaataatgtaaatatggtaacaggtaggtgctaccagtctaacaagaaaagctaccaccaaatccgttatcagagtgataaactgtgcaaagaaaatagcctatctgttattgacgagttttacgaaagctataagaaaaaatacaagactaacggtaaatcttggtatgagaatgaacaggcaaagcgtggtacttcttggaaaagtagacttcaatttgacattgacagaatgattaaacagtctaaggattgggacgaatttttaaagaagatggctgatcttggctatgaaatcaaatacggtaagcacattgcttttaagcccaaagataaggcgagatttacaaggactaaaacaatcggagaagattataccgaagaaagattaaaataacgaattgcagaaagagagtttatcaagactcccgacgtcaaaaaacgcatcggcaatgttattgacatgaacaccaatgcaaaggtaaaggaaagcaaaggctacgaatattgggcaaccaaacataaccttcatacaatggctgactctgttatttatatcagagaacatggcattaaatccgttaaacagcttgacgagtatattcaaaaagcagccgatgaaaggcaaaatatacaagagaaaatcaagtctattgataaggaaatgcagaagctttctaccactatggagcaagttcataccgttaaaaaatacagagcgtgctacaaggaatatactgctaatccgtctgacaaggcattttttgaagagtacaaagctcagattaccctatatgaaaatgctctctcagagcttaaaaaatcttattccaagctcccaaattcaaaggatattttagctgagcttgataaattacaagaaaaaaagaacacccttatgcaagagtattcttcctcaaaatccactatggacgagctttataagatacgaaaaaattacggaatttatatgggtaaggagatggagagatagccatctcctaataacccctgctgtatcaagcatcattcatacgttgtaaaagctcataattttgaacatacatctcactatttagtaaactatatttttcattttctaaaacttttatatttatattcgaattgatgctatagtctttttctgaaaatcctattgccgaaacaattaactgactaaattgatctgctgattccataatatactcgaccaatgcctgcttcttctcctggtctgtttccacattattgggactatcaaataccattggaaatgttgttccgtcaggattaaatttctgttttaaatcattgagtgttagataccatataacagttgataatggtttattgcttccacttgcacaaaaatttttagatagtcgctcatagctgtcactttccaactcatttaaattgaatcttatctttagtttgtcaatcaaataatagtaattttcatcaacagatttgattttatcgttaacacttttaaattccttctttagtggcttcaaatcctcctttgtactatctataattctgtaattaatcgccaaatcattattaatctcatcgattagtttatttaatcctctaaacttgatataatccttgatttcccttttgtttttacaaatctttttatcatgttcctccaaagccatagccaagtttgaatatacgccctcatttttcagtatttcgtcttcaatatgggcattttctgtttttattgcatctttcagactaagagcattgtcaatatgattatacctcttactccttaattccaaagttgaatctaaaacagaatgacattcaggacaaacttttgactttaaaatggtttttatttccttttcttcttttgtctcaaatttagatatttgagataaagtgatattctgttcaactaattgatttctcaagtcaacaagcttatttcttactgaattcatttcattaatcagcgatgaatattttttagtttctatattaagctcattttctaaggcgctacttgtttccggacatgaaaaaccatccaaaattgaattggttctgtctttcattttaattagttcttcaatttcttctttcttgcttttaatttcaagttccaattcttctttgtgtttcacaagttcgaaatattctttattgtaaatgcccaaatgtgagtaaataacattaagtttaaaattactgaactgagcaagacttttaaacgaattaaattttgtaccactgtattcatcttgatctaaaaaattcagcaaaaaactatatgcaggtggtgctattactaatttatttgtatttttttgcggtaaccatatagaaaaattaaataaattgtcaaaaaaatatgctaactcacttctgtgaatagtagtaaaaattagatcaccttttaaattaaatattttaaataatttttgagatctataaatcgaaaaatctttatcatccaccttaaaaaataatatataaaccttatctttttctccccacttcgagtcaaagtgagaatctgcacccaaggcatggtacaagctccttaataaaactgatttccctctatctgttccgtctataccacttgatgtaataatattaactccttttttaaattctgtcgaataagcctctttttttacaacatcaaatatatatattttgtcaaatataacattcattataagattcctcctgaagcatacatataataaatcattatgtattgaactgatttcatatcattagtaaattccacatcaaaatcgtcattaaataattttgatatttcttttaaataattttcaatatcatctaatgaatcctcatgttctgcaatataattatagatttttatttttattaatcttaaagactcactttgctgtatttcaagtatattaccaagcgctgtattatatcttcttcgcttagcaaatggcagattgtttatatactcctgtgtttcattgattccatttttagattcttttttatgtgcatttaacattttatcaaattcacttctcgtaatgcctttattttttacaacatctgcataagtacctaaatcaaattcataagaagctttttctttaacagaatcaacgaccagtctatataatgcattcggattttgaggttcttcgcctttaatatccacaaaagactttactaatttccctctaatagaatcctctggatttaataaatccatgttatcaaatatataaaatacattatctaagcacactgtgtttaattttaattctgcacacaacttttccctaacatcatcaagtacatcttgatctaaatctccaaaacattgctcaggaaaatcaatttccttatttttgattttaagttgtttattacacacaattgctaattttatattgtagtttggtgagtataaagcatataattttcctaaaatagagttgttctcattcttgcctttcttacataaattattcgaattataattaccactttttttcgtcttaatttggtaaaaatccaattcatcatctttatgtaattcaatatcacatttaaaatcaaaaattatcgtatattcattattcgctttatgctcatctattatcttactaattccccatagtaattctaatctaaagcgatttttagcgatacttccagataaatcttttggtaggttcatatagtacttttctttatccataattaacctcctttcaaaatctatttatcaattcttatacactctactatttcctcaatatcacaatccaaagcattgcaaattctaagcaaaacatctgtagttacattttgcccattcttcattttgtaaaatgtacttttactcacttttgccttttacatcaattcattatttattatattataccattaaatatcggtttaatataaaacgttctctttaaaagaacatttaaatttataaacagtagcatattaacccatattatctaataattaatattttcttgtctatgatttgctagacagtatccattaaattacatctcattaattctatttgaaataattatcactacttcaataaccttattagaggtcaaatcaccaatatacttattttcaagatataggtcatagaagtctctcattcatattgttttacttaaacaaatctgagtgtaagcctgttcttactaatgataatattaaaaactctcctattttttcatatattaataaaaaatcgggctctatatgacattctcgagtctctttgtagtttccagctaatgaatggtctctatatttttcatcaagagttccatcctttgctatttttttcaataacatcaaagagctttttaatatcttttccttgctttttagcctgctttaggtcttttttaaatctacttgtaaactttattttatacttcaagggctttcctcaagtcatccatattatcataggatttcacattcgtatctttagctatcattcttccttcttcaatcgcttttatagtttcaccatctggaatatcaagttttaaatcaaaaggaatgccactttctctaatacttgcccttaaaaacatgttaattgcagtggtcatatttaaacctaaactggagtagattttttctgctgcttcttttatttctttatctgttcttatattcaaatttgttgtagccatatcctcatctcctttgaccttattatatgtcaaagttcgtgctttgtcaatacattgtcatcattaaatgtttttacattttatataacatatgtaacgaatccttactcccttcaatcataaccaccagcgtagccggtggtttgctctgcccctgcaaggggcttttacctgctgtgcaccttgtgcacgctgaaagtctaccacttgcactactttctcaactgacgctaaagcgcctctttacttctttttacttatttgtcttttctccagtgaatggatctatatattctttaagacttatttgatcttttgtaaaatcttctttaagttgattgcgtatatactcttgtatctttttagcatttttcctgctgtatatacgtagtagcctctgcaccagaaatttctgttgccatatttatatttcaaactggcatgtctatcgaatatcattagactactttttccttttaaatatcccataatttctgaaacactatattttggtggtatttttactaacatatgaatgtggtctggacacagttctgcctctattatctctattccttttcttgacaaaaggtctcttaatatttttcctatatcttattttattcttccgtaaattatttgccttctatattttgatgcaaatacgatatggtatttacaatcccaagttgtatgtgataaaatattcttatccaattggattaactcctttctgatatttattgtagtttggtagactatttttattatatcatgaaaggagttttaacttgaagctaaagctactgattcccccagcatagctggggggggttattgtggtcaacccacaagaaaagcaggtggttttttctgtccacctgctctaaatacttctcgtgttctcgttctcgccagtagactttgtatatctcctcgctgactttaaccttttgcccgttgacataaaggtaatactcttttgccataaagtttcctccatttcttttttgtctatttgtttttcagacaaaaaaagaggactcctgcacttaagcataagaagtcctctaaaatggaaggaacttgttcttccttttaaatgtattaaattgtactgaatagtgtttggaaagctgagcaattatgaagcctattgaaaaaaagattatgcaaaatattctggcttccttctataataaatataaaaattttttaattttcaaccctccattccttacagctaaattatgaaatacaccatccttccgctgattcttttatgtttataaaatttttataaataccatcttgattaatcagctcaagatgattgcctttctgaactacatcaccattatcaataaccaatatctgatctgcatcttgaattgttgctaatctatgagcaataacaattactgtttttccttttgttagtgagcttattgcattttgaattaaatgctcattttctggatcaacacttgctgtagcttcatcaagtattattattggagaatcttttaagatagcccttgctattgaaattcgttgtttttctcctcccgacaaggtagccccgccatcgcctataatagtgtcatatccatttggtaattttgaaataaattcatggcaatgtgcttttatggctgcatttattacttcatcatcagaagcatttggattgccaaataaaatattattttttattgtgtcattaaataagtacactttttgaaataccattgaaatattcttcaaaagattatcacaggttatatctttgatatttttgtttccaattgttatggttccgctattcacatcataaaatcttgcaatcaaattacaaatcgttgttttcccacttccagaaggtcctataatagctgtagtactcccttctggaatatcaaaagatatattattcaatatttgttttttatcatacgaaaaacacacatcagaaaattctatgttatatttttttaattctatattctgtccatttttgtctataatatctgctttttctatcttttctaatttatccaatgttttattaacaacttctattacatgaattgcgttacttaatggctctatttggctaaacataacaaacgaaaacatatccatcataagcattatgtttaaatccattttctcaaggtatgtcaaatatgcactaattgctataattccaactgatgtagcctttaatgcaaattgatgtaaacaattgtatggacaattttcaaactcaattctaatatttacatctttatgattcttataagctctttgaattccttctattgatactccctcttgtttaaatgcttttatagtttgcattcctcttaaaaactcaattgtattttctactatactatcttgagccttttgatgaatcgcagcatttttatcactaattttagctgcaatatataaaaatagagcagatataatcacaccacttaatgcaataacccctgctaacgggcaatagattagtaaaaataatatcattacaaatactgtaatatatccattcacaacagtattaatcatgttcatagagaacatttctataaatgatagatctgtagttacagcagaagatatttcacccatattgttgctattaaaaaatccaagtgaaactcttttaaagatatttccaagacgaattctctgctcagctgttgcttcacaaccaacactttcttgagtactggctcttaaataagaaaataaaaaccttcctccgattacgagaatcatcaaaataaaaatgtaaactatttgagcattgtcaaatgttttaatgcctttataatcatcaataactaaacccaacccatatgtcgcaagcatgattggcatggaagtaaaaatactgttgataaaagcatagataaacccgacataaatcctttttttatactctcctgtccaattgataagtcgttttatcattccaaacattacaattcccccttcttctttgaattagccgaccagtttttcgctccgatatgagataaccacatgtcatgatacaatttgctattctgtaacaattcttcatgattaccaatattctcaatctccccattatttaaaaccactatcttgtcagcatttttgattgtggataatctatgggctattaccaataacaattttcctttagccaataacgacaaggattgttgtaacttattctcattttccggatcagtaaatgcagttgcttcatccagtattactattggagaatttttcaatatcattcttgcaatggaaattctctgtttttctccacctgataacttattccctgcattaccgacaatagtatcgtatccattttctaatttttttatgaactcatcgcaatgagccaattttgctgcattaaatacttctatatccgaagcatcaggatttccaaggcggatgttttctttaacagaacaattaaacaaataggtgtcctgagtaacaaaactaattaattcattcaattttgaaataggtatatctctaatatcaactccacctattaatatactaccttcatttgtatcccaaaatcttgctattaaccttgctatcgtgctcttgccactcccagaaggaccaactaaagcagtaaattcattttgtttaaaaatacagtttatatcggacaatactttattatccaagtttccactatatgcaaatgaaatatttttaagttcaattgtatgatcatttatctcaatatcattttttgaatcacttaaaaccggtatttcaagttgactacttacatcatgtaaagcatattctattgccttagcctcattgatatagtttgtgaaattcatcataggtcccacaacacctaatgataaaatcaaacacataaccaaattttggggagaaatctgcccattaacataaagaataagtcctattggtaatacacccaaaaaagtcgatggaagaacagagtttccaaaattcatgtatttccaaacacttttataccatgctaaagtcgaatttctaaatgttttaattgcatcaacaaatttactatatgaggttgctgattgattaaatgctttaatcacttcaatcccctcaacatattcaacaataacactatttacataattactcgtttccatatatttggcatactcagagttaaagttcttcatcattatcatataagaagtaccggcaatcggtactgtaatcagcattgctaacgccattctccaatcaataaatgttaaatatgcaaatacacttattgaaagagtaatattagatatacattccggtattacatgtgctaaaggaagttcgattgtttctactctgtcaactattacacttttaagctttccaacagattctcccattacatagccaagcggtgctttaacaaatgtccttgccaaactaagcctgatattttccaatatgttatatgcagacaagtgtgataatgtagttgaaattccatggaataagtatctgacagcatatcctgaaaccgccgccaaacaataatatgcaacctgacttaaagaaatacccccattaacaaataattcaattattttatatgcacaccaatatggtacaattcccgcaaaaacaccaataatagcacaaattactgataataaaattttccatttgcattgaactgcaaatgaaagagctatttttatccaacttttcttcttcattacaactacccctcctaaaaaaataaaatagaaccatgattttgttcatagttctattttatagatttctaatatatttcgctcccctgaatagctatatattactctgtttggatatttatttttctatattccatcgggcttttgccatagttctttttaaaagcctctgagaacttactcatattagtatagccaactttccctgctattgctgttacactttcatctgtttttaacaataagctggctgctacattcatcttgtaactacttaaatatgagtatatcgcctccccatatacacctttaaagcactttttcaaagctgataatgataggtcatacatttttgctaattctgtcattgtatagtggttatctaagttgtctgtaatcaaactttttatctctttaattttttccacttgtgatttgtagaaatactgttgtgttttgtttacctgagttagatcaatagattttaacaaaataaacagctctattatttttatctgtaaatattccttctttaatttgtccggaagcatatataactctccaaaaatatgatttatcattgcctccttgtgtaatacaaatggagtattgtctgatgaaaatagattcttaatctccatagtattaatattaaaataacctaaaagttcattcaatcttccctctacattctctgacaaggaaatattaatagttattccatggaaatatgataatgggagactacaggtactatattctgaatctaatttttcaattagaacatctcccggttctaaatataaataatctccatttatagtttctgattcaattcttccttccttacagtgatgtatgctaagacaattattttctgattttatgcgttttgagtttgtggtggcatgaaaattattatacatcaccgaaattcccggaaaaacctgataacagattattgtaccatttcctctatcttgttgcatttcatacactgcacaaactctatcttcacaaattttattcataccttgctttaacatgaattgatttatttcaaacaaacatatcacctcagttcaaaaaatattcttttagtttaacaaatcccttattgtctaaaagatactgttcttttatttgtcctttatctatttgaattacatagttacaacaggtagctataaattcatagtcatgagtaattattataacggttttctttttatccgctaacttcttaatttcattagcgacctgtatcatatgacttaaatctaaaccgctcgtaggctcatcaaaaatcaaaatatcacgatttgatgtcaaagcgcttgcaattgcaactctctgtttttgaccgcctgataaagacatcggatgtctttctcttaattccagtaaattaagttcttccattatacttattatatcattctttatagttttatctgcccctaataacagttcatcttctacgctttctgtaaatagctgatgatttgtgtcttgcatcaccatatagcaattacgcaatctgtcctttttctttaatattttatcattatatttaattttacttctatctttattttccaagccacatatacagcgtgcaaatgtagatttccctgcaccattgtctccaataattgccacaacattatttaatggaaattgtaaattttctatatcaagtatcattttgtttttcttataagcaaatctcaaatttgatagaataaaattttcacttccagtcaattttcttacctctatcggatacttacttaaagtaaacggtcttattttagatttatgttgctcataaaacttgctttcatcatcatagcaatcaactattctacctgattccatataaaatatgtgatccagtaaaccttgtagataatataatctatgctctgcaataataatagtttttccttgttttttccataactctattatattccttaaatctttagtagactgtttgtcaagatttgaggacggctcgtccaaaattataatatcaggatctgtaacagaaactgaagcacaagcaattttttgtttttctcctcccgataaggaaaagatgttttcccctaacaaattatctatattaaaaagtctgaccgttttctttatcttagaaataatttcagtctcagaaactcccttgttctcacttgcaaaagctaattcacttgtcgtatctacagtgaaaaattgtgttttaggattttgaaaaacacttccgctaatattagatatatcttccaaactgtatttatccgaattaacaccattaatgtatatttcccctactatatttccttcataatagttgggtattaatccattgataagccttactacagtagattttccacagcctgaatctccacaaaataataccgtttctccttttttgataaaaaaactaatttctgatatactgtctttcttctcacttacattaccgtaactaaagcttacatttctaaattcgatcatctattatcaccaccctcattatagaaagataaatcctaagaaaagcaatgatgaatatattattaataacacatctaaaagtttaaatccaattttacatatattggttctctttcctgatgaatctaatcctctaattaatgctgaagctgataattcttctcctatttttgtaatcgaaatcataagtggcactaacctgtattccagcaatttaacaggatcgccacataaattaatgcctcgcattctcattgcatcttttatatatgagtattcttcttttattgtaggaaaaaatctgaatacaacagaaagtgggataataatcttatcagacaaatgtattctctccattgctgctataaactcacttactgttgttgtactgataaaataataccccataatgaatcccggtagaattcttatatatatgcctattaatgctcccaaaataaaaaagcctaatcctgacaatatcggtaatatttttagttccaatatgaaaaggatactatatgttaataaaagtttgcaaactatatcccactttttatcaatgcttaacaacaataaaggtaagataagcgttgcaaagcgtatataatacattattcctactgaactaccggctgtcattattgtggtaactattatcattaaaaaaattttggttcttggatcaagatatatagattttttgctttcaaatatataatctatctccattttcattatactattcctgcttttttaaaatgtttgtttaaaacagctctgcctaatattccacctaaaattccaccaacaaaacaagaaagtacaaaaaccggaagagtccaatttggagtaagttcagctaaagtttttgcatactccgctccatatccttctgatacagttttcaaaaactcacttctcataaaatatattcttgcaaaaaatccactgcttaataatgaaaaaaaagaatatcctaatataataaattttatatctttatacttacctgctctcataacaacatcagcaagtattccacagataacacaacaaaccaaaactaaaattccactacccataaccataaataatattcctatgattattcctgttaaactaaccattccaaatttgtttattttagtaacataaagcataaacggtattccacatacaattggtgtaaggattcccaacaaaatcgtaaaaacaggaatgtatcccaacatcatagttgcaaaatataaaacaaaataaattgcagtaaaaattcctacatttattaaatctttagcgtttaatttgttgttttgagattcttgattcataataatacctccataaaatttacaaataattaagttagatattgctaacttataattgttctcattatacaggaatattctttgtgtctctactctaaatagttatattatactccaaatggttttgttttgttcataaaatcatatcaatatctgtttttatatgttataataaaatccagatatgcttaaagctttctacaaatcattcttttatagcttttatagcaagcacagtaagtgtacggacacttacaaaaaaattgatgaagcagccctattgggatctgcttctttttttatcaatttttaccttgtaccctcgcctaatagtttcatcaattcgagcaaactctcattggaaactattggctgggcaaacttttagggagaaccctaagaccccaaaatatattttataaaggagaataaaatgacaaatagatttagaaatgaaagaatagaaattaagctaactaaagaagaaaaagaagtttttgaaaagaaaattaaacttgcaaatcgcaaaactatgtcccactttcttagaaagtgtgtattagaaaaagaaatttatgttgtagatttagaaccatttagaaacctacaatggtgctttcaaatgtaacaaataacataaaccagattgcaaaagctactaatacaactggtgttatttacaagaatgaaattgaatcaatgaatagacagatagaaaaattatcaaaagaaatataacagatccattccctacttcttaataaatcaaaaggtagttctggtgactaatatggcaattacaaaaatacctcatatcagtagggatgatacacaaattctttacactatcaatttgacaatacttccataaaagaagatacaagaccttttagtcttatgtatcttctcttaaatttgttatactataattcactcgctgattttataataatctcttctgatatcactttaagtaatggtatttcctttaataaggctttagaatctttaaaaggtttataaattcctctttcattcaatctaacttcattagacttgctgtgaacaagtgaatttctagttttatatattctattagccaacttcttaaatatttgttttttgtctcctattaaatctattgcatctccatttgaaaaattaaccgtattatttttatagtattctataatgtcttcattaatttcattcaatttttctgttatcttttcaatatctatatactttcttaatgttaattctagtgcttccaattcacttcctaccgtactttcagttctttttttgttaattaaatctacaagtttcattatatctttttttctttttgtagaaaatcccggatctagcaatatttctttaacattattaacaacaccttctttatagatttcttcataaaaatattccataatatgataaaatcctataaattgtacaaaaggatcttctgaagatactgccatatggtactgttctgttaagtcttgtttatataataatcttggtgcatctaactcttcacttttgtaagagctatttttattcctatacctaatatttaataattcatctaagctattcataatcctgaaggaatatccatagttatagcaaaagttaaataaaaatgaattaatataatcattaagtttatttttatcaatatctttattatatgaaacaattaatgaataaggatttctaaaacaaactcttaataaattaaaaaaattttcaccttcatcttctggcaatctaggaggaaaaatcataaaatttctttttaaactttccaagtctatttctttaataatattccataccattacatctgatatttcttgaaatttatattcaatattattcatggaatctttaatattagtaaatattattcgttcctcaaatttatacggcaatagtcttcgaaccattttatttgtttgataaataataacttcatagctattattatttgatactgtaaattgtgacaaatccgatttcattgcatcattgctaatattattatagtcagatttactaaattcaaaacttttttcacctacaatataactaatactatcttcgctataatctatattaaatcttctcaatataaattttactttatcaataaattcatcccattccatatttactcttctcctttaaaatttgtatatttttataatgttgaatttttattgctttttcctccttgatattagtatcatcttactttatataagttgaaaccacttcttttatctagtttttagtcacttataaatttttttctttgagggctttccttttgcaatatatgatagctccattttcaaactctttggttttttctgctaatttaatgcatctactacaaacgttataatgctaattcttttatgtgtgtcaataagattttgttcatcttcttcaataaaaccttttaaaattaaatcttcgataatacctccatatattttctaatttcatcttctattttaaatagtctactgtattttatgaatcttcttaggtttttatttggtgatttaaagtatttttttatggcttctgtgaaaatttgcttatctattttttctctgtcgattatgatgtcacaaattgttcgatctatatcataaactggaataaggttgccttgtggtgattttatttctgtctttcctagttcgtataaatcttttttacatagtgaacttgtagatcttcatatcttttcttgatatgacttgcattgtaaccttgggggtacagatatatgaaatacatttggagttctgtcggataggtcgtggaggtagatggatgtttgatgggaaaatataattcgattactatttgatgatattaaaacaaaatcgtctattactttcccttttagttgatatagtcctggtctcaatctttctaattgtccactttttgttaatactgataaattatgcctagtatatccaagttcttctgcttctttgttggttatcactaaattttcttgtatatattctttaagtgtattcatagtccgcctcctctcatttatgcttttattatatattataaaagcgaatatgtaaagttgcttatgagttttccattttttgaaaaaggatgtgacgaaacattacttcctttaataaaaaaaaagagcagccttttaagccactcttgtagaaagtataaaatgagtttatcttattaaatttttctttgtgtctcctcataccagttgcaaaaatactcttacattcatgtagtttttttgagtctttttgacgtatccttcttcctctttatcaaatacaaaatgcttataaaactgcttaaaatgcaggacttctaaatttacatcttttgtatcaatgctaccgtctccacatgaagcgagtgaacactaagtatgtcaagtagctacgatcgtatgtaggaacatatccatgaactatttaacgatagcataaggttatcgttaaatagtatcagactataatgtcccatacatagaatactttttgagacatgttttaatgaatctgagtctgtttgtgaaaatatatcttaagaactattcaagtaaattattttatactattaaatttatcttcttgtttacagtacctttctattcttctatcatatgtgtctttgttgaaattttgccgtgtaatatacaatttatatcttttaaaaattttctcttttaaaaaaatttcttctattgcacaacatgggctaatttcataattattgttatttctaagaaaatcaataaatgtatttgcttttttatttctaaacaattctggagataacatccctattcggaaatattccttatttttattatcaaaataatgtaccacgggctgattggcagttataaaattgtataactttgtatcatttaaaatatatattccctctctttcaacaaaagagtaagaaatatttgttaataaaatcgggactacatttacattatctatattgcaattaatagccttaagtcttgaattaatgcttttctttccattttcatccttggtaaaatattttaaattgcgtttaaatttatcaatgtaataatctaactcctgaatattacgacaatatcctctcacattatcatgctgaaattgagttttgcactcaataacaaacagtgtatcatctatatatagtaaaatatctaattcataactctcgccattactacttgttttaacattcttaattgcactaagattgtatctcaataataaattatgtatgttttcttcatattttgaaccctttttcgatatttcattattattagtaaaaagaaccattacactttttagtggttcaatcatttttattaatgacggaagtaaaagtataaaattgttgtattcaattaaaaatgatgagaataaatcatttttgctttgaccaaataccagatgcttaaaaataacctttatttcagcttcactaaatttattttgaagtaaatcattttttaatttttctatttctatttttagtacgtttttctcattaatagctagtttatagaaataagtgtagatggaaacccatctttccagttttatgtctaggtattcttcagttaagtcttcgctataaaagaattcttttaatttttctctaaaggaattcgaatatttaattatctcattttcattatcaaaatctttcaaatttttagcattatttaaattatagtactctaaaaatgaaaatattctatccgtaattattccatgattttctctaatatataatttattaaataatccagtatttacttccacatctccgaacatccaattaacaattatatcatttactaaattgagtaactgaattaaaactaggatatcatttgaatttttatcatcagtattttgaaaacacgtcgacttgttatttttaaatccatctctaagcaatgttcctaatcctaaaatgatattttcgctagaaactaaatattgttcttgctcatactcagatgaagcttcacttaatttatctaaattcatagatatttgatcattaaacctttccaccaagtctaaatatgaacacttcatcagctcaattttaaatatatcttctttaatttgatttctttttttatttagtttattaccctctttagataatcgtctaaatttcttataactattatctgaaaggttatctttaacccaattttttattagacttttagtatcgttactaaataatttttcgtttctatctgtaacaaaataaccagaatattttaaaacttttaatacttcttcctcatttttatttttattaatatgatccaaatagtctaaagcattattctttatatttctttcaattgaatttattctcacatcattgtatttcttactcatatgaatactccgtattattttgccaacgtttatcaatttctatttcttaagtattttaaaagcataattattgtttttacaatatataaatttttacatctatcccatcaactgcacctgtccgctgtgattttgtaaactcaaccatactacaatttcttgatgtatgacttctaataaaacaataacaagaagaatactgaaatcaaactcatctacttaaactctccgatgtcttagatttcgagatttttctagcctttagactctgcacttttgacatcaataccacgcactccccggttcgctgtctccaatcgccatgtcgctttgctcctagctcttggacagcgtcgcgcgggagtgtcatctactcacgataacttttagtcttgttattgagagcacatctatacttgcagtagcacgcagccaatcaaacttcaccttgctcattttcttgggcgtgccttgcataggacgcacatctgcttctactacactacttagcaactcgtacaagcagtgctaccgtctccacgtgtattaagactactctgatgataacggtacttcaagaatagcagcttcgccctacttgtgcgagggaaaccggcaccagaaatgatgtcggagaatgtatgtcaacgtcttcggaagttcattgaaagccctaaaaagtgggagttgaaggattagcttctccgtttaatggtttacagcaagacgtatttccttttctgttgattctgttaaccacttgccaaaaacctcagattcttttgattcgatataccccaaatccctatatccaagtttttgaaggagtagcctgctcggataattctctatttcagtgaagcagataaaacccattaaagggtataggcaatgcaaataatccgtcaaagcggaaagcgattcaaaagcataccccattctgtgatgcttgtaggaaatcgtgtaacccaaagaaaatgtccctttattaggaagcacaacaatctcaccgatcatttcgtccgtcgcttttaacgcaacagtcataataaacggtttatctgcggatagtgtctcgaattgatattttttaatcagagctttaatcccatccatatcttttgtttgtccacgttgatattttgaacaaattgcattatttcgatagtctttcatctctaccgcatctttcaattcgacgttgcgaagtataagcctctctgttttcaaaataatcataataacctcctttgatataagtatgacaaaaatataaaaatttattcagtacacccaattcaagtttactgttttctcttccctgtaccaaattaggacgattgtccgaaaaccgctgtcatcccaggctttcacggctattttctttcgacccttgacattaataccacgctctcaacatggcttgtctttggaaagttatcgaaaatttctactaattttatcttgtagcctgcctctgtaaatttttttaggtcactcacctgtgtcttggggttgcatgagacgtaaattatcttctctgccttgtaatcaatcagcttctttaaagctttgggatgcactccctcacgtggcgggtctatgactatagcgtctggtctttcttctacttcgtctatgacttttagcacgtcgccattgataacttctacgttgtctatgccgttatctttgcatgtaagacgcgccttctctgaagcttcttcgactatctctatagagtagactttcttcgccttctttgcaagtatctgggcaatggttcctgtgccggagtataggtcaaagagcacgtccatgtcttctttctctaagagctcttgcacgcgtttatacatcctctgtgctgctctcgagttggtttggaagaaggagaagggtcctatcttgaactttagtccaagaagtttttcgtctatatcttctttgccataaacaagaattaattcatctgcctgaacgacatctgagaggctatcgttctttgtgtggtaaatggactttatctcgccatcaatgtctagctcaagtagcatttttataaaatcgtcttgggcgatatagtcggatgtcgttactagattgataagtatctccttagtaaagtatgcctttctgattacaaggtgccttagcactccctcgtgaagcttcttgtggtagtaagtgatgcccttcgacttaaagtagtcaagagttgcaatccttatcttagtaaagtcatcatgcactatattgcaatcgtctgtcggggcgacttcataaaagcgcttcttcttatgtagtccaaggcttaaagtcctttcttcgtcaccacaatcagagaaggtgtactccatcttgtttctgtagccttctacttctaaggatggatggaaaactacttcgccagtataaacttccctgtacagctttgcgagcatatccttctttatgcgcgtctcgtcctcatacttaagcgtttgatataggcagccgccgcactcttcgtgcgcagtgcatggagcccccttctcaagtggacttgcttcaagtctttcgagaacgtcacaaaggtaggcgccgtttttctttctcttcgttcttaggcgaagcttgcgtccttgtatttcattttttaccatatattttttatcttcataaaaagcaaaagcaaggtttggatactcttgctcttgtatgattaaatctaattcttctcttttatttctcaagtttactcaccataaaatctataagtttctttgctggatcatctttatagttttgctccaggcttcttagtatattgcccctaacgaagtcattgttcataaaggtattaagtgcttcaacctcgcgatacgtttttgatgaagcaagtataagctgatgatttgataagaactctacatttctcgcttcttgaccttgtattggatcaacaactatcatcggtagacctttagcaatgcactcgctcgttgtaagtcctcctggttttgttacgatgatgtctgctgcgctgtagtactcttcgatgtttgatacaaagcccactatctttatagagtgccttagattcatcctctctatcctcttaagaagggtctttctcttgcctaagaagactacaacctgaaagtcgtttggcaggatgtcgattctttgcaaagctttgtcgactcttacatggctcatagatccactcataagtagaactgtgtccttgttctcatctagcccaagctttctgcgcatctctttcttgtcgagatgctcgaagaatttcttgtgtataggtatgccgaagtgaagcgcctttgttgtgtcaatctcttttctgtgcatctgtatgtcaaggtcctcatgtggcaatactaagtagtcaatgccgatactgtcttcccagaatggatgcacagtgaagtcagtaatgatgccaactgttaagccgtcgtagaagccgtcaagtactaagtcgcttagaatatttgccgcaaaaacgtgtgttgcgatgatggcgtcaggcttgaactcgtctatggacttctttatctctcccgttaatgttttttgagcaagcttacgtatctgtgcagggtttgtctcttgtaccttcttatctgcagagtcgtatgcagctccgtaaatagtcgggaagtaatttatgctcatgttgtagaagctgttggcaacgtctttaagccaagtgctgttgatttggcaaatgtctatgaccttgctttcaaagccgcggctttcaagctcgttggataagctccttgctactgagttgtgtccttcacctgcagtagctgttaatataatagttttcaaatctctctcctatctatatacctaacatcacctttgcaactgcaaagtaaacaattaatgatgttgcgtcaactatagtcgtgattagtggggacgccatgatggctgggtcaagtttgatcttctttgccccgattggtagtagtccaccaactagtttagcaagcataactgtaaacataactgatatggaaacagttataccgatccttgggtcttggtttggatgcaaaatttttatacgtacaaagtttactgctgcaagaacgataccaactaagatggatacttggaactctttccaaagtactttaatcgcatcttttggttctatctcaccaactgcaagaccacgtataacaagtgtcgcactttggctacctgcgttaccgcctgtatccatcagcattggtatgaagataagtagtgcaggtattgctgctatataatcttcgaagcgttgcaagattgagcctgtaagtgttgcagatatcattaagaacagtagccacgctatcctgtgcttagcaagtgtaaaggctgatgtgtctaggtactcatcttcagatggacttaaggcagccatcttttggaagtcttctgttgcttcttgttcgataatatcgataacgtcgtcaacagtgatgatgccgaccattctttcttcgttgtcaacaactggtacggcaacgaagtcatacttttgtattactcctgcaacgacttcttggtcttcgtaaacattgacataaacaacatctgtcttcatgatgtcaccaataaccttgtcgtcgtcagctataaccaattctcttaatgaaacaatgccttctagctttctattgtcatcaactacatatatagtatatatagtttctctttgtagaccaacttttttaagtctagccatagcctctttaactgtcagtgtcttcttaaccgagcagtactctatggtcattatgctaccagcagagtcctcagggtagtttaggaactgattaattaattttctctcactaggtgttgacttctcaagtattctgtcaacaatgtttgctggcatctcttcaagcatgtcgattttatcgtcgaagaagatttcctttaagatgtactcaacatctgcatctgtacttgtcgctatgatgtcttgttgctgctccgagtcgaagtatgtaaatacatctactgctttgtctttaggaaggagtctgaagataactgttgcatcagttacctccaactcgtccaaaatttcagctacatcggcggcattcatattcgatagcttttgaatcagagccttgggctttttgcctttgtataattctaatatttcatttttgtcttgttcgagctctaactctcttctgtcgttttccataatgaatgcctcctttttataatattcttatatattaattgtagatttgctcagctgagaagccgtttcctaatctaatgtagaatcttagtagttcttctagtgcatatgctggaactggtcctactagttctgatgacttaactgtaacaccgtagctttctgcttcgctcttgatagtttcgaatactctgtgtataggtgtcatttcatagttaactaagttcatagatacttgtgtgcacttttgatcttcgataggtagtgctatagctcttactgctgtgtatccgccagtctttgctctaacagatctcataacagctttagcgatatccatatcttcagtgtttagatatacgttgaatgcgattagtgggaatcttgttccagtaactgttgcaccgctcttagggttgaactttctttcgccttcgtctggtgtccagttttcagcgtctttaagtctttcttcaaggctttcatactcgccctttcttagcttaactagtgactttctgtcttctctagtagctgagtcttcgtagtagaatactggtacgccctttgagccaacatacttaccaaacttgtgaacaacttcgttcatctcatcagttgtcatgtccttaacaggtacccaagctgcaacgtctacagcgccttgacgagggtgtgatccgtgttgagtagtcatatcaactctgtcaaatgcaacgtcaactaatctctttgctgcttctagtgtgtcatcaacactgcctttgaaagtgaatacacttctgttgtggtcgccatcgtagttaaggtcaaccatagtaaccttattgtcctttaaaacggcctctttaattgcttcgatagtgtccatgtttctgccttcagaaacattgatttctgccataattgttttcataatttacctcctatatatcagactagcatatactttagtctcgtcttctgagtagaatctacaagctaactcgtcatccttttcttcgtaagctagcttaacatcctctccgaagagacactgctttacatactttagtcttatgttctttatatctctatctataagcttaataatctcatctatatatactgcgttgttgacatggtggtacgagtctatatgctcacttttaatcacaaagtccctttcatgctcatatccaagatactccttagtctcaaggtcttgatctgtgaagagcttttgaaagtcatcatctaagccagatgctctgactggtctcatactttccttgtcaacataaactatctcgcatgtcgccttgattatgtttttgccagcggcctcaattagaaactgtctatatgagaagaagcggttgacacctgatggcgttgtatgaactgtgatagtatcaaagtccatagtataaaactcatcagcgatatctatgcaccacttgtatatcatccaagcgactttatcgtctttgatactgtgtgagtagagctgcttaaatgccgcgtccaccatcgactcaactgctttctttatgcttttttctttaaatttataatcttttgtatatacttccatagttttccttatgtaaagccctcaaaaaagggctcttaatttcttagttatttaaagcttccatcaagcgtgttaggtctaaaccgtgtacttggcaagcttcttcgattgattccatttggcttgatgggcaacctacgcagcccataccatgttccataaggatgtatgcagcctctggttttactcttaatagttcacctattaacatgtcttttgttatttccataatatcacctctctttatttatacccaaatgtatttatttaccttctaatttgtctgctacttcgtctgctatttgacgcaatacattgtaatcttcagctgttgggcagctctttgtttcaactgtagtctcaactatgtccatagctgatgcgtctctaaactctttaagtgactttaatgcaccgcctgaccagctatatgaaccgaagacagcaagtactctgttttgaagcttgttcatcttaagtacgttgactaaatcgttcattagtgggaataggtcgttgttgtatgtgcatgagccaagaataagtgccttgtactcccaaatttcgtttaggatgtaggacttatgtgtctttgatacgtcaaacatcttaatgttcttaacgcctctttcagcaagtcttcttgctagagcctcagccatcatctcagtgttgccgtacattgttccataaacaatgacagctccgtctgtagtctcttgtctagaccacttgtcgtagcaatcgacaatcttttctgggttctctctccaaactggaccatgaacaggacaaaccatgttgatcttaagtccttctagcttcttaagtgctgcttgcacttgctttgagaacttaccaactatgttggagtagtaacgtcttgtctctgatctatatagatcccagttcatttcgtcgtcgaagatagttccatcaagtgcaccgaagccgccgaatgcgtcttgtgagaataatatgcccgacttttcttcatagctaaccatggattctggccagtgcaccatcggtgtcttaacaaatttaagtgatacttcgcccaagtcaagagtatcaaaatcatcaacaagcactagattgtctttgacatggtagaagttttcaagaagttcaaaagttttcttgttaccaacaagcttaacgtttggataaagatcgattatagtctcgatggcaccagagtggtctggctccatgtgatgaataactaagtagtcaagatctctaccttcaagcacttcttttaatttaacaagaaagtcgtctacttttgtaatttttactgtgtcaagtaaagcagtctttgttgatttgattacatatgagttatatgatacacctctttcaagtggccattgattttcaaacaattgagtttgtctgtcgttaactccgatgtaatacaaaaaatcatttatctttactgataacgtgttcataatatcaccccaaatcattatataataaaggaagaattttttcaagcactttatataggcaatgacctttattataagagctcttgaaatatagcctccttcgttatataataagagaaagattatatgttaggagttaaactatgttacttaaagatatattaagaggtgtctatgactacagtggcactgagtccatagatgatattgtatacaatagtaaaaatgcaaaaaagggtaccctctttgtagcacttaagggtgcacttagtgatggtcacaaatacattaagaacgcatacgagtgtggcgcacgtgcctttgtagtagaagacgataccatggcgcgtgactttcaagatgctacctttataaaacttgatgatacaagaagtgctcttgccataatgtcgagaaacttttttaataagcctgatgaagacataaagatgatagcgataacaggcaccaagggtaagaccacaacagccaacatcatatacgcctctcttaagaagatgggcgcaaggcctggtattataggcactaacggtgtcttctacgctgataaagaagaggaagtaaataacacaacacctgagagttacgaggtatataggatacttaataatatgcgtaaggcgaaggtgactcactgcgttttggaagcctcgtccatcggtctaaagatgaagaggctactgggcatcacttttgatataggtctgttcacaaacatctcgcacgaccacataggcggcatagagcacccagactttgatgattatttcaagagcaagatgctactaaaggacgtttcaaaaaaatttatatataataaggacgatgctaagctaagagaagcaataaaggacggactcagcttctctatagaggaaaaaagtgactacaaagctgaaaatattgtagtctctgacgatatatttaaaatacaaagtgactttgatctatgcggcaagtcttttgaggtgaagagtatctcctactacgacatatataactaccttgctgccatagctgtcttgaaagagcttggatatagctttagcgaaatcgtaagtgccgttaagaatatatccatacgcggccgctttgaagaggtcaacgtagcgggtaggctctacatcattgactacgcgcacaactacatctccttaaaatcaatactagagactgtgagaaagtataagaagcataaaataataactgtctttggctctgtaggcggaagaagcgaaaaaagacgtgaggagctagccgaggtaagcgacgcactctctgatataagcatagtaacatctgacaatccaaacttcgaagacccaacgaagatatgtaaggagattgcttccttcatcaatggcactcactacactgagccggatagagctaaagcgattgagctaagctacgagctttctgagataggcgatatcatagtcgttgctggcaagggtcacgagacttatcagctaattaagggcgagaaggtccactattctgacaaggagtcgatattgaacttgaaggaggcgcatgatgcataaattaaaacgaagcctaataattttaataatagtactaatgctatgtacaaatttaagctttgcaaaggacttagaagtaaagaatacaaggtcatatatactatacaacgcagagaatgactccataatatcgagctcatcaaacattaacgaagtcgtacccatagcctcggtatcaaaactaatgactttctatatagcactaaataaattaaagagcggcgaaattcatgaaaatgacgagattgagataaaaaatgaggactgctaccctactggtaacagactcggtgtgaaacctggcgaaaaatacactcttcatagaatgcttgagattatgatgacgaactcgtgtaacgatatcacggctgccatcgcaaggcacatagcaggaagtgaagaggctttcgtgactatgatgaacgaaaaggcgaaggagcttggctacaagggtgcagcattctataatgcacatggacttcctcgcctacctgactttaatcaaaactcgatgtctgcaaaggacgtacttgatctaacaaagaggatagttaaggagcacccaaactatattgactacaccattacagtggcgattgactaccctgagaagagctaccacgatgacaatactaacccgctttttggtcgtgaaggcgttactggtatgaagactggcacaacgcgcgatgcaggcttttgcttcgtagcgactttccacactagtggtgacgatgtgaagacaaagaacaatgagtttatcttcgtaatgcttggtgccaagactaaggcactgcgtgaagaaaattccgctgcggcttacgagtacgctctagaaaattattcaaaaaagatacttctttcgaagaagctgggcaagattgcaaagtatggccttgatgattacaaggaagaagtacttgaaatagagccaaaggatgagtatacagtctctatcaaaaacgatgtgaagaccgagactaagtttataatgaacgataaactagattatagtcatgtaaaaaaagatgataaagttggcgaatacaaagtttacatcgatagtgaagaagtttttaagacagatgccatcgctatgaacaatctaacaaagaagaccatctttgataagatatatgagttctttatgaatgtatggagctttgataaagtaagtacagctgaataatataagtgtagagataaattaaggtagctagcaattgccagctacctttttcgtgtcaaaactattttttatcttttaatttttcattcattagcttttctacccttttataatgcaaatagtttaaataccataatataaccgcaattgcaactggcactataagcatttgaagtatatcagctactccgtagccgtcttgtataaagccaaaatttagaaaaactactatcataataccaatacctgtaatcaagtaaataattgactgaagtggcaagcttattgaatcaatgttaaatataaacgaaggaagtccatatccaagacctattaacaatgctccaatcatcgccttggtaaagccatatgatccaagatcaagaactccgcctgagacttgctctttacctataaggccaaagactgtaaaaaataacgatatcgctatcgcatataacgtagacttaaataaatttttaaacttcatggtaacacctcatattcctaaataatttttcaaaagagctatatagtttcttgttacataatctttcagtgagttttcaagaaagactgttaaattgccactaaaaccagcctcaacacgctttaacttgtctgcattgattataacctgctttgaaatgcgtataaaattcttgggaagtctctcttcgaagcttttcaagctgtccttagataagtatctatcactttcaagatatatcgctagcccctcagcctccactcttaatagataaatctcctctgcctttattatgatttttacatcatctttctttactatgatgggcctactaacactatcaagcatagctactaatctgttgatttcttctgttactttgtctgtacgtattaatatctcaggctctctatatgcacttgatacttcaatattaactttcatactatatccccctttcttgtcttaattatactatgagttcttagatatgtaagtatcttcttaataagatgcatttaatcacttctaagaagcataagaaaagccccgaagtgattcagggctttatctataaattatttattgtcaaagtgttgtgttacctttgcatcttttaagtctatcatgccgttgtcatataggtggcatgcgcagaagtgctcaggtgttaactccttaagctcaggttcaattttgtggcagatgtccattgcatatctacatctgttaacaaacttacatcctggtggagtgttgattggtgaaggtacttctccttcaagcttgattctgttcttagcagatcctgcatgtggatctggtactggtatagcactcatcaaagcttgtgtatatggatgaagtgatgcttcataaatttgtgaactttctgcaagttcaacgattgaaccaaggtacattactgcgattctgtcagaaatgtgcttaaccatggacaagtcgtgagagatgaacatgtatgttaagccaagttcgtcttgaagcttgtttagtaggttaacgatttgcgcttgtatagatacgtcaagagctgagataggttcgtcgcagacaatgaatgatggctctacagcaagtgatcttgctataccaactctttgtctttgtccacctgataactcgtgtggatatctaagagcatgttccttgttaagacctaccttatcaagtaactcatttatctttgcttgtctttcttctttactatagtggaagtgaacatccataccttcagcaatgatgtcaccaacagtaattcttgggtcaagtgatgcatatgggtcttggaagatgtattgagcattcttcttaaagtcaatagcttccttacctctaagtgagtgtatgtccttaccattaaataaagcttcgcctttagtagctctgtacataccaagaactgttctaccgcaagttgtcttaccgcaaccagattcacctacaacgccgaatgtctcgcctttgtagatatcaaagctaacattatcaacagctttaagagttttacccttaccaacattgaagtgtttacttaagtttttaacttctataagtttttcagtaaatttagccattaatatgctcctcctctcattgcatcccagtcaatatctccagctaattcgtgttctagccagcaccagttgtggtgtgttggagaaagttcagtctttggagggtgtacctttctacagatttccattgctcttgagcatcttgctgcaaatgggcaacctggtagtggtaacaataagtctggtggtgttccacctagagctcttagttcaacgtttttagcgtgaacctttggtatagagttaagtagtgcccatgtgtatgggtgtcttgcattgtagaagatttcatcagttgtaccttcttcaattatgtcaccagcatacattacttgtattctttcagcgaagttggcaacaacaccaaggtcgtgagttacaagtatgatagcagtatttaatctagtcttaaggtcttgaagtaagtcaagtatttgtgcttgaatagttacgtcaagagctgttgttggttcgtcagctaacaataactttggattacaagaaagtgcaatcgcaatcataactctttgtctcataccgcctgataactcgtgtggatatgatttaagtctgttctttgcttctggtatttgaacaagttcaagtaagtcagtagcaaccttgtcagcttctgtgccatttaagtgtctgtgtattcttaatgcctctttgatttggtcacctatacgcatagttgggttcaaagaagtcattgggtcttggaatatcatagatatgtcgttacctctaaggtcagttaactctctagagttcatagctaggacattcttaccgttaaacattatttgtgattctttttttatttcactacttcccttaggtagtagtctcattagtgattttgctgtaacgctctttccgcatccactttcacctacgaaagccaatgtttcacctggataaaggtggaagtctaaacctctaacagcctttacttctccagcgtaagtatggaaagaaacgttaagatttttaacatctaatagtttttctctattttccatcattagcctcctactttcttagttttggatcaagtgcgtctctaagtccgtcgccaagtagtgtgaagcataacatagttatagctatcattagcgatgggaagaacatttgatgtggtaaatacatgaaggtagttgttgcttcagagcacataataccccatgaagttgcaggtggtttcaaacctatacctaagtatgataggaaggcttctgagaatataaaacctggcacgtcaaatgtaatacctactataagtataggcatagcatttggtatcaagtgcttagtaattatcttccagttgctaacacccaaagtcttagctgcaagaacgaactcttgagcctttattcttagtacttcggcacgaactatacgagcagtacctgtccaacctgttatagttagtgcaagtagtagtgttgagaggcttcttgagttaagtctgatttgtagtatgataactacaagtagataaggtagtgatgcaagaatttctagaattctcatcattacaatatccacagctccaccaaggtagcctgaaacagcgccatatagtagaccaactactgttgaaatcaaagcaccagaaagtcctatgaataaagaagttcttcctgcatagaaaactctagtgaatatatcacggccggaaccatcggtaccgaaccagtattgtgcatttggtaatatgtcttttgtttttgatgatatctttgtaggactgtaaccattaaagtatggtccgaataaaatcaaaaatacaagtagtccaagtaatataagtgctaacatagcaactttattttcttttaatcttctccatgcgtcttgccaaaaagatattgaaggtctagctattaattcagcttcttcatcgttttttggtatccttttgaacatctcaggagtaagttttaaatctttttcttccatttttacctcctgattaatcgtctgttaatttaattcttgggtcgatgaatacatatagaacgtctacaactaatgtagcaactataaataagaacgcaaagaatatagttgatgaaattatcattggatagtctctgtcgttaattgatgatactaagaagaatcctaaacctggtatagagaaaatcttttctataacgaaggaacctgcgaagataccaccaatttgtggtccaagtattgttagtgacggaatgaatgcatttttaaacacgtgctttcttacgatattaaactcgcttacacctttagctcttgctgtaaggatgtagtctgagtttacaacttctagtacagatgatctcatgtaccttgcgtatgttgctatagtaccaaagcttaacgcgattaccggcataacagcatgttttactgttccccagcccataactggtagtattgctaacttgttagcaaaaacatattgtagtagtgtagccaatacgaatgaaggtagtactatacctatgattgctaggaacattactaagtaatctggccactttcctctgtttaaagctgctataataccaagggtcatacctagtacgaagcctataacaagtgcgcttccacctaaagaacctgatattggcgcattttggaatattctgtccgctatctttacacctggatatgtaattgattcaccaaaatctccatggacagcattttttaagaacaatgcatattgctctcctaccggcttatttaatccatacttttcctcgtagttttttctaacttgttcaggtaagttcttttgtactctggcagttaaagggtctcctgggatagtatgcattagataaaatgttgccgtagttatgataaaaagagtaagcattaagtaaatgactctctttacgatatactttatcataatatcctcctatatcttctatctaatttaagaaaaggggaagattccccttcccctaaattaaattttgcaagtaattattttcttccgctagtgtatattctagacatacccatagagtcgaagaaactgtaagctgcgtttctaatgtaagctcttctgaatgtttgagaaattctgtgaactactggcattagagctggatcatcatgaactacaactttttctgcgttgtgaagtatttcagcacgtttgtctggatcttgttcaactttagcttgttcgattagagagtcgaattcatcgttcttgtattcaactgctggataagctaatgtctttgagtagcatgtttctaggaagttagatgggtcgttgtagtcagcgttccatgctaaccatgctaagtcaaagtccttaccagttttaacgatgttgatgaattgtgaccattcttggttatcaacttcaacgttacatcctaaaacttcttggaagttttgttgaacgaattctgctgatgttctagcatcttggtcagtacctgaaccaagtaatcttactgttacttttgatggatcatcaccaagatttgcttctttcataccttcgatgaatagagccttaggatctggattttcgtccattaatgtcttaacccaaccttcaccaagtttgttgaattctttaccttggcaagtaagtgctggtggtacaaagtcataagctggtgtaggaacaccgttgtagcatgcatcaattaattcttgtctgtcaagagctattgataaagcttgtctcatcttagcacttggtatatgagagtctgaacttaagttaaacatcatataagttgtgtctggtcttgatctaactagtgagtagtaatctggattgtcaaggaattgagatttccacttagggtcacttacgttagcgtagtcgatttcacctgtcttaagtgcgttataaacagtgtttgtgtcttggattatagatactttatatttacttaattttacttcgtctttatcccagtaattttcattcttttcgtagttttgttctgagttaactacccagctcttaaggatgaatggtccacattgtggagatgtttctgggcttgttgcatatgtgtctccatatttttcaacccagtcttttctttgtgggaagaaaactctttgagttacgatgtctaagaagaatgctgttgggctttctagagttacttctagagtcttatcatctaaagcttttacgcctacttttgagaagtctggttcttgaccgtcagctaatttttgattgttagctgcttctgcacccttgatgtagtagcaaaggtttgcatatggacaagctgttcttgggtcgatacttcttaagataccatattcgtaatctttagcagtaactggctctccgtcattccacttgtttccttctctgatgtggaatgtataagtaagtccgtcttctgaaagatcccagctttcagctcctgctgcgaagtattcagtttcgccttgttttccttcaacgtcttgaactctgataagtggttcaacgatgttagtaaggattgtgttaccgtacatatcactaccctttgatgggtctagtgtgtttggatgagagttatcaaatgtgttgataaattgatcagcatctggttctccacctgtaggtatttcgtctgaacttgcagtttcagctggtttttcagcttctttgccttcttcagtcttagctggttcttcagctggtttttcagctggtttacaacttgctagtacgcttatagccattactaatacaagtaataaagctaaaaactttttgtttttcattttaatttcctccttaaaataaaattagtatctacaattactattataagctttcttattataaaagtcaagttatttgattaataagcttataaataggcctcgacgttgaacatctctgttcacatatcaaggccttaaagacgtatatatgctattattattttttacttaacgcgagaactgcaccatgtattgtttcaatatcgtttctaaattctctcctagttcttctatatctacttcatctgtcttcttagtaatatcatttactaagtcccatatagctactactaccttagatgcgttggagctatacatcctctcaactatgtcaagcgttgtaaagtctttcttgtttgtgtagtcttgcactcttagtttcatatcgcttgacgagtttaaatacttatcaagctctttcatatcgaagtctgaactgtaatatatggtcatcttgtcaaggttcagtggcaagctcttgttgtttggattgatatcaaaggcgtcttgtatagttcttgcttccataattttattgtccttcactatctttctaatgactttcgagttgcaagtaatataatcagtgaagactttatccactacagagttctcttttagcacggcaaatatttcttcgatagggttcttttgcgcgcttatcgtatcttgatctagagtcttagcatcaactttgattgttgtctcgtagtcttctatatcgactagtcttatatagtcaaagagccttgcataataaagatacttttcttttacatactcatagttatcaaaggctatgaagtcaaaactatacaccaatctcttgtcaattttacttaaatctccatcttgatccttagcattaattgcgtaattaagtggtcttagcttgttatcaacttcgaagtagtccttctttgcccacacgtctgaagaaaattcacttgcgtacaatggcacgtcgcaaagcactttcacgccaagaccattggcatagttctttaagtttagatactgtctatataaaaggaactgaacaaactcttgaaacttcacttcgtcctctacttcttctgtgatgctctccttatatatatttatattaatctcattagcatcaaaatcttcgaaggctttcttgtctttggctaggctcataaatagcgcgaagtcctttagccaatatgcgttatcctttataaagtcttggtatatggtctcttttgtgaagtcttggtaggctctcttatatacaaggcgaagtgctttaagtttttctgacttgattagctctttgtcgtgcatttcaaactttttctctgcttcttcgtcaagcttaaatatctctgctgtactaagcaagcccatatttataaactcatctaggtctgcatatattgggtcaagtgcaaagtgtgatagcaccttgtatggattaaagtcctcgtccatatacataattggttctatatgccaaattttttgttttgacttgtgcaaaaagtctactgccttcatcgcatctttaaaggagccatgtttatgcttgctctttaagatcctaattggtaaaagcacacctgcttctctaagtgtatccaaaaaatcaccttctacttcatatcgtttagtaaatcatctatcgctttagatgggtcgaagtaatacttcgtacttctgatgctagcaaagttccagccaactctttccaaaatatctctcttttccatctgattaatgattgtctcgtcatctatatcaaattctgatccttccgcctcaactatgaacttcttatcgtcctttatagcaagtagggctatgttataaagacctgcttctacgttagtctttacttctacatcccttgcttcaagctctttcttgatgtcttcttcaaaggatgatagctcgtatctgtttaacttatcaaagaccatcttgtcctcgggatttataaagaactcgattaaagttctcctaatatcgccaagctttaggtccttcttgtaatcaagtgatgttactagtacgacttggtccttcgctcttgaaactgcaacattgtactttttcttgttcacatcgtaggcaccctcatttaagaccttaagtgcttcgtccttgtcgttcgaatcaactgttgttaagaaaatgatgtctctttcgtctccttggaaagctgcgggtctaccgcatagtatgttgagcctgtcataatcttgcaagcttaacttttctataagaagcttatctataaacttagcttgatcttcgctagctagcgatatcacgcctatggtcttgccttcgtaatcaggctcgtcctttatccttacaatttcatctactatataatttgcttcagcttcgttgactctatcttcatcttttgtgccatcaagttcaactaatttaagtgcaggctgaaccttggtagatgaagactctctaagcggctttataatgccgtcgtatgaaataaagtttgaataggcggctatcattggcacgcttctaaagtgttcttttagagtgagtactgggaagcttgtcttaagtatatcgtacaaggatgagttcaagtcatataagtggctgtttgcaaccttgtccttgatatacatatcgataagcttgttttgtttgtcttggtcaataccgactgcttgcggactaacttgctcatcgtcaccgactatgatggccttctttgctaattgcaagataggtatagaagatatatctgcttgcgatgcctcatcaatgattaagtagtcgaacttttgattgtaatcaagactttcaagcgccttgtctatggtcataatccacgcaggtacacatctttggcacttcttcataagctcttttgctttcttctttaagccaacagcttgcttacctgtgcccttgcctatcttcttcatagttaactgccagccttgtaaggcttgcttcttctctatatcgtccttgatcttaagcataaacgagtgccatgccatgtttgaagcaagctcttttgtgatgtcgtagagctgctttttgtaccaagtcatcatcttttgatacttttcatatggcgttctatttatcttagagatgataccatcaaattgcttgtaataccagttctcttcgatgttttcaggtgcatccttaagcccatgtatatcaaagcggttgtatataaattccttccatgtaggtgctacttcagctaatttatcaagtagctcatttctctttctaagtatcttaatcttctcgtaagtctttttaagattttcaaagctgtccctgtagctctcgtagtacttagtctctatcgcagtgttcattagtaagagcaagtcggacttattatcttcatctactttaagtttttcaagtgtatcatcaagcttttctttcgcaggaatatattttaagtcatactcatcaactagctcgatgtactttcttaagtcgtttttaataagtgtcatctctttaatgaaggcgtccttaggagctaataccttgttattaacaaagatgctgtttatattgaagcccttgtcttgcattagcttaaataatgcttgaacgttctcatcgtagaacttcataagcttagttataagtggtaagtagcttagtagctctttaccctcaataagcttttctctgtcgaagtcatatcctgttttatatataagttcgtcaaagagtgcctttagctcagatatcttgatatctaagttaatattaactatcgcgtcatccatatcctcaaccgtaacaagtccttgtccgtttatgctaacgctcgcaagtaccttcttccacgcgttcttaaacattgccgaaatgcctttgatcttcttgccttcaacaagtcttgctctcatctcttcaagtgactgtcttagctctttttgattcatctcagctgggtagataagtcttttgcctcttaagtgttcgatgtttctatcgtagtactcgtcaaggtcagtaatcagttcagcaagtctaatgtagctcttcttatccgcattacctgccttggcactaactatgaccttaatttgccaatcctctagcttgtcgagactattaaggtagtcaatcttttcgtatatatctctaaaatcttcatcttgcttaccactgtaaagagcattttgatcaaggtagaccttctccttcaaagtgatgttgcgtctgatctcttccttaagagtctttgctctaagtagcgctgcgtccattgcctccactgtcttctctaaatcctctggattgagtatggagtttggatcaggtagaccaatgtttagctccttctcgtcctctctagtaagcgcctcgtttgagtagtacaaaaagtctatgtcgccttttgatataggcagcttctcatacagttttacctcgccaggtatcttgtttaagccgtcatggtcgtgaagaaatctcgccgcgtctatgggactgaagacttcctcgcctatagtaatgctctttagctcggatgacttgatgctaaagatcttctttcttgtttcgttaagtctctctagcaatatgtttctgtccatattgagcttttgtatcttttctttaagctcttctatggagtgattgcttatataatcagtaattgagtcgatggacttctccatgtcctcgttgttgtcgtctatagtcgatacgcaaagtgctctgatctcttcttgagtcatgctcttaagtaccgaaagcgccttcttcgtttgcgaagcgaccaaaacagtcttgcctcttgctaagatatctcccaaaaggttcgctatagtgtgcgtcttacctgtgccaggaggtccttgtaccaagacagtgtcgtagtttgcaattctctgtgctacttcaagctgctccttgttcgcttcctttgtgaataaaacgctttgtgagatgccttcgatgtttctaatcttgtcttcgatagtctcggctctctcttctgtttccttctctttgatgttgacgccgcataagttaagtaggctcttgtttacttcagaacccttttctatggactcaatcatctcgtcaaggttttgtataaaatcagtttctttatttcttaagtatagtagtggtctattgattatggtgaaggccttgtcggtttcgctcacatttgcttcttcgtatgaggagtctgtatgcagcctcttcgccatggacttcataagctcagccattgacaccgtatcgaatggatggtagtagttcatagagatgtgctccatgatgttcttaagctctaagtggttaacgttctcaattagagatattagctttatgtcaagcgtcatatccctgtttgtatcgcgtattgctatgctgtcctttcttgaatcaaaatcaatagatgccctctttattagtataggatggtagatacttgggtcgtactttgagatcaaaataccattggcaaagactaattcataaaggtgagactcgttctcaagcttgtagaaaagctctctaaactccttaaataaattttgcactctaatatcttcttgcgtcttttgcgagtaaggtcttgtaatcctaagaatcacatcacttgttgagtcgctgccgcaagaaaagtagaggaatttattattaaggttgatatcgtcaaggtactttgtccataactcgtccttaacatttaatataggcttgtacttgtcgtcaatagtttgcctaatatacttaaataatgaaattactctttgtctttcgtccatttcttctcctatcctatcctaagaaagtaaataataaatttgctgaaaaaccagctactaagccaccaatagtgtgtgcaaatatcgatttgcctgctaagtcgttgtagcctagcgcgtccatcatggcgatgtgtgtagaaaggtagcctgaccagcacatgcatatagcagtgaagactgcaacgtctgatgcacttgctgcacctgtgctaattagttcaggtactaagcctatagctgcgcctgctgagccaagtgcagtgattggaacagctatgcacttgcctgatgtgaaaccgaaaatcggttttattatgaagcttaatttatctgcaataaatggtagcagcttcacgccttcctttgcagctcctgtatatagaccctctggtcccggtccgtttgttagtataagtacaactgtacagataagtataacgccaggtactatcgacatacccatctcaacaccaatcttgcctccttcaagtaaggagtcgatgaatctgttgaagatagatccgtctctaactggtcttagatccatagttgtcttttctgcgtccgcatcacctacggcaactgcctcaacgccaaacttcttttttgtgaagagcatcattatcctaacactcacaatagagcctatgatagctcctaagttaccaataagcgctgccttgatgctgccgtcaatctttagacccatcatagttgttgttgtgataaagcccataccgaaagctgtaccaatgtttgttagtacaggcacttgatacttcttgaagtaccttaaaaagtttttatccttcgcaagtgcaagtatcgatggattgtctgataagtaacaagtcaaaacaccaacagatgccgcgcccggtaagtcgtagattggcttcattagttttgacaagagcttattgattagggatataacaccaaactcgcttagtatagatgataatcctcccgcaacgacagctatcgccattatgtaaaagcacacttccataagcaaagaataagcagtgttcatgaaggtattgattaagttgatagcccccatcttagatgataggtagtaaaaaaaggcaaataagactgccaaaaagatgaatgtctctaagcttatagcttttttaaatcttctttccatagttcttacccttatgtctaaattaatctttgaagcgtcttagcgctcgtctttacacttgagccttcttctctagctttaagaagctctttttcatcattagtcatagtatcactcctaaaaataatctaagttgattataacataaaaattcctttacttcaatgattttaaaaaggacagaatgatttttttgtaagttatatggcacgtgaaatgttttgtgcgcgtggaactatatatgaagccatgtactatataggaagccacctactatatgcgaggtctctcactatatgagaggcgaggtatatgtaaggagccttgctatatataaaaatcaagcttatgatgcccatcaccatagcttagcaagatataaagctcttgactttgctatgctaaaagcttatactagaattgatggactatgcttattaaatcaaaggaggtatattatgagtgagaaatatccattaaacgttccaactccaacgcactttacatacgttgttaaggatttaccaaaggttacagttgaggagcgtgagaaggctcttaaggcaactcactacaacgagtttgctttcccatctggtctattaactatagacatgctaagtgactcgggtactactgccatgactaacactcaatgggcatcactgttcttaggagacgaggcttatggtaggaacactggctactacgttcttcttgatacttttagagacatatttgaacgtggcggagaaaagaactggaagaagactctagatcttgtgagaactgactgcagagatgttaagaagatgatggacgaagtttacttatgcgagtacgaaggcggcctcttcaatggcggcgcagcacaaatggaaagacctaactcctttatcattcaacaaggacgtgcggctgaatctgtacttatggagattgttaaaaatatcttaactgagcgtcatcctggtaaggtcttcactataccatcgaacggtcactttgatacaactgaaggcaatatcaagcaaatgggctctgtgccaagaaacttatacaataaaaaactattatatgaagtgcctgaaggcggcaagtacgacaagaatccattcaagggcaacatggaccttgaaaagcttgaagagctaataaacgctgttggtgtccaaaacgttccacttatctttatgtgcatcactaacaacactgtttgcggccaacctgtttccatggcaaacataagagaagtaaacaagattgctcgcaagtatgatataccgctaatctttgacgtggctcgttgggctgagaactcttacttcataaagatgaatgaagaaggttacgaagacaagtccatcgccgaaatcgctacagagatgttctcatactgcgacggcttctgtatgtcagctaagaaggatggccatgcgaatatgggcggcatgcttgcctttagagacaagggcctgttctggcaaaagttctctgactttaatgaggatggaactatgaagatggatgtcggcgtaagacttaaggttaagcaaatctcttgctacggcaacgactcctacggcggcatgagcggccacgacatcatggcactagctgttggtctatacgaaagctgcgactttaattacatggacagccgtgttaagcaagtagagtaccttgctcaaggcttctacaaggcaggcgttaaaggcgttgtacttcctgctggtggacacgcagtctacatcaacatggatgagttcttcgatggcaagcgcggtcatgataccttcgcaggtcaaggcttctccttagaacttattaggcgctacggcataagagttgctgaacttggcgacttctctatggagtatgacctaaagactcctgagcaacaagctgagcttgcaaatgttgtgcgcttcgctatagatagaagcagacttactcaagagcaccttgactatgtcatagctgctgtcaaggcactttatgaagacagagagagcattccaaacatgcgtatactttggggcaagaacttacctatgagacacttccacgcattcttggagccatataagaacgaagactaatgtcatatatgaatatatgaatatatgcaaaaggcgacactttaagtgccgccttttttgatgcgcaaaaatagagatgtgaaattaatcacatctccatcatcttatacttataaattttccgtctctataaatttttcttacgtacttttcaaagtcttttgctgtgaagtctaaaatcctttcgcagcctgtgcacttaagagtgaccccttcacccacgctgatgattttaaattcatctgtgccgcaagggtgtgccttcttcatcttaacaagatcatctaccctgtactcaagcattagtaatcaaaaacctcgccttcaattgtcttatcttcgataagtttattaactctatcaaggtcgtccttgttaaagactatggacaagccgcaagataaacttacgtgtcttggtgttggtatcatcttgtactctatagcttccttcttgaacacgccttcagcaagtattgcgtggtgtgtcgagttgaagcttaaaacgtatcttttcattatgataatactatgttcttatcagccttttctaatgtttcgtatatagtgtacatattagaaatttcgccaactgcaagtttttcttttaagccgtagaagtcaagacatgttccgcatgagatgatcttaacgccattagcttccatgttcttaatgtcttcaagcacttcgctgccttcagatgttagtttaacaccgccattgaagaaaactatagtctttggtagtggtgctgtttgtgaaactgtatataagaagctcttgataagtatagcgccaagcttttcgtcgccgtgacccataacgttagttcctatacctataacgaaggattcttcttcagatttcactgcaactatgtgatctttattgatagttaccttgtaatcaccctctacttcttcaactgtagccttaagtcccatagactcagctagtcttgataagttttcagtagcaaccttgttgtcaacaagtgtgcatacaactcctgtttccattgcgtccaattctttctttgttaatataactggctttggacatgccaactttcttgcatctatttctttcataaataccgcctcctaagtataatctatacttaaagtatagctttgtcaagttaaattgtcttattataaataaatctaatactttacttaatatttattgaataaattgttatgttctcatcacttactatagctatgctgtccttgcttaagaatatatttctgatgtcttcttgaaaatccttcatatagtacttatctttagatggaatatatacttctctctctgagtagactatgaaatcgtctttgtacttaagaaggcttctaacgttttggttgaagctgtgctcttctaagacttcagccttgtcgtttaaaaccataagcctgtcgtcacataaaagatataccttgccaccacttataactatatccttaagtgtgttgtactcttttttgaagactattgatgactcttgcatatagtagattcccttgttcgttgcaactagcttcataccctttagctcacctataaaggcaatgacttcgccgttgaacttatatagaagcttgttctcgccctttctattgatctctttatacaaggatgccttgatctcacttgagaacggatcaaaggacgctatctgcatagttttgaagtccttatctacattgtatgttagtatagggttcgttgccttatatctaaaacgttctgtgaactcgtcgtcataagtacgaagcgtttcattgaaaccatcactaagccatgcagtgaatctaccgttcttttcatcaacaaaggcgacatcttcatcatagttaaaactctttacatccttaaggtcatcatagcttaaaatattaacaatgccacttggtccatcagttgcatagatgtatttatccttaaattgaacatttgcagctctcgcttcaaagtcccttctaagtacatcttcatcgctcatcttagtcataactagagtgccatctttatgataataaatcttatcatctctaaaaaagaccttcatatcactagttaagtttcttgaataaagtttctcaagtgtaagcatcttctctctatgtgcgctaagcttacttacaaggctcacaactttctttggaaaagcaaatgtcgctagaagtataagaagcaaaaccacaattatggctatgagtatttttttgtaaacattcatttctttaaacatattaataataatccacttctcccatcttgccatatgaagctaagtcatatggtgcaaagacgcctctatcagtaacaactgctgaaactagttcaggaggcgttacatcgaaggctgggtagtaacccttgacgcccttcattacatggctcttgcccatgaaagatgttgcttcgtgagggtctctcttctctatgcttacatcgccaacagactttcctaagtcaggtatgcctgttacaaagtatggtatgcccatgtactttgcgcatattgcgagctgcaaagtgccgaccttgttgacaacgtagccttccttagtaatgctatcggctgctgatgtaaataagcttatattcttctccttcatagtccacgcgcccatattgtcagtgatgacagtcacgtcctcgccttgacttcttaaaactgatgcagtaagccttgctccttgcaagtacggtctcgtctctggacaataaaccttgatcttcttgccaaggtctttcgctctaagcatcatgtagccgactatggtctcgccgaagcattgcgtcattatagctccttcgtccggcataagctttgctaaattctttgccacctcgtttatggctgagtaccttctctctaatgactcaagtgcgcccttgaatatctcttcatatggtacaagatccttctctatcgcatccttggctatgtcatatgccctttgagttacttgcaacattctaaaagatgttgtctctctagcattagcaagtgccatcttcgcttcgttcatgtgcttaatgaacttaccttcagtatagtccttcgcttcgtatgcagccagtgccatgcccatgaaggctgctgtatatggacctgcgctttgcgtaaccatgttcttgatagcatctcttacttctttatagctcgagcatacttcgtagcgagtctctattgggtagactcttctgtctagtatccttaccttgccatcttcaaaccaagcaacgttttcgtacttgagcatgaagccaaggtccttatccatcctatcatttttgtccataggacttcatcctttcaataaccgcgtctatatctttcttgcttagtatgtgtacatcgtcttcgaagcgtactatgtgatacatcttagcaatgtactctatggttcttgcgtttgagtaagcttctttaacgtccttacctagtgcaagtacgccgtgattagcaagtaggcagccctttctatctttaagtgcaataagtgcagcctctgctagctcttgtgtgccaaagacttcatactctgcgcacttaatatcttctccgccaaggtctgccatgatgtagtgaagtgctgctaatggcctacgcaaagtactgtagcttgtcgcatatatcgagtgagtgtgaactatgctcctaacatcttctctgttcttatatacgagagcgtgtaagaaagactctgttgatggtttgttcttgccctctaagatatttagatcaaggtccataacaactaagtcatcaaagttcatattgtcataagcaatccccgatggcgtgataaccatcgccttttcaaccgggtcatatatactaatgttgcctgctgtaccaacagtaagctcgtctttaatcatcttttttgcaaactcaataagtaattttttatcttgaataaacatctagtcaccttctatattcttaatgtcttcttgatcgtcgtcagtgtaggactcttgtacgtagtttctgtcaatcttacctgtgttcttaacttcatcagcaaaggtaagtataatcttaccaacgttctctccttccttaagctcaacctttagtgattgcttaagtatgaatctatcgataacaacacccttgcccttgtcagttacaactatcgcacctatcttaggcatcttgtcaacaagctcgttgtattggtctgcctcatagtttaagcagcacataagtcttccgcaaagacccgatagcttgctaccgttaagcgttaagtcttggttcttcgcaagatttatgctaataggcgagaactcacctaagaacgatgaacagcaagtcttcctgccgcacttaccaactgatggtatgcactttgcttcgtctctaacaccgacttgtctaagctcaatacgcattctaaatattcttgctaagtccttaacaagctctctgaagtcaaccctgccctcagcagtgaaaaagaagataaccttgtttaagtcgagagtaaagtcaacgtcaagtaagttcataccaagaccgtactcctcgttcttttgcacaaatatctctctagcttcagcctttctgatgtcgttatccatcttttgatctatgtcctctttagtcgcctttcttattatcggcttaagaggtataccaaactctttaaggtctatctccttatcggcaacaacaacgtcacctagttcaaggcctctcacagtttcaacaacaaccttgtcattagtagtaaattcttgtcccatcgggtcgaagtagaatatcttgcctatgggcttgaatcttacgccaattatttttttattcatttaatcacctgtcaaatttttctatcatatttaagactagagtctcgaggtgcagtctaaaattaccactgttgcctaagtacctcttagtctcttctatcatgtcaatacactctaccaagtcatatagtgctagagctttaaaacttttaatctcatctttataatcaagattaacaatcctacattcactcgatgctatgtccttgataaagatttcaaagtatgtaagtatcttttcaatattatctttttgctcttctaagtagtcaagtgccttgatactctcatagcgtttcttctttaagatgtctatgattatatctatactgttctttctaagtataagctccttgtcatcttctacaaaggctttaagcgcaccaacgcttcccatggcaatggatgcatatagctccttatttttaagcttagagtaattttcatctatatagtccctaagctcacttatgctaagaggcatcactctaataagtttgctccttgagatgatggtatcaagtatcatgttaaggctcttagtaacaaagattactacaacataacttggtgcctcctcaagtgtctttagaagaacgttttgactctcaatttgtatatcttcactatccagtaataagtagacctttctatctagctcaaagggtcttacatagacatccttagctatagactgcgcctgctctttgtttatcttgtccgtcttaccaaatacagtgaagtcaactttcttatctggttttttagaattaagaagaagccctgcaaattccatcgcaaggctttctacataatcactgtctttgccttcaaaaatataggatgatacaagcttattagtgctaatatcgttataaagtattttctttacttcatcattgccaaatattttctcaaacacaaatttactcctaaactcttaaaaattcttctacgtttaatacaaataatgttgctccaccaactttaacttcaagtggatatggtacaaaagtatctccaggcatagtaactgttaataaagatgtagttatctctcttgtcttgcagttgtgatcaacaagctccttaacttcattaactttatcatcttcaacacctattagtaatgtagtgttgcctgattttaagaatccacctgttgaagatagttttgttactctaaacttcttctctgtaagagcatccattagtggattaacatcttggtcttgtacaattgctacaattagtttcatactaacactcctttattagtttttttacttcctctaaggcatcgtgagcaaggctcaacttgtccttagtgccatctaattttattagcttcatatcttcttctttataaagctttaagtatgccttatgaaccttctgttgaaaatcctctcccaaggactcaatcctatcaagctcaccaagcttttctaatctcttaaatgattttctcgcatccaagtccatcagtatggtaaggtcgggcctaaaaccttttaggaagaaatcatttagcgcctttacctcttctacgccgagccctctaactataccttgataagcaagtgaggataataagaatctatctagtatgaccgaagtcccacgttccacatttggcttaatcactttgtcgtatagttccgacctcgatgctgcaaacagcagcgcctctgtatgatagtccatctccttattagccttgtcagataaaatctctcttatcttctcgccaatctctgtgctgcccggctctcttgcgcttatatatgcaaggcctttctcatcgaagtagcctttgattgcatctatgacagtgctcttgccggtaccatcttgtccttcaagagctataacaacgcctttcattagtctactacaaccaacgagtcttggtcgtcgccaagtagacctactatgttaaggtctgattcctttaagaattgtatatgttcaagtatctcttcagtaatctcttcgcctggtactagtagtggtactccaggtggataaggaattattggagacgttactatctctcctaaagagtccttaaggctgattatcttctttgatgagtaatatgcatccgctggtctgattatgatctttggatcaggcatattaactcttatatgcttaacttcttcataagaaaggttctttgaaaggcctctgattgcttcaagaagcttgtcataatcagaatcttcattcattagagttgcaaatattagtgcgtagtaatagtcactcatctcaagtctgatattgtgtctttcgtaaagttcttttctaagtcttgagcccttaacaccttcaagcttaaataatatcttagtattgtcctttgatttgatagtcttgtcaaagtcgtcgccttcgaagacttcaactctgtctatcttcttaagctcttcgatgaactccaagcacttagttacattgtgatgaagcttctctctaccttctccgtccatgtatgcacatgcagtctcattagatagagtgaacagatacgatggcgatgttgttgtatatagttggaatctgtctctaagtttgttagtgtctatcctttcagagccaacgtgtatcatcgatgtttgtgtaaagcctgtaagtgtcttgtgtgtagagtggataacaatgtctgcgccgcactcaagagctgacttaggaagtctgtcatcgaacttcatatgtggtccgtgagcctcatcaaccataagtatcttgccgtaattgtggcaaatctcagctatcctttcaaggtctgaagcaattccatagtaattagtgtgagttactacaacagcctttacctcagggttgtcaaggatcaagtcctctatctcatctggatcaacaccagtaagtacgtggtagtcgtcgttatattttggatatacgtaaacagggtttagtctgtttagtatcaacgcgttatatactgatttatggcagtttctttgaacaatgatagtatctcctggcttagttatagttgctatggcaatatatatacttccagtagaaccattaacagcgtagtaagtgttcatcgctccaaatactttggcagcttccttctcactctcaagaattactcctcttggttcaagcaagttgtccataccataagtttctgtcgtgtcaatagctgggatgtagtctccccagttaaacaatgtgttctttcccttatgaccaggcatgtggaaagaaacagaattttcatcttttaattttgataatgcttcaaaaacaggtcttttcattataacctccttatactctatatatttcagtttttttacgtatggttctgtaccatgtgtaaatcattattagtatcaataccaagcttagtacataaagaacgttcttcactctggcagtctttaaaatattagcaaggctgtaagatatgcccgctaagaagaacattaaagacgctctctgaatgaaaacatttcttcttctaacagcatttttgaatacgttaagaaagattagtgcattaagcaaaagtatgattatggtcctgaagacttccataaacctacttattctgtcttggaaccagccgttttgtggtagcaaggtaagtataagtagtatcgcatctagtaagtaaatcacatttgaagcctcaggcatcctctttttgcgcagcgagattgctgctagataataaaatattatagctattatcggtatcataagcgagctcataaacaaggatatgttcataagccttacaatcttgtcatcatcacttaaaaacaaggcataagttctgatacctaagaagatggtgacgaagaccacataagtcttagtaaatatactttgcagtttaaagtctttgtcagtgtagttgtatttatttataaaattgtccattacaaaaattattactatatataaaaatgtaaatatcggttccaatatcttttgtaacataaaatcacctcatatcaagtgtactttaatcacaaattggtagtggttcttcataagcttgtaagccctatctagcttatcatcactgtcaaataaagtaaagatactcgatcctgagccgctcatcatagtcttaaagcctccaagagttttcatctcgtcatatagattcttaacagctatgtagtgtgtgaaaacaaaatcttgcatattgttagtatacttagtaaagtcatcccttttaagaagtgcttctatctcgtcaatactcaagtgattaccatcaaaagtcatgccctcatatacatccttagagctgatattaataccagggttgactataagagcactgtgctttttaagcatatctacttctttaatttcttcgcccctacctgtgcatatggcagccgacttagcagtaaaaaagttgcagtcgctaccaagctttaaaagaatatcaaaatattctttctttgtcaaggataaatcatatagctcgtcaagcgccttaacggtttcataagcattagaactgccaccagcaagacctgcccccataggtatattctttttaagtgctatacgaagtccctttatatcccttatgtcagctactaaatcatacgccctcttcataatgttgtccttgatatcgatgtttgagtcaattataaactcgcccgacctttcaaaacttatctcatcataaagatcaaccttagacataagagtaattatgtcgtgaaagccgtcgtccctcttagaaacgacttcgagatgcaaatttattttcgcataagattttgtttttatcatctcttcagatactcctccactcttaagttaattataacacattttaattttaatgtatagttttattttttggagctgtgtcatttgaaaattctttagtccccctgcttatacatagcactcatctatatatatctaggctcctaagacttatgacgcttgctagtatatagtaagcgaagatatatatgagaagcttgccactatatgaaaggcttgcatatatatgagagacctctctctatatagcaagccccatattattcaaataaaaaaggcgtaagattcattagctcttacgtcttttaaagaaaaaaagtcctcacatcgctgtgaggatattttttagattatttttactactaccgtcgatgttaatacatctgaataagtatacgatataacctgatcgttattttgtccatcttctagagtcactgtgaatagatttggatatgctgaggtaatcactccttgcgcttcaacaaaggtattacgtcccacgtttgttcttagatgcaccttcttacctaaaatactctcaacactctttctaattcttttaatctcattcataagatgaatcccacccttcatatactttatctacatctatatatagtatagcatacttaataagttttgtcaatcgtttatatatattaattttataattgtgataaagtaattagttcttgttcatgcttgtgaactttattttgacatccatctccttgccattcctgtttattctaagagtggcctcgtcacctagattgtagccaaacattatcgacttaagtgtattgacatcggtaacttctttatcatcaacctttagtatgatgtcgccaggtactatacctgccttgtctgctgcagtgccacttgcaacgcttaatacgacaactcccttgtcagtgtttagcttaactctaagagctgcttggtagtcctttgcgttgtatatagacacacctagttgagcagtttgtgccttgcctgtcttcaagatcgagtttaaaacacccttaatcatattgataggtatgctaaagccaagtccttctgcatttgtaagcttaactgtgttgatgcctatgacctcgccttttgagtttagtagtggtccacctgagttaccagggttaatggatgcgtctgtttggattaggttattgataacttttttgtctactcttatagttctgtccttaccagagataactcctgatgtaacagttctgttgaagtcaagacctagtgggttacctatggcgatggcgatttgaccgatttgcactttgtctgagtcgccaagttcagcaactggtaagttctttgcatttatcttaatgatggcaaggtccatgtcctcatccatccatactatctttgccttgtgtgttgagccgtcgtcaagtagtacgtttatcttgccgcccttcttgtcagtattttgactcttgtctttactgttgtaatcatatgggctgtccttatcttcgcctgcacttccattatccatatcatcgtcgtcttcatctacatcttctttatcttccttgtcgttattagcttctttcttagagccccggcctccaccaaatggaaagtcacttccgaatggaaagtcgtcgaagccttcgtttgtgttttgcacttctgatttaactacgtgtgcatttgtgatgatatagccatctggactaactataacgccagagcctgtacccttgcctaaggcttgtctaccaaagaagtcacgtgatataacttgagtagtgatacctactacagatggtatagccttcttagttgctgcttcgactatttcagtcggttgatctatggtgatcttttgtgtcttatctttcgcatccgcatgcatatagttgtaagcattgtttgccttgttaaagatatatgcaccgccaaagcctgttagcgttccaaagaatattgagaagatgattgcccatgcaagcacacctgctccataagtcttctttggctttctgtttacctcgttatatgaaaactttgcctttctatactgcggcctgtcatattgcttgttccttctgtaagtcttcctttcatatataaggtcgtcatctgttctaaagtcatctccatcaaagtcgcaatcgttatcgctatcgttgcaattatcattgtcattgtcattgtcattgtcattgtcgttatcttctatgacatcatcctcatcgataaacccatcattaaattcatcgtatttcataatatcgtcctccttttgtttttctgtctttattataaaggtcttttgtgatagaatagtgataaggatgtgaaattttaaaagaggtgattaaatgaaatttatttcgtggaatgttaatggtataagagccgtccttaagaagaacttcaatgagtttttagacgacactgtggcagatatatatgcttttcaagagactaagatatcagaaggcatacttatgatggagcgtgaaggctaccacgagtattggaactacgctgagaaaaaaggctactcgggcactatgatacttactaagactgagcccataaacgtgacttatggtcttggtattgatgagcatgacactgaaggaagagtcatcactcttgagtatgacaagttcttctttgtcaatgtatacactcctaacgcgcaagatggtcttaagaggataaagtacagacaagagtgggaggacgcgtttagagactaccttaacggtctaagaaagactaagggcgttgttgtctgcggcgaccttaatgttgctcacaacgagattgaccttaaaaatccaaaagaaaatagaggcaaggcaggcttctctgatgaggagagagaaaagttcaacatgctgcttgactcgggcttcatcgatacctttagatacttctaccctgacgaagctgataggtactcttggtggtcatacagaactcgcgcaagatcaagaaacgcaggctggaggattgactacttcctagtatcaaaagagcttgaagagaatattaaggacgcggacatactagacgatgtgatgggttctgaccactgtccagtctcacttgatatcgaattttagctcagatttgacaaaactgttttaattttgttataatgtcatatattatacaaatgaaaggagtagactatgaaaaaaataattaactttataatattcttatgtttaatatcaagtctttcttttgcaaatgaagctaaaaatcatgtatatgagattgataacaatggagtcacaaagacatataagacatcatgcaagacagttaaggagcttttagaagatcttaagttaaagctagatgatgacgatatcgtcattccagatctagaaagtgagcttaagagtgaaggaaagataagcataataaaggtagagactaaaatcgaagagaaggaagtcgatgtagcttttaaaacaattaaaaagaaaaacaaagaactaaaccatgatcaaagcaaaatcttaattcaaggtgtgaatggcacaagcaaagtaaagtgcaagacttactacgcagccggcaaacttatcaaagaagagataatacacgttgagactatagttaaacctgtagaccaagtctttgaagaaggcactaaggatgtcttcattaacgatagaggtgacttctctgcaaggaaggccatcaagatggtggctaccgcatatgaagcaggtccaagatcaactggtaagagacctggcgacaaaggctacggcatcaccgcctcaggcgcaagagctaagagaggcactgttgctgttgacccaagggttatccctctaggcactagactatatatcaagagcttaacaccaggtgtgcctgactacggctacgcaatcgcacaagatacaggcggagctatcaagggaaacaagatagaccttttcatggaaacagtttgggaatgtttgcaatttggtaggagacctgtaatggtgtatatattaaaatgaaaagattaattaaatttttatttaaagctattatcctaatagcaataattttagaaatattagtacttgttaatgctaataagagccctaagggcacagcccagtacattatagtgccaggcgcaagagttaaggatgcaaatcctatgctcgcacttaagtatagacttgacgcagcgtatgagtactacactttaaactctggtgttaaaatcataacaacaggcgccgcaagtgaaggcgaaagtattagtgaagcgatggctgcaaagaactaccttgtgtcaatgggagttgctgaagctgatgtggtatgtgaagagaactctaagaacactatagagaaccttgagttcgcaacagacctagtcggcaaagacaaaaactacttaatcgtgtcaaacggctttcatatgtttaggcttgacatactaagtaattatctaggcataaagcacgagctattatctgccaagactccaaaagagatacttgtagtaaactacttacgagaggttccatctatattctacttggcatataaagtagtacgtggtaaaatttaataagattatattaggcagaacgatatgattctgcctttctttatgcaaaaaatggataagaaattaaattcttatccattctcttatctacagatatattcattaactattgtttgctaagatatattcttgcttggtatatacatttgaaacttcgccttcttttactcgaattatataatcaaaataatcaatattatccgtgccaagatcgtgtgacacttcaatataaattttactattgtaattggagataatttcatcacgaacaagttttttggtattaacatcaatagctgacaagccttcatcgactaaaataatatcttttttagccaaggcacaggtcaaaatattaagtatttgcttttcgccaccgcttagttcattacaattgcttgaatttattaatctcttaacaatagtctcaggtaatttgttcaaataagaataaatgtctttttcgtcgtaggcattaaaatgtgtaacttgttcaagaaaaggtactgaaaaaacatgagaattttgagtaatataaaaaactttttctgaagcaaattcagacatattattacttatgctttcattatttatatatatgtcccctctatcgcaatcaatttgtccaacgatagtctttagtagtgttgacttgccactgccgctttcacctatgatcagatatttatttcctgatttaaattcaatatttacagggcctaaataaaaatcatttattgcatattctaaattttctaatttcaaagacgatatctcattatattcaggcaatacgcagctatcttctctttcattttctaaatattcatttcctagttcttttgcttctctaacaatttccttacaagaatttattgcatttacatcatttaaaatatacttaataggataaataaagctttcaatataagcaaatgttgcaacccctgctcctatggtaatttcaccactaataagcaaatagcctaccattataaatgctgtaagactgactaaatccataacaaagccgttaacgatattaacaaaagttttaaatttgccaaatgctaatttttgatcttctgtatcagataatctttgataatgatattttcttattccactttttgatgcttcatctagtcccatatgacccaagtagaaatcgtttaaaatgtccgtataattaccaaaactatcttgataaaactttctcttttttgctaatttcttagcagttattttaggaactattacgcttattagcgatgctaaaataatagagatggctattctatagtcgacaaaaataactaatgatagtgtatatataagtagttgaactatagatttaattatatcgacatatgttgacaagtattcatcttctatgatttcaacattattatttgttatagttaaatactcaccaacgcttttttctttaaacacatagttaggtcttccgaaaatcgacttaaaaataacgtctttcgtatacttaacgaattccttatccctcttccattcattgtattgtgatataaattgaaatatagcgctgcctaatattaatgccaagtatgtaaatgccaagtttattaataaatctttagtattattacctataccgttaaacaattctttttgaacatatggtatcaacgctatacacatagtatataatagagaaaaaataagttctattatggtcgatgtttttatttttttcaaaatattgattttaaatttcatagttgcctcctattatatataatgctttgcttaattaacactcattatgataaatatattataacatatttattttcaataacaacaattacacttactttttaactttattaatttccacttaccattatcttctaaaaataaaaaactcttgagccacaacccaagagttttcatctaattaaatatttatcttcttcttccaaaaaacatattaactagccagatcaacacaactgcgccgacaacgccaacgataatgtcgttaatcatgccgccctttgcttcaaagccagcaagttttgcaatccatttgccaattccaccgcctatgattccagctaaaatattttttatccaacccatttgtttatccactttcataattaatgaagctatccaacctgataaagctcctactataattgaatacataatatctcccccttttattactattacccaaaaacaaaaaaatattaaaatcatataaaaattttattgcaacccccccccataaaatgatataatttattaaaggagtgatatctgtgaatcgaattttaaaaaaacatagctttaaatatttattaacaataatattaagtattttaacatcatttttattttctgtgtttgccataagactcggcaaagttattgacgtagttgttaataaaaatagctcacttaaagataaaattttatcttgtattcttattatttttttatggtttgttctttctagtatctttaattatgtcaaaagtaaatacgcatctgatgtaataaaagatctaaaaatgcatctatacaactcaataggaaagaaggaaatatcagactatatgagtgtatccaatgagtattatttgaataatctaactaaaaacattgatttttataatgataactacttaggaccaaagtgcgatatagtgtcaaacattataagtgcaattgtaagcgtaggaactatattttttattaattggaaacttggtctttcttttgtggcagttactttagtaacaattattttatcacagctacctggtgtaattatggcaaagaaaactgttaagttttcagaaagaaatgcagataatttaaaacttataaataacaatttatcaggatttgagcaaataaagctacttaatctctttgatatttttcaaaatatcttcaagaaaaaagataatgattttgaaaatgtaagactagagtacatgtttgcctctcgtttcgcaaatactttgggaatatttttcagcttctttgctcaacttgcatgtatgtctataggtatctggtttgttttacaaggaaatttaacagtaggtcttttaatctcttcaataaacttattaaatggagtttttagtccagtacaagaatttgctcaaaacaaaaatctaatgggtacagttaaagatatcgttaaaaactttgaagatataatggctacagacaatgaagaaagccttgacataaagctaaacgataatgttaatagcatatcagttaaaaacttaagtatgaattttaaagataagcatatatttgacaattataatgttaattttgaatgtaataaaaagtatgctatagttggcgaatctggtagaggtaagtcaacactagtaaagctaataatgaagtattactcatccgattcatacagtggtgaagttttaataaacggaacaaacattaataagattgatacagaaagtctatttaataaaatcgcttatatacaaagaaatgatttctatgtggatggaactataaaagataacattgaactgtatagaaacttaaatattcaacaaaacttatataatcaactaaaatttactgaagaatttttaaataaaaatattgaagatggaagcagaaacttagtttcaactggtgaaaagcaaaggatagatatacttagatttttagtaaaagattatgatgttcttatttttgatgaaccaacatcaaacttagatagagaaacaagtaaaataatttttgatttaatatttaaaataagtggcaagatagtaatagtgataactcatacaagtaatgaggaaacactaaataaatttgacgaagttattagattgtaaatcatcatatattagtaaaaagtaaatataagtaccctcttaatccaaacatggagataagagggtattttaatgtaaaatttaatttacaaaatactatatatatgataatatttctatgaggtgattaaatgattgacataagtagaacaaaaaatttaaataaagaagataaatataaaattgcctttgagatgattagacgccaatttcaagaagaaactaattttatagcaaaccttgcgaatacctctgccatcatctaccacttgattgacggtgtatcgtggtcaggcttctacttatatgacggaactaatcttgtgcttggtcccttccaaggcaagcccgcttgtaacaggatcatgctcagtaaaggagtctgtggcactgcctactcaagcaaaaagactattgtcgttgacgatgttaatagctttgctggtcacatcgcatgcgactctatgagcaaaagtgaaattgtcgttcctatatataatatgacgcgcggcgttggcgtcttggatattgactcttatgagtattctaactttgatgccattgacaaagagtatttagaaaagatagtggactacattgtaaagcacagtgacacatcattaagataaaattaatataagattattttatttatataggcctagtcattagaatgttttatatgtattgataaattattagctctttgttacaatcgctttagaatgcttaaatatgaaatggaggatttagatgagagtactacacgtcttgacacagcttcctgctaaaactggtagcggtgtttactttgcaaatttaatatctgccttcaaggctgctggtgcagaaaatgctgccatatacggtgctgaagaaaagcatagggaccttatagatgtcaatacagaccgcacgtatgaagttttgtacgacacagaagaagtacccttccacatctgcggcatgagtgacgagatgccatacaagtcgactatatatagcgagatgagcgaagatgagatagatactatgctggaagcatttcgcaagagacttcttaaggcgaaggaagagttcaagccagagcttgtcatctctcaccacctaatgttcttaacagaccttgttcgtgaagtcttccctgacgtgaaggtagtaggcataagccacggaactgacatgaggcaaattatgcagcacaggcgcttcttagcaaggctcactcatctaaaggagcttgatcaagtgttgacagtaactcctgctgagcatgagcaaattgaggatatacttggcataactaaagaaaaaattcacttggttggcggtgcatacaacgacaaagtcttctatcctagcacaaaggctaagagcgataagactattaggctgatgtttgcaggaaagattacagagtcaaagggagtctttgctcttgcggctgcacttccatacttagagaaaaatcatgataatatcgaactgcacatcataggtaacgcgtctaaagatgacaaagaaagaatgatgattgaggcgaagcgctccaagaatttatatatacgcgatgcagagaatcaaatgctcatggcagaagacttaaggcgctccgatatattcatactgccttcatacttcgaagcccttggcttagttgcgatagaggcacttgcctgccacaaattagtagttgcctccgagatagatggactaaaaatgctgctaggtgaaaaacttgtgcatagcggcatcatcgagtttacagagcttccgcgcatctacgacgtcgacaagccatataaagaagatgtgcctagctatgtagaaagacttgctgctaagatagaaaagcagatagcaagacttgatgaaaacttattcacagaagagatatcaagagatttgcatgaatattcatgggtaaatttaggtaaaagaattctaagtataattaaataattactcacagataaaaacgcctcatcactgaggcgttaatttttgtgtgtttaaattatttctgttccttctcttaatacagctaagtaagcttcataggaaaaaactttatttctttcttgattattatcttgtttaagtatgcataggtctatcagcatatcaatagcagactttgctgtgttataagcgagtccaagctcttctgaggcacccttgatatcgattattggctttgctaaaagatgtttgtatagctttaaaatatttgcttttcttctctcacttatctcagcattcttaattttttcttcatcagaatttttaagttcaataagcttatcggcgctttctattgctgattttgacgatatatatacaccgcgcacaaaaaatttaatccactgctcataattaccactatctctcactgacgtcatcctatcatagtactcaattctatgctcctttaaataatacgatagatacaaggctggcgtcttgatagtgcctttatatagtagatacaaaacgataagtaacctgcctatcctgccattgccatctaagaatggatgtatgctcgcaaactgataatgcacaagagccgcatttatcaacgcatcgtatggtgtatcgtcattgataaacttttctaaatccgataaagcttctttcatatcgtcaatatttggcggtatatacctcgccgtagtgatatttgagctctttgagccaatccagttttgactgcgtctaaactcgcctggatttttctcgtttcctcttacacctgaaagcaaaattttgtgcgtctccaaaagaagtctattgcatagtggcaaggtatttagcctatctatagcgtagttcgcagctcttacatagttaacgacttcttcgacgtcttcgttgatgctctcagtgcgattcacttctaagatgtcctcaagagtcgcctgtgtgccttctatttgcgatgaaaggagcgcttccttcttcacatacatcgatataaataaattcatatcagggattttctctgccctatcgtccaaaatagcaagcgtcttgtgtgcttctattattaaattgttaagctcattgtcaattgtaatagcaggctctggtggcagtggacttggtctgaatgaatagtactcacttttcccagaaagattttttattaatttacctgctctttctttactcatatgatcagctccaatttgaaatagtgactacattatataactcttatttcaaaaagtcaagagtttctgaaataagaatcatatttttatttccttatttcaaataaacgcaattttctgaaataagaactcattttcccctttcttattttaaataaaaacagagtacgaaaatcatactctgctatatcttcaataatatttacaaatatatcctaaaattattgttctagcgctttaactataccatctaattctttttctataattatatctgcttggcctaggtcaactagtcttgtgttctccggcttcaaggcaagtgccgcataatctttcacaccgaacttctcagcaagtgctgctgcctttggctcaccaaagatgtagtgcttcttgtgacactcgtcgcagatgaagtatgccatgttctcaactagaccatataccttgatgtgcattaagcctgccatcttgaaagctttttgcactatcatatcaacaaggtcttggctcgatgtaactataactagtccgtttaatggatatagctgatatatgcttagctgtatgtccgatgttcctggtggcatatcaactaaaaggtagtccaaatctccccagttaacgttctcataaaactgtcttatcacgcccattagcataggtcctctccagataagtggatctgtctcgtgctccataagtaagttcatggacactaccttgacaccgttggctgcctcagctggtgttatgtttactccgtcatcagatgtaaccatgccatatagtccgtaagacctcggtatcgatggtcctgttagatccgcatcaagtatgccgaccttgtagcccttcatggcaagcgagtttgcaagtagtgttgttacatagctcttgccaacaccgcccttcgcgcttacaacgcctatcaccttttttatatttgatttatcatttgcttttaatttttcaaaagcacacttgtccttgcatgctttgcaatcgctatcgcagcccatcatatccctcctaaagtctatatgctatagatagaaaagctctcacaccgccctctatagcctcatcattaaattcatatgcctcatcgtgaatgtccttgtgatcttcgcccacgcctagtaggaagaataattccctcgccttacgcctgtagtagccgaagtcctcactgcttctgatgatatcttttctctcttcgaatggaagtccatccgcatcaatggctttaacaaagtcctcataaagctcttcatcgttcacgaccgacataaactcatccgtactctctaattctaccacaaaacccttctcttctaaaaactttttatacttatcttcaaaaatatttttaagttttgctaggtcatcatcattatatgctctcaaggttaagtcgagctccaaacttgctggcgaaacgccaaaattctctccgccaagctttacgccaacaacagttatgaaaatgttatcagagaatttttcgccttgaagagtaaaatctttgtaagcgtctctctttatgaatggctctatgtctttaataatctcgctgcaagcgtatatcggatttagcgaattttctggtatagacgcgtgcgactgcctaccaagtatatttacttttaagccaaatgacgataggaacaatagtcccttctttgtagatatagctgccgtcttgattccagcgtagttatgaagaccataagcttcagtaattttgtatttatcaaagatctcaagagccttaagtgctccataaccagtctcttcagccgcttgaaacaaaaagtaaacgttcttatcaagcttagatgcgtccatcgaaagtatagtgccaagcattatcgccatgtggccatcatgtccgcagccgtgaaagcgctccttcttactatttacaatgctgtccatatcacagcgcaatactattgacttcttgtcatcacccttaaagtatctataaagcaaataagatttatcttccacaagctcaagaccattgacaccacttaaaacatctttaataaaagccctagtcctatcctctttaaaagcctcctcgggcatcttgtgaagctcttttctaaaacgaataaacttttctatatccattatctatttatagacgcagccataagtttaaatgtgtgtctatctcctcttaaggttcttgaaagttcaaaaatgttttcgcaaatggcaaggccaccgtaaccagagtcgcctatatgctgaatgtcagcgcctaaaattttatttctaagtgcaatgtccctaatgacttcctttggcgaactttcttgcgaagtgccgatggtagtcatcacaagagcaccgtttctgtgagcaagctctacgatagctcttacatcttcatcgaaaacgcctggacatgtgccaacagctggaacagaaagaacgtcagcgcccgcatctaagaagcctttgtaaacatcaaggtctgcaattttctcatcaacacccgatgaatgcatcttgccagcaaagataagtccgtggaaatattttttcgcaagctttatcgcctcgttaatgccctcgttgtcaacgccagtaccagggtttccagtaaacataacgaagtcgaatcccatctcatcaagctttttaatattttcttcgcttgcctttctgccatcactaattgctttcttttcgctaaacatattcttgtcttgaactggttctagatttactccgataggtctcttgacaagatttttaagctttttaatgatgcccacgccgctataatcaaggcccttaattttcttttcattcacatcaaaaaagttaagcagaattaagtcagcgccaaaagccttagcaagctcagacgatgtcacgccataagtcgcaggctcttgaaccacaacattctcagacaaaacaatccttgcttcacaagacttaatcgcttgtttcaattcatctttatttaaattaatgatctcgtcgccactaagatcaaaaaatctctttagcatataatcacctcttgtatatatgtacccatttagataataaaataggtgaagatttctctccacctatagtcaatttattaagctacgacttttctttctaaatatatagtctctacattatttaatttattcataatgtccttgtcatgtgtaatcattataattatcttgccattatcatatagatccgatataagctttgcaattgcttctttattctcaaggtctaagaagtttgttggttcgtctataatatacacgcttttatctgttagtagtgataaatcaaattgagccttttttctttgtcctgatgacatcttagctttgtcctcaagcacgccaaactttgatatcaagtaatctgctggtatataaactatgtctgagtatgaaagatcttttacttcttcaccgttaatatatatcttgccattatatctcttgttataattaagtattgcctcgactatggttgttttcccagtaccattgtccccgcagataatattgatatgtgacgcatcaaaagaagtgtttactttttcgttcaaaatcgtatcatctttacttaaacactcaaaatcttttagttcaatagtttttattttatcatctttatacttagctgcttctatctctaaaaattccgcaaaattattgatagctggtttatcgcttaaatactcatttcttatatcaaatagctcttgcactggtccccaaaattgtgaaacatagagctgtgaagcaaagaatgcacctatacttatactgccattaaatacaaagtagcctgatagtatagtcatcataagtatgacaccatttaaaataaaatatatcatccagttttcaactaaggattgtaatttaaattttttaaacaaagtgttcttatacttttccaaataatcttttatattaaagagctgcttcttatctaaaagcctttctgacttgtttatctcgtacttatccagaatgtaaccattgatattttgtgtgttttgaatattttcttcagaataatcagaaatcttatctcctaacttgtatgaaacgtaagcacctaccggcacgcttataagcatgacaaaagcaagtgttaccgatatagtaagcataatcacaaagatgcagatcatagtgataaattgaaagactacattgactggtgtcttgaatatgtatttactcacagcatcaaggttatgtgtaatctcttgattaattttgtcacggctaatattattagttttgagattgtatcttaaaagattgtcatcaagcttttcatagatattaatggtcgagcgagtacttgcctctccctcaatgatgtcaaaaaagtacataactccctgtcctgccacaaataaaactatattgtatatagcatataaaatcattttatcaaagtccttagcaactgatgcgtctataaatatacctgatagatatggacttaaaagaaaagttattttatatagtatgtatatgataatgtagctaaagaagtctttattggaaacatattttcttaacttccacatagtttatcacccccctatattatatatataatatcatgtccttagatagagtgcaatacctttattattcaagaaaataggtgaagatttctctccacctaaataaactatttacttctttacttctttgtatatcaaataaagtagtactatctgtataatttctggtattataacgaacaatattgtattagctaaattaacgcctgcttgtgctccattcataactatgcccccttcttttctctcaacgccgcatatattttgtatagcaagactaattttgccactacaaaaacaatccttaatatattattgaagctaaacaacaatatattttttgataataaatatatcatgagtaaattattcataagagactcctttcttaaacttttatccgagacttctttatatcttactttaattatacatcatcaatcatttttttaagtgcttaagtacttatttctcttgataaagcaagtgattgttaaaaaaacgccaagataagctcagcgtcattatgtaaagagtagaacttgtctactctcgtaaatatcttagattgtgcctactaggtccatgcctggagtaagtgtgtcttcgcctggcatccagtttgctgggcaaactttgtcgccgtgctcattaacaaatttagaagcttctagctttcttagtaattccttagggcttctgcctatgcccatatcgtggatctcatatgcagttataactccgtctggattgattacaaatgatcctctgtaagcttgtccttcttcttcgtttaaaactcctaacattctagaaagttcaaatgctctgtcagcaatcataacgtatttagcttttgaaactgctggagatgtcttttgccactccatgtgaacaaattcagagtcagttgaaactgaatatacttcgcaaccagccttcttaaagttttcatattcttcagcaagtgcttctagttctgttgggcatacaaatgtaaagtctcctgggtagaagaaaagtacgctccagtgacccttaaggtcttcgtttgttacttggaagaagtccttacctgcttgaaatgcatttaccttaaattcatctaattttttacctattaaatttgtcatttttacctcctttattaagcttctttcgctcagttcatatatacccaaagcacatagataaataacaaaaaatcctatattaatttcaccaattatatggtaaaatatatttaatacaaaggaggcgcaaacaatgattaagctaagtgactatagaaacaagtatttgttactgtacttgtatgcaatatttttatttattacgggcttcgtctttaatacacctgatgaaattgtttatggcttaaaagtcatctctgtttcatctgcatcactagttacagactatatgaagcttgcaaatatcggtgctgcccttgtaaataattctatcataactttgttttccattatgatacttaatattaagaaagtcgacctaaaaggtatacatatagcaggcatctttgtagtatcaggcttctcactatttggtaagaatgtactaaactctctaccgcttatgctgggtgtcatagcatatacaaaacagtacaatattaagttcgaagacaatattgcaaatgcgctttttgttacatcgcttgcgccaatggttacaaatgtctacctactagttggcggctccttaggagttatctctgcctttgcagtaggctttttagtcggctttatattcacgccgctactaaaaccatttaaggccttccacaaaggctttaacctttacaatggcggcttcactgcaggcatcatcgccatgttctactcgggctttctaaagaccattaacataaacttgccacaaaagagcatagtcttaaagggctacaacgacaagttctttccgctactaatgtcgatgttcatattcttcatagtgcttggactttgcgaaaaagatgcgcttaaaaactacttcaaactgcttaagaggactggactacttctgcaaaattacgaagcagagtttggtaatggagcttgccttataaacgcaggaacgcttggtatagtctcaacgctttatgtcttgctcgttggaggagagttaaatggacccatcataggtggcatactaacaatcatcggcttctcattcattggtaaggacataagaaacgcactgccgatattcctaggcatatacgccgcgagcctaattaatatgtacaacccacacgacacggcgctactacttgcaagtctcttcggtacaacactttgcccgatatcaaactactacggaagcctcgcaggcttcttggcaggcttcttgcacatggcgcttataaacaacgtaggtggtctgcactcaggactgaacctttataacaatggcttctcaggcggctttatcgctgcatttatggtgccactactagatacattttataaaaggccaaagtacttgcaaggagaaaaagaaatctaatatatacttacacataaaagaagcaggtgcactaatgatgtgcatctgcttttgtattaagcttatctatttaattcttatcaaatttttattctttatctcatatactttatcggcaattttttctatgctctcattatgagaaactaaaattactgttttatctttagtaaaatcttttatgcaatctatgactagctccgaattatttttatctatataattaagcggttcatcaaagataaatacttttcctgtgctttgaaatgctctttcaagctctataagcttcttctctccaccagacagattattcatgcttgaagaaagaactgtatctaagctaagattgtttttctctaggagcttgattatctttgtatctgtatcaacacttttatttgaaaacatattgatattttcttctatagtcccatggaatatatctgccttatcaggaactagcctgatcatcttatttaataaatttgcttctttattgattttcgctccatttagatatatctctccagtataatcagtctcaagacctgatacaactctaagtaggcttgtcttgcctgaaccattgcttccctttatcagtatcttctcgcctttttttatctctaaattaatcttatctaaaataagttcattgtattctatggataaatcttttagctctagtctttcaaaatcttttgcatcctcatctataagtttgctttcaaaattaattacgctagctaatctttctttgtgcatttcatacaaggacttctctcttggatatgacatgtaaaactctatcgggttccaaagctttgagacatattggctaaataaaatcaaagttcctatactgactgagcctttaaaaactaaaaagccgccgaaaatgtatatgattagatcaagcacgtttaaaaggccatttgacataaagtaatcataaactatatcaatcttaagtctttcaaaaactttttctaaatatttatctaggcccgcttcattttttataattgtatcttcacttgaattaaatgcttttatagtgtaattataattataaaactcttcgatattgccattgagcttttcatttgcttcttctatcgctttgttaactacagcttctttctcgctcatcttgttttgtatgaagtaaaatattggtagtattataagtatagatgcacttaaaagggcgttttctcttagcataagcaaaataatcaaaactaggtaaatgcctttaacaattcttttgtacggtatttcaattataaagcttctaatgccttcaacatctgagttaaaaagctgtataatagatcctaaagatttgctctttaaattatttaaactttcaaagccaagataattgtaaaacttgcttctaagccttcttaattccttctcttcataataaatcatgaagtaatatgaaagagctaatgtgcttatgaaggctaatatcaaaacacaaaatattatggcgttaaatttgaacaaagtataatctttatcactaactgtatcgactatccttttaatatagatgggcagcgcaagtgatatgagcatattcatgctttgaaatatgtaatataaatatttaagaagtttattatttttcttcatataaatcacctcttactgtgaactaatttaattatataccttgaaggtaattttatcaagattagcacaaaaaaaagataagctccattgaacttatcttataatctatcttccgccatagaatttcatctttattaatctagctaggcttgttggaacaactttttcgtctgtaccaagtatcatggtaagtgcgtgctgattagctatgccgttttttgtgaactgtatcgagcagcttgcgcaatatgttgtgaccatgctctcataattttttagtctatctaagaaggctttcgctatctcgggttcgcccttgcttgcaagtcctcctaggccgcagcataaaacgtctttgtagtcacttttggcgtttggcataaaatattttaaatctttaaacatctctttgtgaactttgtctggacaagggtggtagatgtgaaactcatcttctaaaaccttgcctacgcctagctcataaagcttttcatatatcgttataacgtttatgtctgtataatctttaaaaaagtggtagcagtttgggcagcatgtaacgactctcttcacttttttcttaagtagaagcattttgacgtggtcaatgttattttgcgctctgtccttgtcgccactctcaaagactggcttaccacagcagtcgattgagtaatcgcatccatcttctctaaatatctctatcatcttcttagttgtttctggaaaagctctcggaaaagcgcagccaagccataagagatcctttgttttcttattggagttgtttctaaatttatatagggacttctcaaacttcatcattccgaagccctcattttttctatgtataagtgagatctctctgccatctaaatcaacgggacagacctcgtagcagcgtccgcataaaaagcatgagtaggctaagtcatctctagatgcgaaatctgctaagtcaaggccatacttcgttagaaaatcacagttttgcgtacatagtgagcagtcgaggcaggtctctttgacatattctaaataatttttcttatcatctttcatctctgtatctccttgtgatctcttcaatcgggtagcctagtaagaacataaattttaattttttcattagtattatggtcctaagtatacccatctgttcaaagcgtcttgcgtctgtcgtaaggtatgagtctatagcctttatctttgttccttcttttttgagttttctggacatatcatagtcttccataagaggaatctctttaaacatgcccatttggataaatttttcgcgtctaaatgacatggcttgatcaccgtaagcaatattatatagctttagtctcacatttgatctaaaggcaacgagcttcatcaaaagcttcttgctagtgaagcgtatcttaatggctgcggcgctgtatttatcaagcgccttatccatcttgactatggcgtccttatccaagtacgaatccgcatgcaaaaacattattttgtcctctgtagtctctttaaagcctgtattcatctgtactgaacgtgatttttcgctgtgaactatcttaaatggaaattcattgtttagtttatgaagcacatcaagcgttttgtcaccgccatcagcgtatgctatatagaccttgaactcgccatctaagctataaagatgccttataaagcgctctatatttttttcttcattatatactggaactactattgctatcatgttttttattcatatactttgtaagcaagatggaaataattacaagagcgaccatgattaagactgcaatcaagaactctttggacttgtaatctttgatcttgtcgcctaggtttaagtaaacaagcgtgcctggcgctatacctacgaatgaaactatcaaatatttccaaaagcctatgtcagttagtggataagcgtagttaagtatattgtatggaatgattggtgtaagtcttactaagaatagtcctgaagcgatattggcgtcttttgaaaaatatctatcgtaagtttttttgctcacgtgcttgtgaaccatggcgctaacgaagtccctgccgatgtatcttgcaatcacaaacatgattgacatatttagaagtgctccaaccatggtcaagaggctgcccttcacaaagccgaataaggctgcagcaataagtgcaagcactggcactgggaagaaaaatactggaagcactgcaaaggctgccacgtataaaacttcagaaagctctcttctctcttcgataaaggccttgagctttgccataggcacgtactttataactagaacggagcctattattatgagtaataggctcagtatcttaattggatttatttgcttttttcttgtcattatatatcttgcctatcatgtaaactaaggcacttaaagcaactacacacactatagaaataaatatagtctttgtggagcctgctaaattgcctaagtatgagtaaacgatagttgcaggaagttgtccaaggcctgttgcaatgaaaaagtcccagaacttgattggtgtaagtcctgccgcgtaactaactatgtcgaatgaaacgaaaggtagtagtctgcagataagtattgagtttttgccgtatctttcgaaaaattcgtcaactttagcaagtcctgtcttagtcgtaatcttttcaacaacgtctctacctaatgttctagcgatgtagaagcatagtgcagctcctgccattgctgaccagaatgatagaagtgcgcccttccaccaaccaaagattgctgcgtttgaaagcgtgattaaaagtgctggtattggtgataagattgattgaagtatcattaaaaagaacgaaacgactgctgcataagcaccgtagcccctgattaactcgataactgcatcaagatttaaacttcctagctttgaaacaaaattgtttatagtagcatgaaagcttggcactacaaagtataataagactgttaataatataatggcaataagtactattttagatattgtttttttcttcattattattcctccaattgttgagattgattaagtcgtgaaatatattatcatcgagcttaagatgctttccttcaagcaaaatctcatctttgcttataaattcaacatttttaccatagtaattatataatagatcctccttagtgtcaatatcatcaatgactctaaggcatttaacgcgtgaactattataatttttaatagtttcatcaagtatcatagatttatctttaaagtcaatattgagcttgtcctttatatttacttttgacgcgactaatgagtagcctccatctgacgaagggttaaatacaaggtccgccttatcaagtgcatcgaaggcagcctttatatcgcacgcgtatatatcatatatatccgagccaatgatggcaaccttcttgtagctttgaagcgcagtatcgattgccagctccatcttctcaaagaggtttgcatcagcttgagatttgtacacttcatttggtaaaaattctttaagtatctctaccttctctataggcgtcgcatgaatctcaaggtcccactccttagacgctacatcactaataagtcttcttattagctttttgtgaaaagtcactatgtccttctttgaaaggaagccttcaaggcgcgtttttgtgtgtccctctataggcactcttgtaaatataataagtaaatttttcaattgatatctcctaaacaataaaaaagtgtaaagatttattctctacacttttcttatacccaaatagtattttttacttatcttaattcacttattaaatcaagtggcgtatccaaaacaatatccgcatccttcataagcatctcttttgtgcctacgccgcatgtgacgccaacagcaagcccagctactttacctagctctaaatctattagtgagtcgcctacaacggctacttcttttctacttagttcaaagtttttacaaaaagcatctaatgatgatggatctggtttatttggataaaaatcagctgctgctaaaaaatctatttcatcatatacgccaagcatctcaaaacttagttttgcttgcttaaagctatcagctgttatgacagctactttgatatcaagtttctttagcgcgtcaaaacattttttaacatcacacgtccccacaatcaattctggatgcttagctaagtaagctaaaaagaaatcacttatctctttatcaagagcttctttacttttgttaacatatttactaaatacttctgctaaatcagctatagtgcctgaggcaagtatagaattttctctaatactgcggtcttcattcactcctactacctgtcttatctctatcttatcagcttcactaagctcataataatcaaagagatcttctaagctaagtctccaaatgtcagtaaattttaaaagcgttccgtctttatcaaatattacgccttttatattatttttcatttgacatcttctccatcaaatcgccccagactttcatctcgtgctccttagtctttctattgaagaaaatgggattagtgtatccataaagattgccatcttcgtcccaaacatctactcttatccagtgataagcgctgtctatttcaatactgaacatcgactctttagccttttcatctttaacgcactcgccatcgattagacaagatatatgaagagctgatgaatgaaaattgttttcgagcaactccgctcttaggcttgctcttccagtgaagttttcattttctcttgctaagccattggcgctaagctttatctcttttgatctagtcacagacacttctccagccagcatcgcgtctttaagcgcttcggctgtgttctcttttgcgtaaactatggtttttggatctcctaagagcgatggataagctgagccctcatatttttcttctggaagtaagtgtgagtcgcttccacctatggatatgactctgtagccatcgttcaataagtagttccaagcttttatggcatctttgattgcctttttagatgtcatatacgtcgggtcgttgatcacttccataaatgtgattaagtcaagcggaaatgattttgcgtgaaaatcccatggcggcatacatggatggttcactgaaatcagtgagtagccctttgcctcttttattatccttacaagtgcttcttcgtcttcaatctcatatattgcatgctctgcaaatggcgttttttctgtaaataataagttgatgtgaccaaggctagatgttatctctatacccgggtaaacttttaagccctcatgctttggccatgtgtagtgatagacattgtgatccgtaggcacaaagaagtctagtccttgctttatcgccacatcattattggcttctctagacattttaccgtctgaatatatggtgtgagtgtggaagtccgccgcataaaaagttttcttaggtccatcgtccttcatctttatgctatcaaataaatttacttcattaaatctattttcttcactatctaaatctccttcataaatttcaagactgatatcatctgcgtcacacatatttagaacgccatattcaagactccaaacgcccttagctatattaggcttaaagctttggcagcaaggcgaacagctagattggatagttgctatgtgcctttcgccgctatctttcgcagctattacctgtgcataaagcttattatctgggccgaaaacgtaggcgctaaaaaactgtttgttattgctccacttaattgttagggccttgatatctttatcaatagtgaaatttactacgtcataagccttatttaactttatatttaaaaatttctctctttgcatatatacctctcattaaaaaataagcgtctcatatagagacgcccaaattataatcttacttatttagtacttcatcaagtgctttttgagctactttttgtgcttcgtcaagtgcttccttagctggaacgttttgtaattcaactttatctgcagctatctttaaagcgtctatgatttgtcccttagtcgggtctacaaaaactggtgtagctgtaagtgcttgttcatatggtacctttgcatatggactttcttctataaacttcttgtactcttcgatatccatagtactctttctaacaggtatataaccaatcttcattgaccacttagcagatatttcaggacttgtgaagtatgctatccattcataagcagctttcttttgttcttctgatacagcttctggaactaataagctatgtgcgcctgcttgagctttaccatttttatcatgtaatgatggttgaggaattgagtcaatctttgtaaaatcaaggtcgcccttatcccctgatgaaccagtatagctcattgcagtaccattcataacgttatcgatagttctgtaccaatattcccagccttgtccgcctgattcaatcttagtagttttatcgtcaaaaatttgctttctaacaaagtcccaagcctcaacccattcaggcgagttgatagttactgtcttaccatcttctgacaagacagttccgccattgctataagcaatgtctgataggttatctgggccccacataactaggtgaccccagtcagctatgcctttttcttgcattgtctttgatgcttcaaaaactttgtcccaagatgagtatacatcttgaggatctaatccagctttttcaagtaaatcttttctatagtaaataacttgagttgtgccataagctgggaaggcatatactttgccatcgatttgatctggcttcatgaatacatctagataatcatcaagaggtgttctttcgtctatatatggtgttaagtcagccaatagacccgcttcacccatttctttaatcttgctacctatgaaaactgctggtgcttgattagctgcaatagctgcttgaaccttttgataagtttcgtcgtagtcggcttgttggacgcctgttacctttaccttgtcttgtgaattgttaaaatcattaataatttcttccatagtttctccagctacagagcctaatccataccagaattgaatttcaactggcttatcgctagctgtttcatctttcttttcttcgctcttcgactcatttgcttcagcgcttgtagtcttatctccttcgtccatagcttccttagcagctggtgaacatgctgtaaatactagtgataatactaaaagtattacagctaaacttcttaattttttcatttttttcctcctataatgataattttagccttttatgccgttgtcactgatgcctttgataaaccacttttgtaatactaaaaataatattaacagcggaagtaccgcaatcgcattagctgccatgagcataggtaggttttgagtgaaatttcctcttgaattaaagaatatatttaaaccaacgcttattagataattctttttgctgttagttataagtgatggccacatgtagttattgtacatcgccacgaactgaattaaagcagttgtaagtattgtagactttgctactggtaccaaaactctccaaagaatctgccagttatttgctccgtccatctcagccgcttcgataagctcctttggtatggatgaaaatgtttgataaatcatatatatggcaaagacgctcgccgcgtttgatattacgataccagtaagtgtatctattaaattcatcttagcaagtattacatagctcggtacataagtcgccgcagctggcagcatatacgttaatagtattgccccaaataaaactttctttcccttgaacttaaagcgtgacaagccatatcccatgagtatagaagttagcatttgaagtacaactatcgcgatggatgtgattatactgttaaaaatatataggtcaaatggtgcttgctctaaaactcctctaaaatttcttaagtcaaagaattctggagctaatttcatcggctctctgattatgctttccgcactcttaaatgagtttgagaacatccataaaagtgggaagaaggtaatgatacttactattgtaactattattatatttactgatttaatttgttttttcatctttatcacctatttgcgaacttcttttgcaagataaacataagtccagcgagtataccagtaatgacgaccataatcatggttaccgttgtcgccttccccatgttgaattgctcgaaggccatttgatagaataaataaagcagtgttcttgttgatcctgctgggccgccacgtgttagtacactgatttggtcgtaggcttgtattgagttaattaggcttataaccgctaagaacagtgttgtctttgctgtcatcggcatatagatgtactttatcttttgccaaacacttgagccctcaagctcatatgcttcgaataaatcctttggtatcttgctgatagcgtctgcgtaataaagcatgcaccagcccgatgtcttccatacggttactatcattacagcgatgagcgctgtgtttgagtctgttaaccagtttggtccacttatgccaaaaatagctagccctctattgataaggccgatatctggtctaaacatccagctccatactatagacatagcaaccatcggtgtaatccatggtgcgaataaaaagccttgtataagctctttgccgcgtctaaacttatctatgagtattgccatcaaaaaaccaaagataagtgtcggaactactgttcctagaccgaataacaaagtatttttaagtgcttgccaaaaggcatcactactaagtatgtccttgtagttttgtgcgccaactacattaaatgtcgggctgacatagtcccaatctgtaaaacttagtaagaatgacgctatcattgggatgaaccaaaacaccaaaatcggtattagtggcaaaactatatagacaagaaagcctgaaaagcttatactttttattccacgaactctttttgctttgcttttatcttttgctttgcttacttctctacttagctccatctattgcctcccagaaaattctgttttctgtcttagcatcaaatagcaagatattttctgtcacaaaagcaatatgtatttcgctttttgacacgatatcaagctttgcatctactctaagagttatctcatctccatctagctcgccatgtatatggtaatctgctcctaatagctctaccatcttaatctttaatgctaagtcatcttcattatcagtaattctaatgtgctcaggcctaatgcccatgattacatctttattgtcaactttagaataatttgcaagagcccttcctttgctattataaagttttccgtatctaatttttcctttgataaaattcattggcggtgctcctaaaaagcccgcaacaaagacattgctagggttttcataaagctcctttggagtgccaacttgttgaatcacgccatcttttaaacaaactatccttgtagccatagtcatagcctctgtttgatcgtgagttacgtatataacagttgatcccagctccctttgtagctcaacaagctcttctctcatgtgtattctaagcttagcatcaaggttcgatagcggctcatccattaaaaagatttcagcgtctctaactatggccctgcctaaagctaccctttgcttttgtccgcctgatagctcaaacggctttctctttaggtactcagttaagccaagcttttccgcagtttctctaatacttttatctctaatatccttgtcaacgccacgaatctttagcccaaagccaatattgtcataaacatttaagtgtgggtatagagcataattttgaaagaccattgcggtgcctctgtcttttggcgctacctcgttcattctcttgccatcgattagtagctcaccttcactaatatcttcaagtccagctatcatcctaagtgttgtagacttgccgcagcctgatggtccaacaaagactatgaactctttgtcttctacttcaagattaaagtctttaacagcgttatcgattccattctcatactttttatatacatgtcttaaagaaatcttactcatacatcctcctaaataattttcatatctcaattacttgtttataatacatgagctttgttaatgttgtatgtgcaatatgttaagtgtgagtaaagtatttggtttttatttaatataattttacaaagaaataccctccttactcattcatcaagtaaagagggcgcatataaaaaattcccacaaaaaaagagcgatcgctcgctcttcttcattcaatagattaaatactattcagttactaaatcgtattggaaatctttaacgcctgctgcgttaactacgtcagtgtagcctgctgctaaaagagcgtcttgagcttgtccggattttttaccagagttgcaatataaaacgatctttttgtctttttcagcatctagaactgatggatcattcttaatatcatctaaaggaatgttctttgcatctttgatgtgacctgcagcatattcgtcagcgcttctaacgtcgacgataacgtatttgccttcttgttcagcatcagcttgtaatgctactacttcgtcaccagtcatagttgctttttctcctgtttgaacgctatcagcttgttctgctggtacgctttctgttccttctgcagctggttcagctggtttttcttctgctttcttgcatgctactagtgaaaatgctaatacaagcactaaagctaatgataataattttttcatgtgtatttacctccttaaatttttaccatagctattataccacttttaagcataaatgtacaataaatttattttatattagtattcactaaattttactactttagtagtaatgcactcgccatacagctaacgccctcttcccttccttcgtagccaagcttctctgttgtagtggccttcacgctcactctgtccacacttagctcaagatctttcgcaatatttgccctcatctcatcgatgtgtggtcttagcttaggcctttgcatcattatagtcgcgtctatgtttgatatacagtatccttctttcttgaccatctcgtatacccttctaagaagcactctcgagtcgatgtcaaggtagtcgtcgctcgtatctgggaagtggtagcctatgtcttccttcgccatggcacccaagattgcatccatgatggcgtgtatcagtacgtcagcatcgctgtggcctagtagacccttctcatgctctatcttaactccgcctagtataaggtctctgccttcaactagtttatgaacatcataaccgttaccaattcttatatccattagaatactcctgtgcttttaagcttttgctcccaattcgtattgaagatctccgctatgactaagtcttctggtgtagttatcttgatgttatcgtagtggccttcaagcatctttacttcaactccagcaaactcaacaagtgccgaatcatctgtcgcaagtatcttctcctttatggcgtgctcgtagcccttaagcaagatctctttcttgaagcattgcggactttgtgcctgccacaaaagcgacctcttaggtgtgtggtgaactgtgtcatcctcgttaactgatttgatcgtgtccttaaccttaactccaacaacgcaggcgtcgcagtttagcactgtctctacagccttgtttatggtatctgttcttataaaaggtctcgctccatcatgtgttaggacaatgtcagcatttatgttaatagctttgataccgttgtatactgaatcctgtctttcttttccacctttaactatgttcacgacttttgtaaatttatatctgttcacaatttcttttcttgtgtaatctatctcgtcttctttgcagacaataattatctcgtcaatgtactttgatctttcaaatttctctacagtatgagcaagtataggcttgtcgtttatacgcaagaaggccttgttgaccttggatcccatcctgttactcatgcctgcagcagctataatgaccgagacaaatttattctctatcataaatatcctccaactactctttaattttggcaaacatcatcttgcctgcagctgtttgaagcactgttgtgatctcgactttaagcttttcgcctatcctcttctttgcttcttcaacaactatcatagtgccgtcagaaaggtaggcaaggccttggttcttctccttacctgctctaactatctcaacttcaagctcctcacttggaagtataaccggcttaaccgcgttagcaagctcgtttatatttaaaacttctatgcctctaacttgtgcaaccttgtttaggttgtagtcgttagtaagaacttttgcacccatcatggctgcaagttcaagtatcttgtcgtctatctcttcaactgtgtctatcttctcatttgaaacttctatatcaactctcgcttcattttgcatttgcttaagtatatcaagtccgcgtctacctctttttcttctttggtcgtctgcggagtctgctatgtgctgaagctcttgcaatacaaacttaggtattactagcgtgccttcgataaagcccgagctagcaatatctttgattctgccgtctataattacagacgtgtcaagtatcttgtagctagtttgttctttcttcttaggctttttaggcgtattctttggtataaacttctcgcctaagcttgatatgtcctttcttctagtcgcaactacaatccctatatatgggaagagtatatagaatataacagacaaaactggtccaagtactggtatacctatgttgatagcaagctgcgatagcaagaatgctataacaagtccaaatatcaaacctagtaagcctaaaataaggtccaaactagtgtaccttcttagctcaatctcaaccctgtcaccaacatttattagtttgtcaaatacagtatctgataataaataaaaaataattgcaaataaaacagataaaaataccgatacatagatactgtaattatgaaatgttggtacaaggctgatggctaataaactaacgccataacctgctgctgctcctataaggaacatgacagccttcataattttcttaaacattgttcctcctactctactgcctcgtagataattttgtcgatttcctcgtatgatttgccggaagagagtatcatctcactcatcaaaatgttttttgtgtcgtgaagtatcttcttctcgcctgtagagaggttcctttgctcatcaaggctctttaggttacgataaacttttgcaacttcgaagatgtctccttctttcaaaatcgcagtattgtccctaaccctcttgttccagttcgagctcatctctgtcggctcttgctttaatacttcaagcacatcttttaacttatctttgtcaatgatagatcttatccctcttttttcagcattcttgacaggtatcatcaccttcatagatcctataggtatcttaacaataaaatacttttctttctttcctaaaatgtctttctcttctatgtctacaataatgcctgctccatgcattggataacaaaccatatctcctacttcatacatacttctcgcctcccatatctatcgatgataatatcactctcatcgtatattatatcacaagggaggcaaaaagtaaagttttataatatcatattaaattatatttgtcaagccttttatagatatttttcttaaattgccaaaggcaattgcaaggttctggggtacccatccaacacgaagtgttgagatagggtcgggttcttcaaattcttagtgcatctattaaagaagagcacttgataagctctagcttgtcaaactttgcagatagctttgcctcgctgctaatgacagccttcttgtaacccatcctctctgcttccttaagtcttctctcaagctgcggcaccttctttagctcacctgtcaaggatatgtcagctatatatactgtctctgagcttaaaactttgttcacaagctgtgagtatatcgctgcaatcagtgcaaggttcgatgcatcctctcttagcttaagtccacccatggacttgataacgacgttcttgtcaaacatatcgacattaagtctcttctccatgatcgaaagcagtgtatttaatttctctctcgacatgttctcgcttatacgcgatggatatggtgtatatgacttcgtaactagtgcctcaacttcaagtataacaggtcttgtgccttccatgtttacagtgatggcactgcctggaaaattgttttccttccttgaagaaacaaagtactcactcgggttatctatagatacaagacccttctcttgcatgttcataaagcccatctcgcctgttgctccgtaacggttcttgcttgcaactatggttcttaaactatcgttttgataagtgtccataactagtaccgtatcaacaaggtgctctaaggttctcacgcctcttagctcatcatcttttgtcatctgtccaactataaagactatgcgcggtctttgtatgttctttgcaaggtttactagctcataggcgcactcaactgtctgagttggtgatgctggtctcgatggcttgtactcatcaagctccactgtttgtatcgagtcaacaactaccatgtcggcgtcgactctaaggacttcttccttgatattgtcaagcgatgtatcactaatgatgtatagctcgtcctcaatcttgtcaagtatcctgtccgccctttgcttaatctggctctctgactcttcacccgatgcgtatagtactttgagtcccttcttgcacgcgtcgtttgctatttgcaaaagtagtgtactcttacctgcgcccggctttgctgtaactatggtaaccgagtccttaactatgccctcgcccataactctgttaaactcttcaaagctagtttttagcctgtctgagtttgacgaagtgacagtctttagctgcatagccaatgcccgtgcacctttttccttctttacttgcttttttgtatcttccaagacttccttaaggctgccccaagcaccgcactcggggcacttgcctaaatagccgctggattcgtagccgcattcgctacacttgtacaagctcttcttctttgccatttttaaattccaattccttaccattgtagtagatagtgatgctcttgtccttagaaacgttgtttttcaaaatttcttcagacaatctgtcctctatcatcttcttaaatgttctctctaaaggtcttgcaccatattcaaggtcaaagcccttctttgcgatctcgtcttcaactgacttatcaatctcaatatctatgcccatctcgtgaagctttgcctttaggtcttccgccatcaagtgaacaatcctctctatatccttttcttttaactgattaaatacaacaatgtcgtcgactctgtttaaaaactctggtctaaatgtcttctttagctcttcgtttgcaatctcagaaattttcttcttctcgctcttttcttcgctcgatgcatcgccgaagccgtaagtgttttgctttttgaatctacttgcgccaacattgcttgtcatgatgatgacagcgttcttgaagtcaacagttctgcccttggagtcagttagtctaccatcgtctagaagctgtaaaagtgcgttgaaaacatctggatgtgccttctctatctcatcaaataaaactactgagaatggcttctttctaatagcttcagttagctgtccaccttcttcgtatccaacgtagcctggtggcgaacctataagcttagatacgctgtacttctccatatactcactcatgtctatacgtatcatagcactttcgtcgttaaataagctctctgcaagtgccttggcaaggtaagtcttacctacaccagttggtccaacgaagataaagctgcctataggcttgttcttgtcctttaaaccaaccctcgccctcttaatcgagtgactaagtacgtcgatggcctcgtcttgacctataaccttagatttcaaactcatatcaagcttaagaagcttttccttttcctcttcgctaagcttttcaacaggtatgccagtccacttcgatacaactctagctatgtcatcaaagcctatcttcatgctgttgagctcggacttttgcttccactcagtcctatctaggtccatcttgtccttaagctcgcgctccttgtctctgagctgagctgctctttcgaagtcttgcgcctgtatcgcctgaatcttttcagatgaaatctccttaagttcgtcctctatctccttaagtgacagtggccttacatagtttttcatcctcacaagcgattgtgcctcatctattaggtctatggccttgtcaggtaagaacctatctgatataaatctttttgataatgtaacagctgcctctatggcttcgcgtgatatcaagactctgtgatgcgcttcgtacttatccttaagtccttctataatcttaattgcgtcttcctcgctaggctcttcaactaagatagtttgtagtcttctctcaagagctgcgtccttctcaacatattttctgtactcatcaacagtagttgcaccaataatttgtatctcgcctcttgtaaggtatggctttaagatgtttgatgcgtcaagcgagccttcagatgaacccgcgcctactatagtatgaatttcatctatgaataagattacatcgtttctttgtctaagctcctcgagcaagttcttaattctgctttcaaactcgcccctgtactttgagccagctataaggctagttaagtcaagggagaatatctttttatccctgatgatctcaggaacattgcctgaaactatcctttgtgctaaaccttcggcgatggctgtcttgccgactccaggctcacctataagcacaggattattcttagtccttctcataagtatttgaataagcctttcaatctcagatgctctgccgacaacagggtctatcttgtccttcttcgcaagctcatttaagtccaaagtaaacctttgtagagcctctccatcgtccgcaccttcgtcatcgtagtcgtcacgctcttggtagccgccttggttaagctctcttaaactgtttagatatgcatttagagcagaaagtatcctctctttatctacgccgaacctctccaagaggatggaaaccggcgcttcgttcatcttcactatagaatataagatgtgctcagtagttacaacaggcgcgccagcttggttcgccatcttgatcgactcctcgatcacatattttaaacttgcagagtaataaatttcctccgactttttaacatcaagcaccgatagtttttcaaccatctccctaagagcttccatctcaagaccattctggcttaaaatttcagacgccttagtagtgtttgcgcttaaaattccgattagaacgtgagaagggtcaacttcgcttttgaacatccttctggcttcttcctcggctatttgaaatgagaatcttgcatttctagtaaatcttccaaaaactgccatatttatctcctttctttatctataaatcattactttcttcattattttcttcttcgttaatatcctcgttaatgtctttgtctacgaatttcaccttgcccagcttctccttaagaatgctcgctctcttttggtcaatttccgacttgtcgctaagagagtatgtgtactcaatcgcttcagggcttatcattaggtagatattagagccaagagatatatcagctggctcaagtagtcccatgctccttgcaaacattaggttcgataagtaaataagagcttcctcgtaagtaataaggctcgcaaccttaatcatctccaaggccttcattatcctgtccttcatcaagatgaagttttgatgaaggtatctacgcctgttttcattctcataaacaatgatattttggtcagttagcatggaaagcttcttaaaggactcaatgctcgtaaacttgttgatgtttgcgtccaagatgtagatatcctctaccttaatgcctcctaaagacttaagaggtgtaagcctaatcttcgaaaaatcgccagtttttatctcgtcctttttgaactcatcccttctgtataggtggataatcttggcaatgctgatgccgttacctatattgacagggtcacttgtaaggtagccgtagttttcgtcgaattggaagtctatagtcttatcaagttcgcgttcaatctctatggctatgtcgatgagctcgtcagcactttcacttccaagcactctaatctctatgtgatcgttattatttatcactatggcgatggacttgtcctcgtcaagcaaaagcttagtcctcgtgatgttctctcttaccgactcatccataaaacccttggctaaaaagtattcgaacttatccttatccatattcgaaacttcgtagagcataaagctgtagctcgtgttctttaaagcttccaaaaccatgtttaaaatctcgttaagcttagaccacatcagcatgtcagggtacttgtaaccctcgacgttcctctttagagaaactatggtctcaagtatatatttattgtaaatgttcacttctctgtccatcttccaccttctccttcgtggactttgccttgatttcatccctaagctcagccgctctttcataattttcatctccaatggcagcctctagctcctttttaagctccaaaatctcagagtgcataggattagcatccatatacctctttggcaccagaccctcgtaagtgttctcgccccttagagagtttagtattggcctaatttcgtaggcaaaagtcttgtagcactcctcacaaccaagctttctggacttgttaaagtcagtaaacttcatatggcagtttggacactccttctcctctatctccccagcttcaaaagagccgaagagctgttgcaagccctcgaaaagattccttatatcactttcatttatattcaaattcatatattcaccattggccccttgattcatttcgttaaaatccctaagtgcacactcagtgcataggtgcttttcaataacttctccgtcaagaattagctttagattgatcatcgcttcattcttgtggcattcatcgcataacattttactaccccctttttagtagaacaagtaagatgttcttaagtatgtcgcttctaagtgcgtttcttttgtctatatcaacagttaaggctctgtcatcaatagaagcaagtattatctccttctcctcttttgtaatgatctcgtcatcacaaagctttttgataatgtcatgtgcctctttgatggtaatcttgtctccgattgcatccatgagtatctctttgtactcgtcctcgtcctctaaaagatcgagtttctcaatcttgatatagcctccctcgccccttctcgattgaatgtagtaaccgaagtgaggcgcaaacctcgtcgttaagacatagttgatttgactaggcgagcaattgaaccttatagcgatgtcgtttcgcttgataaggatgctgccgccctcttcatcaagtaaattgtttaaaaaatattgtatttcatcacttaacatattctcacctttgaccttctttgactattataacataagtacccttatgttgcaatggataaacattaagtgttaattatttgtataaatttatcagaattgagtatagggcttgttcgagtgaggtaaaagaaaaacacatgagtattaacccatgtgtctctctaagagaaaaagaaccacacccaccaacgaagctaaagcatacactaaataagaaagacgtaccctaatcagtacgtcctccttaagagaataagaacctgacccttgcacaacgcttcgcgttggcagggaaccccagaaccttgcaattgccttcggcaatttaaaatagaaaaaatattgcaaagaaaaacacacaagtaaaacttgtgtgtttctctaagagaataaatatgaaaaaatatattatttgtgtatgcttttttagcttcgggtgggtcccgtgaaccttgccatcgcttacagcgatgtaaaacatgaaaaatatattaaatattatttgtgtatattcaatttattataaagtttttcttcttattcatcatcgcctccggcgatgtaagagaataagaacccgaccctatctcaacgcttcgcgttggatgggtgccccggaaccttgccatcgctttcagcgatgtaaaatagaagaaccccgtccttgcggacgtgaaccttgacactccgttcttgaaaaaatatattatttgtgtatattcaatttattataaagtttttcttcttattcgtaccactgcctctggcagtggaagagaataagaaccccgtccttacggacgtgaaccttgccatcgcttgcagcgatgtaaaatagaagaaccccgtccttgcggacgtgaaccttgacactccgttcttgaaaaaatataagaacctcacccacttacgaagcagagcttcgagtgggtcccgagaaccttgcaattgccttcggcagtataagaaccacacccaatgacgacgctaaagcgtctattgggtcccgtgaaccttgcaattgccttcggcaatttaattatttgtgtatattcttgtttattatttatttttttctgcgtttgctgcttctattatcttattggcttggtcttgtggcacttcttcgtatctaatgaagtccatttggaaggatcctctcgcttgtgtcatcgctcttaggtcgattgcgtatctaaacatttctgaatgtggcacttctgctgtgattacttgtgtgccgtcatcttgtgaatctatacctaagattctgcctctacgcttgttcatgtcgcccataacgtcgcctaggtagctttctggcactttaatttctgccttaactataggctcaagaaggattggttttgcttcttgcatacctttcttaaatgctaattgtgcagcgatcttaaacgccatttcgtttgagtcaacgtcgtggtatgaaccatcatatagtgtcgctttcacatgtactactgggtagcctgctaatacaccgtgttcaagtgactctctaagtcccttttcaactgctgggaagaagttctttggtactgcgccgccgaatacttcttcttggaagacgaagtcgtcgccatcgtttggctcaaatcttacccaaacgtcgccgtattgaccagcaccacctgattgtttcttgtgcttaccttgaacttcagccttttgcctgatagtttctctgtaagcaatcttagggtcgtcaagctcaatctcaacgccgaatgtgtttttcaatttatctttaataactgttaattgcatgttaccttgaccgccgattaaaagctctttagtctcatgatttcttaaaacttcaaatgttgggtcttctgcagtcatcttgttaagtgaaacgcctatcttttcgtcttcgccttgttttacaggtcttactgacatatatagagttggctttggatacctaattctctcgaatataacaggattagctttgtcacatagcgtatcgccagtacgagcgtgttcaagtttacttgtagcaccgatatctcctgcggtgatggtttcagtatcgatttgagtcttacctcttaagtagaataagcctccaagcttttcttctacttcttgacttgcattgtataattgtgttgattttgtaagcttaccagatataactttgaatagcgataactttcctacgaatgggtcaactatagtcttgaaaacaactgctgagaatggttcatttgcatcaacctttctcacttcttctttatctttccatgtgccagtgtatgcgcctacttcgtttggagcagggaaatacctttgtatcttatgaagaagtagctccatgcctatgcctttttcaacgctacctaccataagtatagttaattcgccgtttctaactgcttgctttataccttctttaaattcagcatcagtaaatttttcgcctgcaaagaatttttccataagctcttcggatgtttcagcaactacttcgtttaactcacctctaagcttttcgatatagccatcccactcagctggaacaggaatttcagttctctttctgttttcatagctatatgccttgtcttgaattaagtcaaccatacccttaaagccttcagcttcgcctataggcataactagtggaactatgtggccaccaagttttgttttgatctcttctaaaacttcgtcaaacttaacattttccttgtccatcttatttaagaaaatgaatcttggagtgtgatatttgtttaagttcttccaagctttttcagttcctacttctacgcctgcttgtgcgtcaattacaagtatagaaccttctgacgctctctttgcaccatacatctcgccaatgaagtcgaagtaacctggtgtatcaaggaaattgtatttaacatcattatattctacaggaataaccttagtgttaatagaaacttttctttgtttctcttctatagagaagtctccaacagtgtttccgtcttcaaccttgcccatccttgagatggcgcctgttgcgtataaaagtgactctactaacatagttttaccactactactgtgtcccaaaagggatacgtttctgattttgcttgcatcgtaagctttcatattatttcctcctcatgtataatatagttgttttatcaatttactttataaaagcgtcttgcataaaaaaatttagtgtgatggaaaagtcccctcacaaaaatattataacatatatagatattttttgcaataattttatcacgatgatatgttagaaaattcacagcaaaaaagaagagcctaaaactcttctttcatctcattatatactaagctgatagctttgtagaaaaagtccaaatcctcttcatcaaagtcaaattctgagctgtgatgcggccccttaaggtttgttccaagcattaggtgcaaagcaggaagtcccttcttcttaaaaacttttaggtagcgagtaacatcttcgctcgctccaaaactaggcattctgtgcgtcttaataccagattcgttaagctttttaatagctgcgtcaacaagttttgtgttctcttccttgtaagcattcgcccttgctattatatctatctcataagtctcgcccttggcttcgcagatgcactttgcagtcttctccaaggcttcaagcatctcatacatcgcctcatcactatcacttctaaggtccatacctaaggtgattttatccatgacagcgtttctctgaccaccaccattgataataccaatgtttatgaactttttgtgatgcgcatctatagcaaggtcctttgtcatatctatgaaggcaatagccatacttaaggcgcttataccttcttcaggagagtttgctgcgtgtgctgccttgccatgaaaagtaagatcaagctttgttgtcgctaagaaattgctggtacctacgcctatataacccttctgttcgcctaagcctatatgaaatgatagaaaacccttcacatcctccataatgaagtctgccatgcgtattgagcctccaacaccttcctcagccggttgaaataaaacgcgcacagactcgcctgtttcgctaaagtgctcgcataaggctagtgccaaggctatgtgtccatcgtggccgcaagcgtgcatattgtcattagtcgaggcaaagccaaacttgtttggaagatggcatgcatcttttgtctcctcaatcttgagtccatctatatctgctctaaataagaaataaggcgccttgccaaactccgccatcacaccagtgaagcccttctctatatcactcatatcgctcatagcgccatgttcatatatggctctgccataatatagcttgcagtttaaattctctagtatctttattatctctttagtcgttttcacctcatgaaagccaagctcgggtatcttgtgaaacttccttctatatgaaattatatccatcattatcacctactagcttaaatcttacaacaagaagcatcttttgtcaagcttgacaaagaccccccgcttgtagtaatatattcatattgaggtgtagatatgaaaaagaaatttattttatttatagcagctgctatgctgcttagctcattatttgtgagcgcatgtaaggagaaaaaggcatcttttactaaggatatgataaaggattggaacgtctctgaaggcaaggagcctaaggctgatgacatagacaacgactttatcaacgctttaaaagtttttatcaaagaaaacatcgaaaacaagaactacgaagcattctcagagatggttagtgatgaatacttaagagctgtagatgtactaaggaaggactacagaagtcacaataaagatttgcatgaagcacttaaggatgtaaagcttgaagtctctgatgttgaagcaaaacaagttgacgaagacgcgatagagtttagatacgcaattagctttaatggcacatcaaagcctcaaagcatatacatttataaggacaaagatgatgtctttaagttcgctccatctatatacgaacctgttataaaggagagagcagactttgataaggacgcacttaatataaacttcatctctgttggcaaggttactgacggcatggaagtcagagcaaagataatgagcactgaaaagtgggacagagaagttctaggcgcaactctatacacagacagaggtaagtacgaggctgcaaagttcaagctaaacatcaaaagtggcaagactgagcactcactgttctactttaagcatgcaaaaggaaagcttgaccgctttgaacttgtatacaaggcagaccacggtgagaataaaacacttacattcgatttgaagtaataaaaaatacatgcataatagaaagggtagtaagcaaaacttactaccctttcttgtgcgatgaatctataaatataaaactaaagtgcttagcacatgtgaaactatacttatataagtaaatcacttagagcataaaaaaagagagcctcacagctctctttaaattatatcttaattgtactaatcgatattattcgatgatttcagatacaactccggcacctactgttctaccgccttctctgatagcgaacttaagtcctttttcaatagcgataggtgtgataagttcgatgttaaatctagcgttatcaccaggcattaccatttctactccgtcttctagagtgatgttacctgttacgtcagtagttctgaagtagaattgtggtctataaccattgaagaatggagtatgacgtccaccttcttctttagttaaaacgtaaacttcagctttaaacttagtgtgtggtttgattgtcttaggtgcagcaagtacttgacctctttcgatttcgtctctttgaacacctcttagtaatagaccaacgttgtctccagcttcagcaaggtctagtagtttgtggaacatttcaacgcctgttacaactacgtctctgatttcagtagttaaaccaactagttcaactgtatctccaaccttaactgtacctctttctactctacctgtagcaactgtacctctaccagtgattgagaagatatcttctactggcattaggaatggttgatctgtagctctttctggttgaggaatgtattcgtcaacttcttccataagtttaacaatcttatctccccaagttccgtctggatcttctagagctttaagagctgaacctacaacgataggagtgttgtctccgtcgaagtcgtattcgttaagaagttctctaacttccatttcaactaattcgataagttctgggtcgtctacttggtcttccttgtttaggaatacaacgatctttggaacgccaacttgtctagcaagtaggatgtgctctcttgtttgaggcattggaccgtctgcagcagatactactaggatagcaccgtccatttgagcagcaccagtgatcatgttctttacatagtcagcgtggcctgggcagtcaacgtgagcgtagtgtctcttagctgtttcatattcaacgtgagaagtattgattgttatacctcttgctctttcttctggagccttgtcgatattcgcataatcaacgaattctcctgtaccgtttctcttgtttaatactaatgttatagctgctgttaatgttgttttaccgtggtcaacgtgaccaattgtaccaatgttaacatgtggttttgttctttcaaatttttgtttagccattttttacctcctataaaaattatttatttccaatgactttgtctaatatgctgcttggaactggatcgtagtgatcgaattgcatagagtagttagctctaccttgagtgttacttctaaggcttgttgcatatccaaacatttctgaaagtggaacgaaagctctaacgtgttgtgcaccgttatcaagttccataccttcaattctacctcttcttgagttcaagtctccgattacatctcccatgtattcttcaggagttgtaacttcaaccttcatcataggttcaagaagtgtaggtgatgccttcttaagtgcatcctttatagccatagatccggcaatcttaaatgccatttctgatgagtcgacttcgtggtatgaaccatcgtatagagtaacctttacgtcaagtactggatatcccgcaattgtacctgattgtagggcttcttgtataccttggtcaactggtccaatgtattcttttggaatagctccaccaacgatagcgttaacaaattcgtaacccttacctgctggttgaggttcgattttgattctagcgtgaccgtattgtccacgaccacctgattgcttaacatatttaccttcaccttcagcagaagacttgatagattctttgtaagcaacttgtggattaccaacgtttgcttcaactttgaactctcttaaaagtctgtctacgatgatttcaaggtgaagttcacccatacctgcgatgatagtttgacctgtttcttcatcagtatatgtcttaaatgttgggtcttcttcagcaagctttagtaaagcttgagtcatcttgtcttgagaagcctttgtctttggttctatcgctacagagataactggttctgggaattccatgttttctagaactataggcttgtcttcagcacatagtgtatcacctgtacctgtaagcttcaaacctactatagcaacgattgatcctgcgtaagcttcttctatttcttctctcttgtcagcgtgcattaatacgatacgtccgattctttctctcttacccttagtagagttgaatacataagaaccgctctttagaactccagagtagattcttgcgtaagcaagcttacctacgaatgggtctgtaacaatcttgaatgctagtgctgctagtggagcatcatctgctgatactctttcaactaattctccgtctctatctgtaccagtaactggtggtatatcgataggtgatggtagatagtctactatagcatcaagaaggaattgaacgcccttgttcttgtatgcactaccgcatagaacaggtgttacttggttagcaacgcattctcttcttaatacttgtttaatcatatcgttaggaacttcttcaccgccaaggtatagttccataacttcttcgtcgaaatcagcgatttcttcgatcatttcttctctatattttttagctgtatcaagtaaatcatctggaatatctgattcttgaatgatagttcctagatcatcttcatataattcagccttcattgcgattaagtctatgatacctttaaatgtatcttctttacctattggcaattgaacagctataggatgagcgtttaatctttctctcatcatctttagtgttctgtcaaagtttgcacctacaacgtccattttatttacaaatgcaagtctaggtacaccgtatttatccgcttgacgccatacagtctcgctttgaggttcaactccccccttagcgtcatataaagcaaccgcaccgtctagaactcttagggaacgttcaacttctactgtgaagtcaacgtggcccggtgtatctattatattgattctatgattcttccaatagcaagttgttgctgctgaaccgatagtgatacctctttcttgctcttgtaccatgaagtccatggtagcagcgccttcatgagtttcacctatcttgtgaatctttcctgtataataaagaattctctctgtagtggttgttttacctgcgtcaatatgcgccataataccgatgtttctgacatcttttagtgcaatttctcttggcacaagttttcccccttattattaatatctataatgtgcaaatgctttatttgcttcagccattctatgaacttcttctctcttcttaacagaagctccttgaccgttggctgcgtccatcaactcttttgctaatctttcagtcattgtcttttctcctcttgctctggagtattgtacaagccatcttattgctagagtttgtcttctttcaggtcttacttccaatggaacttggtagttggcaccaccaatacgtcttgccttaacttctagtactggcatgatgttattcatagccttgtagaagtgttcaagagcgtcttcacctgtcttttctgcaactatatcaaatgccccgtaaactatgctttgagctaagccttttttgccgtcaagcatgattgagtttattaattttgtaactactacatcattgtatcttgcgtcaggcattacttcacgtttaggcacgtgtcctcttcttggcactttttcttccctccttaactatattagtagattcattggtactcggcaaatctctaaaagccgtctagcgccaaaatgctcttcatctatttaatgctttgcatttcaacgactaaaatttctttacttcttttcttctttaggtttcttagaaccgtatttagacctactttgttttctgttttcaactccggcagtatcaagtgtacctctaattatgtggtaacgaacgccgggaaggtcttttactcttccacctcttataagaacaacactgtgctcttgtaagttgtgaccaattcctggaatgtaagctgaaacttcatatccgttaactagtctaactttagcaacttttcttagggcagagtttggcttcttaggtgtaactgtctttacagcaacacatactcctcttttttgtggagcatttactaaagattgtctcttcttaagtgagttataagttgtatctaaagctggtgatttagatttgtaaactacttttgatcttccttttctgatcaattgattaatcgttggcatcaaagcacctccttacataaaaatttattttaataaagcagcggcagctgcgtttatttcaataccacagagctttcctaactcttcttttgtgtttatataaacaacatcaacagagtttttacttgcttccttttcgataagtgacttaatgtccttatctgcatcaagagcgataaaaacctgtttgaatagatcggattttagccctcttattacctgtttaaacccaacaacactgctaggccccaaggtgtcggtatccattaagcatcctcctttagctctattaatagcgtgaactttcacacataaagaattgtaccacgcattacggaaaaagtcaagataattttagttaaatttaagtaaaatatcttgacagtctccgcttatatttaattgttaaatatactatttgtccttagaagacttcttttctttctcttcgcttagtaggtctttaatgatcttatctagctctgctctatctgaaacgtcgtttctttcttcactagtttcttcgtcttctttagtcttcttaggttccttttcatcttcatcaaagtctttgaacaagtcagtgtcatctatctctcttctctttctcttaagttcctcttccatttgcttctttaaaactgtttcgtcttctttaactttgatgtttctatatttaagcatacctgtacctgctggtatgatcttacctatgataacgttttccttaagtcctactagctcgtccttcttacctctgatagctgcttctgttaatactcttgttgtctcttggaatgaagctgctgataagaatgaatctgttgcaagtgatgacttagatataccaagtagtattcttttaccttctgcaggaatcttgccttcttctttaagctttttgttttcgtgtataaagtcgtatatattaactagtgctcctggtaggaaggacgaatcgttttgtgcttctatccttaccttcttaagcatttgcttacagatgatttcaatgtgcttgtcattgatatcgatacctgtcattctatatactctttgtacttcttttataatatagtcttcaacgccttctacaccaagaaccttcataatttcttgaggtgatgcgttaccttctgtgatttctttacctttttcgatgtagtcgccttcgtgaactttaagtcttgcagcatagtttacagggtgatcaaccgcgatgccttctttgtcgtctgttataacaacaactctttgttgtggatcgtcttcattgattgaaactatacctgaaatttgtgcaatttgtgcttgtccttttggctttcttgcttcgaaaagttcttcaactcttggaagaccttgtgtgatatcgtctgcattggcaaccccaccagagtggaagtttctcattgtaagctgtgtacctggctcgcctatagattgagctgcaatgatacctactgactcaccaatgttaacgttagttcctgttgcaaggtttcttccgtagcatttagcgcaaacgccatgctttgtttgacaagtaagaacgcttcttactttaacttcttctatgccgatttcttgaatgaaatgagctgtcttttcgtctattagttcgtctttcttaactataacagagccatcttttggattaattacatcttcaaaagcgtatctgccaattaatctttcttctagttcttcaagaacttccttgccatctctaatagttctaactgtatgtccttcatcagtatggcagtcgtcttctgttactataacgtcttgagaaacgtctactagtcttctagttaggtaaccagagtctgctgtctttaaggcgatgtctgatagaccctttctggaaccgtgtgatgataggaagaactctagtactgatagtccctctctaaagtttgacttgatagggatttctactgtcttaccagttgatgatgccatcagaccacgcataccgcctaattgacgaatttggttcttactacctctggctcctgagtccgccatgatgaagatattgttaagtgggtctagtgacttcattaaagcttctgtaacttcatctgtgatgccgttccaaatattgataacgccttcatatctttcttcttcagtcatgaaaccttctctgtatactttttcatacttttcaacttctttttgcgccttttctataagctcagtcttttccttaggaacaacaacgtccgccatagagatggaaactgcagaaagcgttgagtgtttgtaaccagttgattttatgtggtctaaaagcttgcttgtaacaatgttaccgtgcttttgatagcacttgtcaagtatagttccaagtgtcttctttgaaacaactctatcgatttcaagtgagtatggatcagtctctctatctacaaagccaaggtcttgaggtatcttcttgttaagtatgaatctaccaacagttgattctacaagtttacctctgtcttcctcgtcaagttttactctaactttaacttttgcatgtaagtcgattaatccaagctcataagcttttatcatttcatcataatcttggaagatgtggcctgagcccttgcttccttcgatgtcaagtgtcatatagtaacagcctagtaccatgtcttgtgatggtattgaaattggtttaccatcctttggtgctaagatgttgtttattgaaagcattagtagtcttgcttcagcttgtgcttctatggatagtggcaaatggacagccatttggtcaccgtcgaagtccgcgttatatgctgaacatactagtggatgaagcttgatagccttaccttctactaagactggttcaaaagcttggataccaagtctgtgtagagtcggtgctctgtttagtagtactggatgatccttgattacatattcaagtacgtcccagatatctgatttcgctctctcaaccatcctcttagcgctcttaatgttgtgagccttgcctgtttcaacaagtcttctcataacaaatggcttgaatagttctagcgccatcatcttaggaagaccgcattggtagaacttaagctttggtcctacaacaattacagatctacctgagtagtcaactctcttacctagtaagttttgtctaaatctaccttgcttaccctttatcatgtcggatagagacttaagtggtctgttgccaggacctgttactgctcttccgcgtctgccgttatcaattagcgcgtcaacagcttcttgaagcattctcttttcgtttcttgtaatgatttctggtgctgatagttcaagaagtcttctaagtctgttgtttctgttgataactcttctatataaatcgtttaagtcgcttgtcgcaaatctaccgccatctagttgaaccataggtcttaagtctggtggtataactggaagtgcttcgataaccatccactcaggtctgttgcctgattgtctgaatgattcgatagtttcaagctttcttaaaacttttatcttcttttgtgtggatgcgccttctagttcttcgtttaattcttgtgcttctttatctaggtctatcgctttcaaaagctcaagtatagcttctgcacccatccttgcatcgaatgagccgtagccaaattcttttacagcttctgaatattcttgttcatttaagatttgtttgtatcttaggccagtattgcctgggtccataactatatatgatgcaaaatatacaacgtgctctagctcttttggtgaaacatcaagtactatggctatccttgaaggtgttcctttaaggtaccatatatgtgtacatggacttgcaagctcgatgtgtcccatcctctcgcgtcttacctttgctcttgtaatctctactccgcacttatcgcatatcatgcctttgtatctaatcttgttgtatttaccgcagtgacaagtccagtcttttacaggtccaaatatcttttcacagaacaagccttctgcttctggctttaatgttctgtaatttattgtttctggttttttaacttctcccttagaccatgctctaatgtcttggcttgatgcaaggcctatttgaatactgttaaacttatttaattcgaacaaattaccttcctccttgtctctctacaaagaactttcgtcatctaagtctaggtcttcatcaatctcgtcgatgtcgctacctatgtctagatcgtcgtccatgtccaaatcttcctcttctatatcgtctaagttttcatctatatcttcgtcaatgtcatcatcaaagtcttcatcgccttctacatcttcgttagcatcttcttcgtcgtttatgcccttagatgattcttcatcaaagaagttaacaaagtcttcgtcatctttgtaatcagtgtccatgctcttgaagtcgccggcaatgatttctctttcgttcatgaaatcatcttcgtcatcaagttccatctcattgtcatcttggtcaagaaccttaacgtcaagaagtaaactttgaagttcctttactaataccttgaatgattcaggtatacctggttcaggaatgttctttcctttaacgattgcttcgtatgtcttaacacggccattgatatcgtcggacttaacagttaaaatctcttgaagtacgtggcttgcaccataaccttcaagtgcccaaacttccatctctccgaatctttgtccaccgaattgtgccttaccaccaagtggttgttgtgtaactagtgagtaaggaccgatgcttcttgcgtgaatcttttcgtctactaagtggtgaagcttaagcatatacatgtatccaactgtaactggattgtcgaataacttacctgttctaccgtctcttaagtaaatcttgccgctcttagggtagcctgccttatcaagtgcttcaagtatatcgttttcgtttgcaccgtcaaatactggtgttgaaacatacataccaagcttcttagctgccatacctaagtgcacttctagtacttgtccaagattcatacgagaaggtacacccattgggtttagtaggatttgtagtggagtaccatctggtaagtatggcatgtcttcttcaggaagtatccttgaaataacgcccttgttaccgtgacgaccgcacatcttgtcccctacagatatctttctctttgtagcaatgtagactctgaccatcctgtttacgccaggtgatagctcgtctgcattctctcttgtaaactctttaacatctacaacgataccagcctcgccatgaggtaccttaagagatgtatctcttacttctcttgacttttctccgaatatagctcttaatagtctctcttcagcaggtaggtccttttctcccttaggagttaccttgccaactaagatgtcgcctgccttaacctcagcaccgattcttatgatgccgtccttgtcaaggttctttagtagctcttcactagtgtttggtatgtctctagtgatttcttcaggtccaagcttagtatctcttgactctgattcgtattcttctatgtgtatagatgttagtacatcttcataaacaagtctttcgttgattagtatcgcgtcttcgtagttgtagccttcccaagtcataaacgctactaagatgttcttgcctagtgacatttcaccaaggttagtgcttggtccgtctgcaataacatcgcccttcttaaccttttcgcctgcctttactataggtctttggttaatagtagtgccttggttagagcttgtaaatttgattaatttatatgaatcaatgttcttgtctttattttcaataacgatgctctttgcatcaaccttcttaacaacgccgtcgttctttgcaacaacacatacgccagaatccttagcagccttgtactcaataccagttgcaacgataggtgcctctgtcataagtagtggaactgcttgtctttgcatgtttgaacccattagtgcacggttcgcgtcgtcgttttccaagaatggtatcatcgctgtaccaactgaaactatctgtctaggtgaaacgtccatgtaatcaatttcttcttttttgaacatgtccatcaaagtatcgtttacagccttacttcttgcaactatgatgtcgtttttgaagtagcctttctcgtctatcggctcatttgcttgtgctatgatgcactcgtcttcaacatctgcgctgatgtattcaatctcatcagtaactctgcctgtacccttttctacctttctataaggagcctcaatgaaaccatattcattgattcttgcaaatgatgctaaggatgtgataagaccgatgtttggtccttctggtgtctcaattgggcacattctagcgtattgcgaattgtgaatgtctcttacttcaaagcctgctctatctcttgaaagaccgccaggtcctaaagcagacattcttctcttgtgagtaagctcgcttagtgggttagtttggtccatgaattgtgaaagctgtgatgaaccgaagaattccttcaaagatgcaacaactggtcttatgttgataagactttgtggagttgcagcttctggatcttgagtagtcattctttcacgaataactctctccatccttgaaagaccgattctgaattggttttgtaaaagttcaccaacgcttcttacacgtctgttacctaggtggtcgatgttgtcaaattgaccaacgccacgcatcaagttgaattgatagttaatagcacttattatgtcgtcaatttcaattctctttggatatatttcctttatattttctatgattaaatttgtaagttcttcgtcgtccttagcttcttccataagctcgtgcattagtggtgcatagatcttatccttaagtccaagctcttcaaagtttaccttagtatcaaaagcttcaggcttaacaaagttgttaccaacaactctgatttcttcaccgttgtcaagtactatatctatggtattgacaaagttgtcttcaatcttttgcgccatctttctatcaagaagagttcccttttcataaattatttcacctgtgatagggttaactgcgtccatggcaagagtgtgatgttctatccttcttgctatagacaacttcttgttgaacttatatcttccgactttagctaggtcgtatctcttagggtcgaagaatagattattaagtagtgattttgcactgtcaacagcctctggctcgcctggtctaagtctcttgtagatctcaatcaaagcctcgtcttgagtctttgcagtatccttttcaagagtagttaataagtcattagtctctccaaatgtttcaactatgtcaagatcagaaactatgcctaaagctctaagaagtgatgtaatgataacttttctgttcttatcaatctttacatacaatgcaccagtagcgtctgtttcaaattcaagccaagcaccacggtttggtatgatagttgcgctgtaatcaagctcaccgttcttattgatttccttcttgtagtagcagcctggcgaacgaacgacttgtgaaacaacaactctctctccaccattgattatgaaagtacccttatcagtcatgataggtatatctcccataaatacttcttgctctttaacctctccagtgtctttgtttataagtcttacccttgctctaagaggagcactgtagtttgtgtcctttattctggactcttcttcagtatactttagttcctttcctatagtatagtttacaaactccaatactaagctaccaccattgtcatcaataggtgatatgtcatcaaaagcttcctttaaaccatcttttaagaaccagtcaaacgatgcagtttgtacctcaataaaatttggcatctcgcaagcttcttttattctagaataactcattctagttctttttccgttttcaacaggatgtagcatccaaatattcaccccttataaaaataacctactatatgtcgtaccctaaattaagattttgagaataaaaacccattttaaatcctaattatgcaatttataattatataatatgtcaagtctaatgtcaagcatttttttcgatttttaaaaatattttttaattcgcgctgcgaaatatttactattgacatatagatatgctataataagcaaaaggtggtgaactaatgaacacattacaaattttaacaagacttcttcttgcagctctattgggttcattaattggagtagaacgtgagaagaaacatagagcggcaggtcttaggacgcacatcatagtctctgttgcttcttgccttatcatgcttatatctatcgatggctacaaagctttctacggaaataattcttgggatgctacaagatttgctggtcaagtcataagtggcataggttttttaggcgcaggcactatacttcaaaagaaggatgttgttaagggcctaactactgctgcaacactatggctttgcgctgctaatggtcttgctgttggtataggctactacaagggtgccatcttcgcaactatcatctgtctaattactcttatcagtctaaagggtatggatgagttcctgaataaaagatacttagctagctactacatgagctttgctggcaagaactttcaaaagagtgactttgaaaaaatttgcgaggaagaaggcatagagatttcttctctaaacattttagatgatgcgatagatgagatctccgagatagagtgcacactttcaatcgcggacaactacaagattgacagccttataagtaaacttgaagatagattaaagttaataaagtttcacgagacacactaagcacggcagccctaaaggctgcttttttatttgccataaagtgcttagcgcctttaaattttttgctaagtatggtttgcgagctatatagtaggaggctacttatataattagaggcgagctatatagtaggaggctccctatatagtagcagctaagctatatagtaggagcctccttatatagtgagacgcttactatatattagctctttacttgcataaaaaaaagaactatgggcgcagtgctcatagttctatctttttatactatcttttttatttgtattcttttaaaagtgccttaatctcatcaactttttcaagtctttcccaaggaagctctatatcatcacggccgaagtgtccgtagttactaatcttgtggaagattggtcttcttaaatcgtagtagtcgatgatgaaggctggacgtaggtcgaagactttttcaacaatctctagtatctttgcctcatcaagcttcgctgtaccgaatgtatcaacgttaactgatattggctttgcaacacctatcgcgtagcttacttgtatttcgcatctatcgcatagtcctgctgcaactaggttcttagcaacgtgtcttactgcgtatgatgcagatctatctacctttgttgcgtccttacctgagaaggctcctccgccgtgtctgcagtagccgccatatgtgtcaacgataatctttctacctgtaagtcctgtgtcgccctttggtccacctataacgaagcggcctgttgggttcacgtagatgatagtctcgtcgtccattagctttggatcaacaactggctttataacattctctatgatgtcctttttaatcttctcaagactaacgccttccttgtgttgtgttgaaacaactatagtgtgaactctctttggcttaccattgtcgtactcaacagttacttgtgtcttgccgtctggtcttagatagcttagtgtaccgtccttacgaacttctgctagtcttcttgataatttatgtgctaggtagatggcaagtggcatatactccttagtttcgttgcatgcataaccaaacatcataccttggtcgcctgcacctattaggtcgtacttatcctttgaatgctccttagtctcaagcgccttgtcaacgcctagagctatgtccttagattgctcttcgattgatacaaggactgcacagttctctgcatcgaagccaaactttcctcttgtataacctatgtcagctataactcttctaacaacagcttgcatgtcaacatagcagtttgttgttatctgtcctgatactaaaacgtagccagttgatgcagtagtttcgattgcgcatcttgcttctgggtctttctctagtatcgcatctagtaatgcatctgatatttggtcgcagaccttgtcaggatgaccttctgtaacagactcagatgtaaatagttttttatacataatcttcctcctataaaacaataaaaaaaccttcatagctgaaggttcgttcttctcatctttcagctttgctgtaggatttggcaccttgctcgcaggttgccggacttcacagggcctagtccctccgtcactctttatgagacttattaagttcacttcatattatatatagtaatcaaatctttgtcaaggactttttaaatattttctaattctttcaattcttcgattgcaaatcgttctgcaaccttttttctcactaccatatatgtgaagatgtagactatagttgtcaataaccaggacaatggatacgaaatgtataaaacccattgctcatgatacttttggaatatacttagtatccaaaatactctgaagccgcatatgcaaacgatggctatgatcataggtgttagtgagtagcccatagcacgaatgacccctgagtagacgtccatgatgccgcagataaggtaggttgtcgatataactcccagccttagcatggcaatcttaacaacttctgggttctgtgtatatagtccaagaagaaaatttcctgcaaggaaggagccaacacctaagacaagtccaacggctgacaccatgactatggtcttcttaagtatctcatcaactctgtcaagctttctggctcccatattttgcgaagcgaaggcaagagcagcttggtatatggcatccatcgccataaagacgaagccttcgatgttacctgctgcagtgttcgctgcaactacaagcttaccaaaggagttgattgaggactgtataagcacgtttgatatactaaacatcgctcctgtaaagcctgatggcagacctatcctaagcatatctgcaaactttgtccagtttatctttaatttgtttagctttagatttaggtagccgtcgctcttcattaaacacaaaactataagcatggctgagaaagcctcggatatgatagttgcaagagcaacaccatctaccgtcatctttaatactaaaacgaagtataggttcagtgctatgttcatcacgcctgagatggctaagtagtatagcggccttttagtgtcacctgccgctcttagtatggatgcgccgaagttgtatagcataaagcctggcatacccatgaagtagatgcgcatatataatgtcgcaagatctataacctcatctggtgtctgtataagttcgagcataggtcttgccgagaagtagcctaccaatatcatgataaagccaccgagtaacccagagagcatcgccgtatgtagtgtttcttgtccatcgtcataagatcctctgcctatagcctgacccatcaatacgcttgctcctatcgatataccgatgaagagattgattataaggttaataagtgggccagtcgctcctaccgcagcaagtgcttcgtcccctgcatagcgtccaacaactataacgtcagctgcgttaaagaagagctgcaaagtagacgatagcataagtggtatagcaaattttattaacttcggaagcagtttaccctccgtcatatttatctcataagacttcaaaaacgtgacctcttttctttatgtatatcattaaattttactacaagcgaaatgatttttcaagtattttttaattaattcatcaaatcctttattttttcttttaaatgtgttatagtatatgaatataaatatggaaggtgatttaatgaataaaaaagtatatgtatcaggtcacaaggtgcccgacacggactccattgcgagtgcgatatcatacgcctaccttgtcaatagtcttgacaagtatgatgcaaggcctgttagactaggcgagcttagtaaagagacaaaattcgttttaaaatattttggtgtagaagagccaaagctactaacaactatgaagcttaagctaaaggatgttgatcttgataaggctgtgcttatagatgaagatgcctcactatatgaagcgattggtcttttgcgtgagaaaaacgcctacgtgcttgtagtcgttggcaagaagaaaaagatgaagggcatcataggccttaaagacatcacagaggtatacacagacatctttgacgatagagtgcttagtaaggccgatactccatttaaaaatgttgtagacgtgcttaaagctactgtcataaacgacggatatagaaagccacttggccgcatggcgatctacgctatggacccaaagatgattgaaaacagaatcgaagaagacgatgtcgtgatacttggtgacagagaggacgcacaagaggacgcaatcaaaagaaacgtctcttgcctaatagtcgctggtggcttcgatgtaagtgagaaaattttgtgtcttgcaaaggaaaaaggcataagcatcgtctctactgagtacgactcctttatggcatcaagagttctacctctaagcgtgcctgtttcctacgcgatgacaaaggaaggcatcaagaccttccacatacaagacttcgtttcagatgttaaggctgagatgaacaagaacagattccgctgcttccctgtccttgataatgaaggcaatgtcataaacacagttagccgctaccacttactaagcgacaagaaaaagaacatcatcttagtcgatcacaacgaaagaacacagtcagtcgacgacatagaagaagcagagatacttgaaatcattgaccaccatagagtcgcaaatgttgagacaaaacttccactatactttaggaacgaaccactaggctcgacggctaccatcattacaaagatgtttattgaaaatggcgttgccatccctaaggacatagctgggcttttgatctcagccatcatctcagatacgcttctacttaagtcaccaacaagcactaagacagacgcgaagatgatagagctgcttgcacctatagccggagtagaccctgatcgctacgccatagagatgtttacagaagcggcaagtatcaaggatgttgcaagtgaagacctcttaaagatggacgtgaagacatttaagattgcaaagcaaaagatacgcgttgctcaagtcatgaccatggatatggatgaagtgaaaaagagaaaggacgacttacttactctaatgagagagaccatagacaagaatcaagaagacagcttcgtactgatgataactgacatacttaaggagtactcactagttttagtgcaaggctcgtacaaagaaaatatcgcacaagccttcgataaagagcttgtggataatgagtttacagtcgatggactgctttcaagaaagaaacaaatgattcctagcatatcaaaaaagatagagactttatagtccctatcttctttttttgctcataatagatattttacttatatatagaagccgccattgacacgaaggacttcgcctgtgatgaactttgcgtcatccgatgccaagaagactgccgctttcgctgcgtcctctgctgagcctatggcctcaagaggcgtttcatcacgaagcatatctagttcagcctctgaatacgccttcatcatatccgttgctatgcagcctaaacttatggcgttgactctcacacccgatggtgccacctcttttgcaactgccttagtaaaggctatgacagctcctttagatgcgctatatacagtctccatcgcagcacctgtctcgccccacatgctagtaacgttaatgatactgccactgccctcgtgaatcatgtgtttaacgaaggccttagtcatgttgaagcagcccttcatgttagtatcaaaaaccttatcgtactcctcttcgctcgtatcttgcacaagctttgttagtgctacccctgcattattcacaaggacgtccacctttttatatcttttaaaaatttcttctttcatttggcaaacatcttcataattagaaacatctgcaccatagataaaaccctttgagtacttattcacctcgtctaatgtgatcgccgcttcatctatatgctcgttaaaattaataagaacgtcgtagcctttcttcgcaaattcaatggccatggccctgcctatgccacgcgaagcaccacttataagagctaacatatgactacctcctttatgagataattatatcacaaacttgcaattttgaccatcatatgctaaacttgtcttggtgataaaatgagaatgagaaagaagtggtgggcgcttcctgaacttaaagagagccccatctttagatatagacctatggagaataagggcaagtggaacgaagactttaacaatgcgggtcccatctacctagagcttggctcaggtatgggtagcttcataaactaccttaagaatacattcaaacgcaagaacttcgtcggcatcgacatggaggaaggctgccttgtatatgcaaagcgcatgctcgaagaagaagatgcttctaacgtaaggctagtgcttgcagacattagaaacatagacgagtactttgccgagagcgaggtagaagaaatttacatcaacttccctaacccatggcctaagaacagacagcacaaaagaaggctcacataccctgatcagttaaagatgtataagaagatacttaaaagtggcggcactataagactcaagaccgacgatatgggtctatacgaagcatcacttaagtacttcgagagcgaaggcttcgagataatatttaagacagatgacttgaatgtagatgagttcaaagacgacttcatcagtgagtacgagacaaagtggcgctcacaaggcgtgaatatcaaggcgatactagtaaggaatgtaaaatgaaaaagaaaattttaatatttatgacctttattatggctgtggctgtccttatggcatgcaagatgaaagatgctgcaaacgttgataaggaagcaaagaccatagacaaggcgaaagtgaatgaagaggcaaaacctgtagaagtgaaaaaactctcagagaagacaaaagagcaattactacttgaaaagatgagtctcgatgaaaagattggtcagctctttatcgcgcgctgccccgaaaaggacgccgcgacacttgcaaaaaaatataatttaggcggctatatcttattcggaagagactttaaaggcaaaaccaaagacagcgtagtaaaaaatatacaagagtgccaaaacgcttcgaaaatcgctatgtttatagctgttgacgaagaaggcggcacagttaatcgcgtgagcacgaacaaaaattttagaaaggctccatttgcctcaccgcagtatctatataagcatggcggtatggggaggatcaaaaaagatgcgaaagaaaagtcagagctactaaaaagcgttggcatcaatctaaattttgcgccagtcgcagatattagtatgaataaaaatgactttatatacaagagaagctttgccaagagcccagctgaaaccgcagactatgtaaagagcgttgtagaggtgatgaacgaagcacgcgtaggcagcgttttgaagcacttcccaggctatggcaacaacaaagatacgcacacagagcttgttcatgacaagagaccactcgaaaaattcgaaaaagaagaccttgtgccattcaaggcaggcatagaagccaaagctagcatggtgctcgtctcacacaacatagtagaagccatggataagagtgcgcccgcatccatatccccagctgttcataagatactaagagatcagctcggctttaaaggcgtcatcatcacagatgacctagcaatgcaaggcattaaaaaattcgtaggcaagaagaacgctgcagtgcttgcacttaaagcaggcgccgatatactttgctccacagactttcttaatgacatcaaagccataaaaatggctgtggcaagtggcgagatcaaaggaaaagacatagacgaacacgttttgcgcgtcttaaaggcaaaaatcgatctagaaataattaaataagcatacgaaaagcggactaagttcatctcagtccgctttttattgtcttatgctaagtattttttcacatcaggaccaacagctacaaaagaaccatcgtccttaagaagcataggtctcttcacaagcatgccattagaagataaaagcttgtatttttcgtcatcactcatatcagacagcttgtccttaaggttcatgtccctataaacaagacccgaagtgttgaagaaacgcttaatgtcaagacccgacgccttgtgccacgccttaagctccttcacagtaggaacatccttgtcaatctccctgtaagagtacttgatgcccttctcatcaagcatcttctcaatacccttgcaagtagtgcattttttgtatccaataagaatcatattgccctcccattacataagtttactgccaacatcataagccttcgcaagcttagcaccaagcaaattgtaagaattttcacatgcattgtagaagataagcttcatcttctcagtgtcgatactgccatccgcattgatatactcctcacctacagagatgttcttgatctcaccgataaggttctcgcttctctcatcatacttaataagctcgcactcaatagtcataggtagattagtgatgacaggcgcgttcacaaactcagacttagtagtttcaaaagaagtcttcgctagcttgtcttgcaccttgttgccacttaccatgccgatatagtccgcatcaaccatgtgagcctcatcagcaaacgacacagtaaacgccttctcacgcacagcgttgattatagttctcttgcccttgccaatatataaagagaccttagtaaagtcacccaaagtgccatacgccgcgttcatagcattcgcagagccgtcctcattgtatgttcctacaaccatgacaggaagtggcacgaaaaacgatttaacacccatgttttttctcatatgaatcaactccttatttgatatatacccaaaatgacttatataaagtattgaagatttattaatatatcgcaccttcttttatttctggcagataaggtgtgttgctttcaatcgcttcttgtgctaattctataatctcttcagcactcaagtctctaacaatgaatacaggaaagttatcattaaacttttcgctatattctaataaaactttgtctaaattattttcatcacttactacttcaaataattcaggaggatataaataatcttccccttcttcatcaatgattcgataccagccattctcaatactaattacatcatatattttgccattaatcatataaactggatcacttatacctataaacttaattttcacaaataaatcacacacctttagctttattcatcattccacgcgctaatgaggggcacgactctcgcgattattcacatcatccttatcttttctatactcatctataactttcttaaaatcctcatcatctaactctaatatgtttgaattagggtcttcaagaatttttgccgccttctcaatctccacttcagggatatttctatcaatttcctttcctctcgtgaaagtataatctgtataagatatggtcgcctttcttatccttctatctttctcatcgatagcatctatattgacaaacgcaaatcttccatcctctaattcgcataatattccaccagcttcaaaacttcctattgttttttttattttcaatcatatcgtcctttctataaattgcactcgtaggtagcaaatctcccctataacatctcttccctatttaattgccctcatatttcaatccacgcacccatgtagggtgcgacgctaaagcagctttgtctgatactaacttatctatttcaatccacgcacccatgtagggtgcgactgacacagagttagatagacctcgtgtatggtttatttcaatccacgcacccatgtagggtgcgacgccatcgtcctcaacatcatagtaaccatctttgtatttcaatccacgcacccatgaagggtgcgaccaagaatagcgtttgccatctccctctttgcagaatttcaatccacgcacccatgtagggtgcgacctaggctcaacattaggtgaagagtttatagcacttatttcaatccacgcacccatgtagggtgcgacgcttatggaaaaattgtcagagaagttactgatgaatttcaatccacgcacccatgtagggtgcgacttttctcatcatttagtgatatatattcacagtctaaatttcaatccacgcacccatgtagggtgcgacagaaaaatttaggaggtattaaaaatgacaagacaaatttcaatccacgcacccatgtagggtgcgacacaagcggctgaagaagaactacaagctttaagaatttcaatccacgcacccatgtagggtgcgactcaggactcgcgcaacatcattaacatcaaaggggctatttcaatccacgcacccatgaagggtgcgacgtgaaatcaaccaacaggacggtcactccagaaaatttcaatccacgcacccatgaagggtgcgacaaaatttaattgatctcactccttttttatgtaaaaatttcaatccacgcacccatgaagggtgcgacataatggtgtcttatatgcgttagctgtagatggctttatttcaatccacgcacccatgaagggtgcgacagacacatcggagatatatttaaaaacatatatatttcaatccacgcacccatgtagggtgcgacttaaaagagattgacctactaaaagcactatgtaaaatttcaatccacgcacccatgtagggtgcgaccggcgcaccagtcatgagagacggcgacaagtacaaatttcaatccacgcacccatgtagggtgcgactggactaaggctgtaaaaggacagaaaaagtttgctatttcaatccacgcacccatgtagggtgcgacttttttaaagatgacgagcacaagaaagcgtttgaatttcaatccacgcacccatgtagggtgcgacaaaagccgcaggatataactacaaccaagtacaagcaatttcaatccacgcacccatgtagggtgcgacagcctagcacttttgatgagtccaaacctgcttgttatttcaatccacgcacccatgtagggtgcgacgacttcaatcacttgatggacgcgatgagatatgcactaatttcaatccacgcacccatgtagggtgcgacaataaaagatttggcacgataatacaaacgcttaatttcaatccacgcacccatgtagggtgcgaccagttgatattggtattgtcaacaatgacgagtttatttcaatccacgcacccatgtagggtgcgacattatgatagggataatggattcgttcaaggtgatttcaatccacgcacccatgtagggtgcgactaagagggctggatatttaagagttaaaatattaggaatttcaatccacgcacccatgtagggtgcgacgaattaataacattgatgagggctaagagacttaatttcaatccacgcacccatgtagggtgcgaccacaggctgatgtggaaaaacagtttgccaatggaatttcaatccacgcacccatgtagggtgcgaccacgcgttagtcgtgcttttttaatgcaaaaatataatttcaatccacgcacccatgtagggtgcgacacactgaacgactaatatgcagaatagcccagttagatttcaatccacgcacccatgtagggtgcgacgacactgaacgactaatatgcagaatagcccagttagatttcaatccacgcacccatgtagggtgcgacagctgtagttgatatagttcctgttccatcagtatcatttcaatccacgcacccatgtagggtgcgaccctttagccgatggcgaagagcttgacgatcatggaatttcaatccacgcacccatgtagggtgcgacagtcttagagattagagtcactatcggcaatgcaacatttcaatccacgcacccatgtagggtgcgacggcgcaacttaatctagatgcggcggagtgttttatttcaatccacgcacccatgtagggtgcgacaagcagaagtggttgctattcctccaatatgatttatttcaatccacgcacccatgtagggtgcgacagtaacttatccattggtcttcgttgtagcttgattatttcaatccacgcacccatgtagggtgcgacagtttatgattggcgcaaactctgactcaacagtatttcaatccacgcacccatgtagggtgcgacaaaagagacttcgcaggctttgggctgtggactgatatttcaatccacgcacccatgtagggtgcgacattaaagctgcgtaaaacttctgatctggcataagtttatttcaatccacgcacccatgtagggtgcgacatctcttcaagccatgttagaggacatataactacaatttcaatccacgcacccatgtagggtgcgacaccgcaagtgaaacaaagttgatgtatgcaccagatttcaatccacgcacccatgtagggtgcgaccttttgtatacattaattaaggagtgttttaaaaatatttcaatccacgcacccatgtagggtgcgaccgaccttacggcgacgtaaacgcttggctagaaacaaatttcaatccacgcacccatgtagggtgcgactgttacaactgaaataagggtaggtaggattgattatttcaatccacgcacccatgtagggtgcgacgaccgacggctttttctgcttactgcacacactggcaatttcaatccacgcacccatgtagggtgcgacttaaacgtgctagatcaaaaggaagtgtaagatgataatttcaatccacgcacccatgtagggtgcgactgtctaatttgctcattttatcggtagtttatcgtgatttcaatccacgcacccatgaagggtgcgacgcttctctatctagtgccttaaatttatctataatttcaatccacgcacccatgaagggtgcgactcgttatcgtaattgttaagtttgtccgcctgctctaatttcaatccacgcacccatgaagggtgcgacagcttaacatattagtaaatgttgacttattcggaatttcaatccacgcacccatgaagggtgcgactatatctaagatttgaaataacatttaatagcgccattatttcaatccacgcacccatgaagggtgcgacgctctacttctgtatgcttgacgacgactgcctccaatttcaatccacgccccatgaagggtgcgactaattggatacttgagggctctaagctctacaaggctatttcaatccacgcacccatgaagggtgcgactgggatgcggcgcttagagagataaagataaaatatttcaatccacgcacccatgaagggtgcgacgataattcactattcctacctataatccaggttacaaaatttcaatccacgcacccatgaagggtgcgacttatattatgacaaaacaagaacaaatcaaaaacatatttcaatccacgcacccatgtagggtgcgacataaagagtcaatgctaagagtgcttataaacgcaaatttcaatccacgcacccatgtagggtgcgaccatctcaaactttggcttgctcgtcatcttgtcagatttcaatccacgcacccatgaagggtgcgacgcgagaaacgacataatttttatccctcatttcgtaatttcaatccacgcacccatgaagggtgcgacgaaggctttcgttatggtcaagtagcaagtattatttcaatccacgcacccatgaagggtgcgacaatccatcgtttggcgttagtgggtcgtggggaaatatttcaatccacgcacccatgaagggtgcgacctcctataggtcatacagtaacagtagcaggggcagctatttcaatccacgcacccatgaagggtgcgacattgatgtaaaggttgtatcaatagagcatggcaaatttcaatccacgcacccatgaagggtgcgactaatctttatcttattttatagggcaaagacaaaatttcaatccacgcacccatgaagggtgcgacgaaaagagactccacacgagagtctcttatgctatatttcaatccacgcacccatgaagggtgcgacaaacaatatactttactttatgaaaaaataacaagtatttcaatccacgcacccatgaagggtgcgaccaaattgaaggagacgagtcaccaacagtttaccgtatttcaatccacgcacccatgaagggtgcgaccactttttattaggtaaaatgtaggaggtaaaaaaatatttcaatccacgcacccatgaagggtgcgacaacagatgataattgggtcaatggagatgttaaaatttcaatccacgcacccatgaagggtgcgacattaaaaaagggggtggatatatgaattacaagcttttatttcaatccacgcacccatgaagggtgcgacgtaagggtattgatgaaagacggaaggcttccggaaatttcaatccacgcacccatgaagggtgcgactgcaagagagagactgaggactacaagcttgagatatttcaatccacgcacccatgaagggtgcgacatcataacattacagtttacgtggcctgtttgttatttcaatccacgcacccatgaagggtgcgacgaagatgaaggcgtgttttatcttgtaggagatgaggatttcaatccacgcacccatgaagggtgcgactaaacaccccaacgctttagagattttaattcgcttgatttcaatccacgcacccatgaagggtgcgacttaaaacctatgctatttacgccttgttttattgatttcaatccacgcacccatgaagggtgcgactggtaaactgttggtgactcgtctccttcaatttgatttcaatccacgcacccatgaagggtgcgacacaaagttggagacggctttaaagcagcaggcgaaaaatttcaatccacgcacccatgaagggtgcgacttattcttaaatgaattagatcacatcataaaaatttcaatccacgcacccatgaagggtgcgacatttaattctcacgattattcacgattaaatctaatatttcaatccacgcacccatgaagggtgcgactgttaataggagaaagggagagggaaaagagaatgatttcaatccacgcacccatgaagggtgcgacatcctgaccaagcagaaataactactgacactaaaatttcaatccacgcacccatgaagggtgcgacactataaccgcaggctttagagcctacgacagttggatttcaatccacgcacccatgaagggtgcgaccgttacggcaggtagcggaattgcttttattgtagatttcaatccacgcacccatgaagggtgcgacacgaattgaatttaagacggacgaagcaagacaaggatttcaatccacgcacccatgaagggtgcgacagctagatgtgctaaagatctatgttcttgttgcacatctagtgtttatgcacacataattttcattatatacacattttttgcttaattttaagcatttttttctgcgaatcctcttgaattttcatgttcatatgaggttcgcactaatttattataaatggaggatatgcctcaaggtctcctctaatcgtccttgctagaagcatagcttgtacatatggcaataatccaatctcgattttttcttctagaaatgggtgtgtaatctcatcttgcaaacgtttattccatatgtctaaatattttttctttccattttctgtaaattcatatgaaccattatcttttgcaataaaatctctctcttcaatttggaatttatttattaagcttagtacaaatctatctgccatatatgctctcatctcttctgatagatcaagtgctaatgattgccttccaggtctatctttatggtaaaaaccaacatatggatcaaggcctactgtttctaatgcgttttgtactaacactctaagcattccatatgaaaacgacagcattgcatttacgggatcttttggtggccttctgtttctatctgtaaacttaaagtactctttgctgtttaatataaggtaatcaaaatttttaaagtattcccgtgctgcatctccttctatacccaagagttctgtatagtcttttgcattaaatgcatttattttgctttcctttaacttgcttatggattcctctacttcttctttatatattgtatctttataatctctaaggtatctatctagtacttttattgaattatacagttttcctaccacgaatgactttgcgtatgaaagcgacctctcgtcattttccgaaattctaaactgttcttttcttagtaatacatttccattgatctttcctgagactcttgcacaaaaatatcctcctggtgttaaaaaactaataccgacgttatttttcatacacatttctaacagtttagggcttgctccgacgtaattgaagcaaactatgttttcaaagttttgtattggtgattggaagactttgccattggcttcatctttaactactatattgcttccatctttcgctaaatagatattttcatttgtaatatataatgtatttaacagctttctcattcttccatcactatcctatcgatataatttataacgctttttttcttttttgtaagttttggcatgcagtagtcaactaaggaacaatttttacagttgatgtttttacttgctctaggaatcttgttttgagtaaatatctcatacatttgtgatactatatctcttacttcttgccttaattcatctgtaatttctatttctaaccttttatttgggcttttatagtaaagtgctgacttttttagtttaatattatgcatttcttctaaacacattatttccgcaactagttgatagatatctgcctttgtcttttttgctctaccttttttatattcaactacataaggtagccacaatccattgtagttttctatttctactccgttctcatttttctcatatataaccaggtcacagacaccaactatctttagttcgtctgacttaacacgtaaggatctttcatatattctgtcttttcttttttcaaaaaaatatggatcatccacgttttcatgtataagtttgccaagtgttgtatctttattttcaaaccaaatttgttctagctctagaagagcccactgcctcttgcaaaatgtgaagtgctgtattctacttaagcttaaatagtcttcttcatccatatatctaatttatatacctgttaaatattctacttttaggccttttccctcatattcttttaatttttcttcatttagtctaatattgtaggatttataatcttgactatctatctctggtttgtcaaattcaagtagttcttttattttaccgcttgatacatttcctatttcacaatcgtgaacaaaccagaatatatctctaaccatcattgatccatctggtctagctgatgatgaatcatttataaaaagttcttgtaaacattcttttagtacagctaaatcgtcatctgtaaatttgttcttctttgcaaaatttacatttaccgctccattaacaacatatatagcatgattaacataatgttttgagcccattgtatcggaggatttgccgccaccttctttttccatgctgttaacgctctttgtaatctgcatagttgtaatatctataggctcaagcgatttagcgatggatatactaactggtcctcttatgccgacagctttcttgtcatatgttattacttgtccaaagcttctaacatcaagccaagttccacagcataaattatatgcttcttcatctgttgcttttttatctacaacgctgctatatcttttttcaagtgatgtaaatccgtcatctgacttttcattgctctttacaaagatgttgtatcctttatcttgcattctatttctaatctttctttttatacaaacatctgaaatttctccatatccataagaatcacttcttggcatgttgcctgcaagcggatctccatttggatttgcattatttacttcaattgtcattatgaagtcgacctttttttcaattaccttactcattatttttcctccttatttatatcattattttttaaaccaaaacgtttttctgcataatagccatataaaaacctactacttaaagctttattgtcttctttttctgatataccaagttcgcctaattttataaatatatcttctttctctctgtctagcagtactgcaaagccaggatttgtggcctttaatttgttaatatatgttttagttttatcatctaaaactcttgatatttgggcaggatgctttgtaaatgatgtccaatacctatctgcattagtaagtcttattgcttcactcttttttgttttttctccgtcaccatacttagctgcgtcaaaagtcagtctttctatcatttcatatacagctaataatctaccataaaggtatgacctatctaaattatctctgtcaagcatatcttcattttcctcctttgatgaatctcttaaaaccgcaagggctattgactgtaaaatattccatgtatttttatagtttagcttttttctaatattcatatcgattgctttaacaatgttcttaggcatctctttgccctctatgattgaaattatcattttttgcagctgatcttttttaaagctatcgttatcattaactagtttcttttctctttctgttccataagcagcatctagtattgaaaatatactaggtgtcttctttaccaaattattcttagcaagtgtataataatagtaagtatttgaccacgtttcaaggtttttataaagctgtgatgtttgaagctctttaaagtatctaatcgatgatcttccatcgttaactttttctaaaattagcgcactatatcttgaatctttaggtactttatctacacctgtgataaaagaattagctactttctcattttcgctataaaccgctttaaatgtgtccatcgtagcatcttcagcttcaatcttgtcgatatcgaactcatcagactcgtctacgcctgctatgtttggatttgcagatgtgataaaaagcttcttatcatttctaatgtcatcagaaaaccagttaactatatactgctgaccgccgagccatttagacgaatttttattgtccattaaatattttaacattaaatgagctttttccgatgtttcatagcctatactaattacatcgctaccttctttaaatcttccgatatatgattgtttaactgcagaaataagtttagaattacctaaaataccacgatgcttgtctacaatataatcttcttttcctgttatattacatattccgttctttgttatagagtttctaacgttattaatatgaacttgatggagttttttgtattttgttactgaataatcttcaagatttttaaagtctactacttcaaactctaaatatatcttgtctaattcaagtttctttgttgtttctttatttttatcattaataaatgtatattctagtatagaggctttatcggtcaactttaaaacatcaacacctaatgcatatcttaaagcttcatatataaaattttcttttttaatataattgtaaataattcttataaaatctttaatttctgtgtctttttcttcggctatccaattttctagcgcatccatataatccttgtgtctttcttcattgtaagaagcaatatatgagcaattatctacaagcatatgcggcatagagttgcttgttctattaactgagtccaagcttactggaaagattattttctcatctttaaccaaaaatgaactcttaacaaaattagaatctctatcaatgcttatcttcaatatattttcacctgtagatactatagaattatggtataaaggaagtattactgagtcattaccattgtaattatcaactaaacctgcctcgagggatttatcatatgtttttacaagcgaattaatcaatgtcatttaatcatctcccttctaattttgcatattcttcatcaaccgaaagttcttgctctggatatttaaaatcatatgttgaaagttcgtttttaacttcacagtcttcttgatctttaaaattaattacgccgtccttcattaccacacttccaaagtaagaataaagtttttctcctggcttatttggatacttaaaactgttaaacattaggccaaaggataaagtttgtccttcgtaataacttggcttttttttgtactcttctactgtaattgcgttaacatatccttgacactcgctagctccaataaagattgaacgccttccacctctttcgatagagcgctgcataattgcttcatgctttttcatgtttctatcctttttcaagtcatctctaaataagttccactcaaaatggtatttaattaaatactctggattgactaagtatgttatgttgcttctgtcttgtttgtaattatctttcggaactctaactcccatagtatgtgttcttattggactaattaccttgacttcatccacaacatttttaagcacaggtttaaagtaacacgcatcaagtatacctaagacagcttgctttgttataactggatatgttgctttttctccaccgccctttgtctctggtgatgttattaaaccataatctcctgtcaatctaatgtaaaaatatttagatttttcgtttggaccatccatagtattacctccttctttctatattcacttattattatattattcttaattttgtttgtcaagtgtttttttaattttaagaatatattttagtttctttgtggtataataagtttatcgtagtattgactacgcggattgaaaaacttactattacattataataaagggcattagctctttatttttttcttgatctatgttaaagccattatcattatagtattgctttttaagtaaaagaatatcaccatccatatacgaatcaacaaagtcattaagcttattgttttcatatatatttatagtgtagctttgcatctcttttaaaagtctctttatttttgatatattatagattatagtatcttcattttctaaaagcatttttaactcatcatattttccctcatttgattttcctgttattgaatttctataacaaactatcattgcctttgtatcatttttgattaggttaatattatcagcagctgttttgaaactttgtcttaagataggaaaatcttttgtttttgttccaatattattaatgttatcacttaataagtcaaaagcacttggcttatccttttcaagcggatatgccattaagctttcatactttgtgtaataacgcgcaaaaaattcatcatttagtttatcaatatctatttctccagtctttttatttagtataatctcagttatgtcttttttatattgtatcgattctaaataatttaggttttcttcaaagcccatgttaactaatttaactataccttcttttaataacccgtatctgttgcatcttcctatagcttgtataagagagtcaatgcctgcatatgaccttataagcctcttaaaatcaacgttgaccccagcctcaataagctgtgtcgaaacaagctttacagctacgccttctgaaagttttgcttttatttcattaagtatatcctttctatgttctgggcaaaaatctgtatttaataaatatatattattgttatttccaaaatcttcaagtagcattttgtataaatttctagcagctctcttcgtatttaatataattaggtttgaatcctctgcatgtgataatacttctgtcttaatatctactaaactgcttttcttaccatcattaaaattatatacctttgtccttttaaataccttgagctgattttgactaagtcttacaagattagcattttttgcataattaagcctatatttaatgttgtcctcgtcatacttaggctgagttgctgttgacaaaactatgttagtcttcattactgaggatataaaattcattgcaagattaaataaatatgtcatctctataggaagcgactgcacctcgtcaagtatgattacagagtttattaacgaggagaatctccttatgtttgttgactttcctttaaataaagtatttatgaattgtactaaagttgtcaaaactactggtgcatcaaagctttcaaataaatattctttacacatattttctttactctcgtcagcactttcattcttagtgttgtcaaatgatgatttattaactatatttgagtggtattcaagtatactcttgtcttttaacacgtctttgacttcactagcattttgctctaaaacagataagaacgcagttatataaaaaaatctttttttatctttaaacttcatttgatttgtagcatatagcatgctcaaaagcgttttcccagctccagttgcaagatcaagcttgtatattccattattatcagtgcggctcctactgtctacaatagattttaagtcatttttcactttatccagattatttttaggttcaggaaaactagcatatttctcatctaatcttgccttatacacttcagctttttcttgtgcattatacataactctatcgtcaatgactaaatcgtaagcatttatagtatcaacaatgtctgcattttttaatattgataaaaagagcctcatgtataaagataaataataataattagctttatcatcaatatattttatcttatctttagaatttttatattcaaaatatcctctcttaaatatttctaataaatctacatttaatttttgttcaatctcttcaatatatggtagtacttcatttttgaagcaaatttcatcttcatcaaatctaagtctatcttttaatctgttagataaattattgtcaatgtcataataaggaatgtcataaataccatgatgtgcgcttataacataggccatgatatagaagtactcctgtattatgtttagctcaaacgaactttgcttggcgcacttactatataatgacaataaatacaacgctcctgccgatgaatgatttaccctctcatcagtattatttattattttatgttgaaaagcttcactagcttttccaatatcgtgaagtattcctacaaggtacaatgtattttcaaaatctatctcactcgctaaagatttagctttatcagctgtatttttcaaatgagttataagctcttgctttttaattttgccttcagcattgtcaatgtgtgcgtatttcataattgcctcctaaaatataaaagtatcttcctctggattgaagcttgtagtcctgcctatcatttctactttaggcttccaattacttccaagatgataaaatcttatgctatccttctctaaatctatctcttttcttattttatatttaagctcttcaaactcggcaggtgttactatgcattcaaaaactgaattttgtaccctttgtccgtagtccttacatacattagcaactcttcttaatctcgttcttccgtcactatccatagtttcaacatcatatgtcgcgagtatcaacataaaatcacccctatatactaattcgcatctttatatccttaataatattataccacattaaaagagtcgttgtttatagaaactatctaagcagatataattcctttaaatttacccaatcataaccaccggcgtagccggtggtttgctctgcccctgcaaggggcttttacctgctgtgcaccttgtgcacgttgaaagtctaccacttgcactactttctcaactgacgctaaagcgcctctttacttctttttacttatttgtcttttctccagtgaatggatctatatattctttaagacttatttgatcttttgtaaaatcttctttaagttgattgcgtatatactcttgtatctttttagcattttttcctgctgtatctacgtagtagcctctgcaccagaaatttctgtttccatatttatatttcaaactggcatgtctatcgaatatcattagactactttttccttttaaatatcccataatttctgaaacactatattttggtggtatttttactaacatatgaatgtggtctggacatagttctgcctctattatctctattccttttcttgacaaaaggtctcttaatatttttcctatatcttcttttattcttccataaattatttgtcttctatattttggcgcaaatacaatatggtatttacaatcccaagttgtatgtgataaaatattcttatccaattggattaactcctttctgatatttattgtagtttggtagactatttttattatatcatgaaaggagttttaacttgaagctaaagctactgattcccccagcatagctgggggttttattgtggtcaacccacaataaaaaatgggctctgcatcgcgcaaagcccatagtcatttttctaataatttatttaaatttatctaatctcttgaatatcttttctttacctaataagtaaagtatcctatccatttctggtccgtgtactgagaaggaaatcatcgctctgactggcatataaaggtttttgcctttgatgcctgtcttcttttgtatattcttcatgaatgtcttggcgtaatcaagtgtgatttcgtctactgatgaaagctcttcttcgattgtgtttgcaagcacttttgcgttctctgcgttttcgccttctaagaattcttttgtttcatctgcaagtggaagctcttcaaagatgaattttgccttctctggcaattctgtcattagtgagatggagtctttaagtgtatcgattaaaacttccatatactctttatgctctttggcaaagtcttctgtgattagtcctgctttaactaattctttgcttgcttcttctctcaatacattgatgtcttgatttcttaagaattgtgcgtttacccaatcaagcttgtctttatcaaagatgccgcctgtcttggaaactctttcgaatgagaactctttgattagctcatccatagtaaatatttctttattatcttctggtgaccagccaactagtgctaagtagttatttaaagcttctggcaaatagcctttgtctttgaagtcttctactgatacgtcgccttgtctctttgataatttctttctgtctttgttaagtactgttggtaagtgaacgtactctggcttttcccagccaagtgcctcgtataaaaatacgtgctttggtgtagatggtagccactcttcccctctaacgatgtgtgtgatgcccattaggtgatcgtcgactacgactgccatgtgatatgttgggaagccgtctgattttagtaatacttgatcatctatatcttctgtgtttatggtgatgtcgcctctaactacgtcgtggaatgttatgtctgtatcctttggtaattttagtctaactacgtatggctcgccatttgcaacccttttctttgcttcgtcaagaggaatatttctacagaagccatcatactttggtataaggccctttatctgtctttcttctctgattctatcaagtctttccttatcgcagaagcagtagtatgccttgccctcttcgattagctgatcaacatatttcttatatatatcaagtctttctgattgtatatatggaccgtagtcacctttttgaactacttttccatcttcaataaaaacgccttcgctgtagtgtataccagcccagtgaagtgagtttatcaagttttctatagcaccttcgacataacgtgttctgtctgtgtcttcgattcttaagatgaagtcgccgcccatcttttcagcgaataagtagttatatagcgctgttcttaatgagcctatgtgcacaaaacctgttggcgatggtgcaaatcttactctaacttttttatccacgattattcttcctttcctttatatatgcaatgatcttgttaatagcttcgctagcatctatctcttcattttccatctcacgacgagttgagtactcaaccttgccttcgctagcaagcttacctactgtaattctaagaggtataccgatcaggtctctatcgttaaatttaacgccggctctttctgctctgtcatcaagaagcacttcgactttctctgccaatagtttttcgtaaatctcttcagcaagtttattttgctcttcatcttttacattgacaattgtaacgatggcttcgtatggacatgatgatatcggccaaatgatacccttttcatcgttgttttgctcaactatggcagatactgttcttgatatacctacgccgtagcagcccatccagaagtattcgtccttgccattctcatctaagaatgttgccttcattgattttgagtacttttgaccaagttggaagatgtttccgacctcgatgcctctcttgaactcaagtttaccgccgcacttaggacaaacatcgccctcagctatcattagtaaatcgtctacgaattcaaatttttcatcgtcgctaatattgtagttcatatagtgataatcttcttcgttcgcgcctatgacagcatttttgatattcttaactctttcatctgcgataagtctgtcagcctttaagccgataggaccagtgtagcctgggaaggagcccatagccttgatgtcttcttcgcccatcatctctatctcatgctctgcgcagccaagatgctttattaattttgttaggttaagctctcttgatcctggtatgaagactacgattttttctcctctaaccactaggtcaactgccttaaggcatctatctttttcaacttttaaaagttttgctaggtcgtcaatagttttacagccctttgtctcaactttttcaagctcttttatatcttcactactattgtcataattataagctacttctgctttttcatcagttgcagagaagtcgcagctgtcgcaatatgtgatcacgccttcaccaacatcagaaagtgcagtgaactcgtgtgactcgttaccaccgatggcacctgagtctcctctaactatcctgtaatcaagttcaagtctgtcgtagatgttttcgtacgcttcccacatgtttttgtaactagctatcatgtcctcttgagtcttgtcaaaggagtaagcatccttcatcaaaaactctctcgctctattgataccaaatctcggtctcttctcgtctctatacttagttttgatttggtagatatttattggcagcttcttatatgagttcacatcgcttcttataaggtctgtgaaaaactcctcagctgttggtgcaagacagaactctctgtcgtttctgtcctttagcttgaacatctctggtccgaaggtatcccatctacctgactcttcccaaagctctcttggctgaacagcactcatgttgatctcttgagcgtcgtgtgagtccatctcttctctaactatctcttcaatctttctaattactctgtagccaaggttcatgtatgaataaattcctgaggcgctcttcttgataaagccgcctcttaatagtagtttatgtgatgcaatctctgcttcgctaggatcctctctcaatgttttaaaaaacattttactcattctcatagcttttttcctcctcttggtactcgtagttttctttttgcgcattgaacatcttgtagtaaaggctgtctgtcttttgcattagattgtgatgcgtgtcaaaatcttctacagtaccgttatttattaacaaaattctatcgcagaatatcgacgaactcattctgtgtgagatgtatatcgatgtcttctccttaacaaggtagttgaagttctcgtaaatctccgcctcgctcttcggatcaagtgccgatgttggttcgtcaagtataacaagctcgctgtccttgtataagcttcttgcaattgctagcttttggaactgtccttgcgatagtttttctcccgtttcagagtagcccatggagaccttagtgtccataccgctacttaacgaatttattttatcatatatgtcaatatctttcaatactttagtaactttttctctgtcgtaatcagtctttgatgcaaccgtctctgccacagggaaattgtatatattatagtcttggaaaacaacggaaataagcttttggtactcgtccatctttatcttagatatgtcaaggccattaagcagtatctcaccctttgttggctcatatagcctagtcattaacttgatgatggtagtcttaccagcgccattgagacctactatagaaatcttttcgcccttgttaatattgaaggataaattctttagtacgtagtcttcagagcttgggtacttgaaccaaacgtctttaaactcaatcgtgtcaatggacttaggcatttcatattcatatgcttttgcctttgcttctggcaaattcataaatctgtagtaaggctctgtcatgtttctcatcataatcatgtcaacatagttttgcgaaatgattctaactctttggttgaaattaacaaaggccgatgtgtatagagcgaaggaaccaagtgagatttgcggtccaaaaacattcgatacagctcttactgatatatagatgtagcttaaagctcttgatacaccgtctaagataccgctgaagaaagcagcaagcgaggaagttacatatactactcccgccttctcgctaattctattcattaatttatatattgaaccattaaccaagttatgcatggagaatagttttacgtccatcatctcgctatgtccataaataatattcatgtaagcagaaaactctctattaacatcttcaattgaacccataaagcttcccatcttcatattgcaccaagcacctatagcgaagtttaggctcgctaccagaagaagaacaaggcctaaaacccaggagaagctaaaagcgattaccgctaaaaatattactacaacgaaggaaacaaaaacttccgccaatatctgtacgaagtttgatagaggcgaattagtactcatgataaagtccgcttgatccttaagattcatgtagtctttgttctcaagcatagaataatcaagcttcatagtcttctcgcatatattgtaacgcacttgttgatatatacctgaaatatcgacgttgttaatgtagttgttgacgtagccaggaattttggctaagataacgtttgcaagtaccataagcaccacgtaagtcactatctcaaaacctgctccgctcattattgagtcaataactagttttggtaaaaatacatttattagtaaaagtcctgctgatgataaagaggctagtaagattaaaaatactgttttcttggagtattcccaaattgatttgatcatgaagccgtatatcttcatatgttctttaaagtttttcatatttaggcctcctctgtatagtacttaccttgtatagtgaacatttcgtaatattcacccttctttttcataagctcatcgtgagtgccctcttcgaagatctttccgccctttaataagataattctatcgcagaactttgtcgaagacagtctgtgcgagatgtatattgacgttctgtcctctcttaagtcatttagcctggaataaatttcgtgctcagcaagcgcatcgaggtttgctgttggctcatctagtataagtataggtgagtccttgtacacagctctcgagatggcaagcttttgctcttgtccgcccgatagctcaagagcgtccttagctatctcatgagacatatttctttcgtaagcgtttttctcttcttcaatacgctccttaagtcccacgtcctctatggctctcttggctctttctaaatcataagtttcacgcatagaaatattattaccaagtgtatatggatagatatttacctgttggaatatgcaggcaaacatcttatatagctcttcttccttgaactcattgatgtttacgccattaagaagtatctcgccttcgtctggtctaaataatcttactaataaattgattatggttgacttgccctcgccattgttaccaactagagcgatggtttcattcttagctatcttaaagcttaagttatcaagcactttcttgtctgtatttggataagcaaagctaacatttctaaactcaatatcaactgcgccactaagtttatctctagtgccatggtctgaatttagcttatctgtatcaatcaaatcgtaaagattctctacgtacaatgattggtttactacataatattcatagtcttctatagctctatctgctgtaaatacaaattgcagcataagtgttagatacattaaaaagctaccagtatcgactgaaccgtttttaaaattaagtataagtgtataagcaaaaatgtcctgtgcaatgattaaaataagaaccgataaaaggctctttctaaaagttttagctacagctcttaggtcatagctttttcttttatcaataaggctcttgtaagtgttaagtatcatgtcttttaaattaaatagtcttatctctttaccagatttaaaatcgccagctgttctagtaaagtatctaatgccgtcgcctatcttgctaagttcttccatgttgtcagtaacttcagtatttgcctttctttgtgcataagcgtagctaattacatataaaagtaagagggctccagttattggtgatagtactgtaatgattgcacctataaatatcattgaaagtagtataggtgccgtttgagcaaagtgttgtagcattccaacaacgccttgcatatcgccagctgttgcttcaaaggccatgccatatatcttgaagagagatctatcacttatgtatttaaagtcggcagctgccatctttttattttgctcatgcattagctcaaatctagttttattagcaactagtcttgcttgtgatgcgcagtaaaggcttacgccctcaactaagaactccaaggcaaaaaagccaagcgagattagtaaaatccttctaatcgcgtctgtgccaggattttctacgactccaactattagcttaggcattagtgataaaactagtggagcgaaggcccctaagagacaggcaaataagatgtataaaatcatcttcttgtctattctgatcgcgtccccaagcaggcgcttcagtgtttttgtgtacttcatttctctcctcctacgagttaagctctttattgacgttaactaaggcaagttctgcctcgtcaagtgcgtccttaagctttttactcttctttaagtgttccttcgtatataatttatttgagctcataactatgtttgagaaagcggctagaagattgtcaaagctcttcttaagctcttcttcgccagcgagcttgttcttatgaacttctatccttgcactttcaccagtagctaggtcaatagtttcgccaagctttggtacgtagacatcaaggccttcgtctctaattaacttttgcttcaaaatttcttgtgcatcgctctcaccatgaaccaagaatacttttttaggcttagtctcaaaggcatctagccactttagtagcatattttgatcggcatgtgcagaaaagccttgtaagtcataaacttctagacccgcatccaccatttgaccaaagagcttaactcttcttacgccgctaagaatgatgcggcctaaagagccttctgcttggtaaccaactatgacaagtgagtttctcttgtcccacaaacagttctttaagtgatgccttattctgcctgctgtcatcatgcctgatgatgcgatgatgacctttggtgcctcgtctgcattaagtgcctttgactcctctgtctcgcggatgtactttaggtgcttaaacataagcggatcatcgcccgacttaagcagcttttgtgtatcctcatccaaaatatcgtagttacgcataaaaacttctgtcgcgtcgaccgccattggcgaatcaagaaaaactctgatattattattttttctcttctcgaactctttgtttaataagtatataagctcttggcttctaccaactgcaaagcttggtattagaacggttccgcctctagcaacagttttatctatgatctcaatcagattttgggtgctgtctgtaagtttttcgtgattgcgattaccataagttgactccattatgacgtagtccgcgtccttgatgaatgtcggatcctttagtagaggcctatctggcataccaaggtcaccagaaaaaacaagtttcgtctctttgccatcttcatttatataaatttctataatggctgagccaagtatatgacctgcatctctgaaaacgattttgatgccatcaaaaagctctatctcttcaccataagcgtagcccctaagtagtttaagggtctcatcaacgtctacgtctgtatagagaggctcaactggatcaaggccttgacgaagattcttcttagcctcagtctcggcgtcttgcataccaatcttggctgagtcgtaaagcataactggagctaggtccatagtcgccttagtcatgatgacttcgccgtcgtagccgtccttaaccatcttaggaagccttcctatgtgatcgatgtgtgcgtgagttatgagcactttgtcaatgtcccctacattgtaatcaaagggcctcctgttcagctcttcaaggtccttactgccttgaaacatgccacagtctatgacaatcttcttgccacaggcttcaagtaaatagttggagccagttacttcttgtgctgcgcctaaaaaacttagtttcatattaactctcctttttcataaatatcctctactattgcgtctatgtcaattttttcttcttcgcgtttaacatcagctattagtggtctcgtttgtggatggtctggcgaaaatactgaacagcagtcgtcaaatggttctatggacttatcataagtgcctatctttttcgctatgtcaatgatgtcaagcttatcaaaggctatgagcggtctaaagatgaccatgtctgtcgcgtcctctatcgctttaatgccatacattgtctgagatgcgacttggccgatattctcccctgtgatgatggcgtcgtaacccttgtcatgagcgagcttcttcgcaacgcgcatcattatccttcttgaaacgactgttgtgtacgaaacgttcatattttgattgatggctgtgtaagcgtcaagcatattatatgaatatagcttgatgtcacctgtatagctagcgactatatctctaaggcctttaaccttctcaagtgcttgcagcgaggtaaatgggtatgagtgaaaatgtattgcgtcgaccttaacgccgcgcttcgccatcatatatagagcgactggactgtctataccgcctgataataggcaaagcgccttgccgttagtcgcctttggcatgccgcctagcgccttgtgcttttctactgaaacgtaggcaaatttccttatatcgacataaacttcgtgctcaggactgtggacatcaaccttaagtccgtccgtatttataagtatagctgcacctatgtctcttgcaagctccatcgaattaagcgggaacttcttgtccgctcttgttgacgatgccttgaaagtgccttttaaatttttttccttcactaagtcaatagcgaggcttctgatcacttcgatgtccttctcgcatctataagcctttctgatccaaactatgccgaagaccttcttcaaggcctcaatcgctttttcagattttgcatcgtccacttctataataatcttgcctatatcattataaaggatgtcgtagccaatatcttttaagttcttgtcaatgtttgaaataagtttttgctcgaagtaccttctgttgccgcccttaaggtgcatctcgccctcactgattatcaaatacactttatccatcatcattttttaacactcctaataaatttaaccgcttttttaataagctccgcagccttcaagacctcttcttcagtgttcatctcagaaaatgacactctaaccgtctcttcagcttctttttcaccatagccatagccttcaagtactctcatgtgctttttttgcttcgatgagcaagcagaagacgttgatatatagacctcatcttgctccaagatgtgcaccaagacctctgccttgatattatcaaaggctacagacataacgtacggcgaatagccctcgccctctgagtgaaccttaacgccgtcaagctcttttaagctagctatcattttaatctttaaattttgtacataagcaaaattcgcttccaagtttttgtcaagcaccttaaccgcttcagctagagcaagtacacctggaacattctcagttcctgctcttagagaaaattcttgctcgccgccatagataagcggcttaactaaattcacatcgcgtgcataaaggcagccaatgcccttaggtgcgtgaaccttgtgccccgacatcgacagaaaatcaatgtttccttcgcttaaatcaatacgaagcttgccaaaggcttgcaccgcatcagtcgcaaaaattatatcgggataaagcttctttacttcacaagcaatgctttgcacatcgaagatgctgcccacttcgttgttgacatgcattatggagacgaagccaaaactatcatcaagcttagttaaaatgtcttctaaagtaatttgtccgtcctttggatgaagctttactacttcaaaaccatttgcaattaaattgtcaataggcttgttcatcgcttgatgctcgaccgccgttgtcagaattttcttcttctttatatccttgatcgaattaaggatgatgttgttcgcttcgctagcacaagacgtaaaaataatctctccagtcttgacattgagaaagttctttatagccctcctcgcttcttcaaagtcattccttaataagaagcctgccttatgtatgctcgaaggattagcgtaagtcacttcaaacgcatgaagcgccgcctccatcgcctctttatatacttttgttgttgcacaattatctaaataaatcataatcctcaccacttctattatattataaagctgtgtaaatagcaataaaaaacgcatatacataagaaaataaagtaaaagaagcatcttcatagatatataaaaatttgtttgaatcttcgatatattttaataattgtcttgaaaataatcaatacttgtgatagaatatccttatatataggaggaaattttatggacataagacaaatagaaacttttgtagaggtcgtgagactagaaagtttctcgaaagctgcagaaaaactatttataacgcaaccgactgtgtctaatcacataacagctcttgaaaaggaagtaggtagcgaccttatcgacagaagcggtagactttttagagttacaccatcgggtaagatactatacgagcatgcagagaaaattcttgatcaaatcaacaacgcgaagtacgagattgatgcatatgaccaaggactacaaggcaagattagtatactttcaagttccatcccgagagagtacatactacctgatctaatcaaatctttcttggcagagcatccaaagataagtttctctttgcaaggaagtgactcgaaggaagctatcaaacgaatactatcatacgagaacgactttgcaatcgttggtaagatgactggcaatccaaagcttgacttcgtaaagcttgtgaaggatacgagcgtacttatagtgcctaacgataagtttgaaaatcttaagaatggtgaccaagttagctttgaagagctacttgacgaagactttatacttagggagtatggttctgcctcgcttgagacaatcatcaacgctatataccaaagctcgaaggacgcaaggaagctaaggatagttggcacttgtgatgacaatgaagcgatcaagtcacttgtaagcaagggcgttggtcttagctttatgaacaagattgcaattgagcgcgacattaatcagaagaggttcaagtacctttacatcaagggtgttgacttctcaagagatttctacttcttgtatcatagagagaagccacttagtccactaggcagaaggtttaaggactttgtattagagtacgttaaaaacatttaatagataacttaggagctagatacttagctccttttttgtatgtaaatgtgtgcataaaatttccaatgtattgtacatcgaaaagtgttttactcgcttgcgatgcttaatgtaaacgggcataagaaaagcagatgcgtgtgcatctgctttatatctttattcactaatttcgaagagaaaagaagaacctcgtactaaagtccgagaacctttacgctaggatggataagacgaagtggagctttgaggcaagcggagtgtatagggcatactcgagcattgccgaaaagtgaacaagcctaagccgccattttaattcgaaattttttattttactaagtgacaagcaacaaaatgtccgttctcaacttcctttagtgtaggatgtggacctgcgcaaacattctcgtctctcattgggcatctgccgtagaatacgcatctgtctggtgggtcgatagggcttggtacgtcgcctttaagtataattctttcttgtttgtagtcatattcaggtacaggtattgctgaaagaagtgcctttgtgtatgggtgaagtgtgttttcaaatatttgcttgtagtctgcaagctctaccatacgtccaaggtacattactgcaactctgtctgaaaggtgacgaacaactgaaaggtcgtgtgatataaataaatatgttagtcctttttccttttgtatgtcttgcaataggtttagtacttgtgcttgtattgatacgtcaagtgctgatactggttcgtcaagtactatgaactcaggtctcattactagggctcttgcgataccaattctttgtcttctaccaccgtctagttcgtgtgggtaggagttcataagtctcttttcaagacctactgtctccatcatttcaagaacaactttttctatctctttcttactatcgtaaatcttgtttacataaagtgcgtctgcaatcaagtcgaaagtgttaagtcttgggtttagtgatgagtatgggtcttggaaaacgatttgcatttcgcgtctaagttggtgcatttccttcttagtgtgacgattaatgatgttttcgccgttaaaccatatctctccacttgttggttcgtgtagtctaatgatggcacgaccagctgttgacttaccgcaacctgactcgcctacaagaccaagagtttcgcccttctttatctcaaagttaaggtcttcaactgcgtgtaggacgccttttttagtcggaaagtacttacataaatgttttacttctataaaattttcgctcatgactttcctcctctacttatcttctgactcattctctgtatgagcttcggcttctacacccatggctgcgtctttatataagaagcatttaacatagtgacctgggcttacttcgtatactggtggattttcagttttgcacatctccatgcacttagtgcatctagggtggaacttacagccagtcggtaagtttgttgggtctggtgtcataccaggtataacttgaagtctttcaacatcgccagttagagttggtattgatgagaaaagtcctacagtgtatgggtgcttcttgtcagtgtagatgtcttttgtagtaccgctttcaacaacttcaccagcgtaaacaaccgctaccttgtcagcaatttcagctataacaccaaggtcgtgagtaatcatgatgatggatgtatcaaacttgctcttaagttccttcataagctccataacttgagcttgtatagtaacgtctagagcagtagttggttcgtccgcaatgattatctcagggttacatgctagtgccatggcgataacgattctttgcttcataccaccagaaagttgatgaggatagtcattaactctctcacgtctaattcctactaggtcaagcatttcaagagtcttttctcttctaccgttcttatcaagtttagtatgtagagcaagtacttcttcgatttgcttaccaatagtcataacagggttcaagcttgtcataggatcttggaagatcatagaaatcttttcccctcttatctttctcatatctttttctttagtttttaatatatccttgccttcaaagtcaatctcacctgagctaataattccaggtggatcaggaacaaggtttagtattgcaagagcagtagttgtcttgccggcacctgtttcaccaacaaggccaagtgtctccttcttattaagagacaagttcatgccattaacggctttaacgacacctgaatctgtgttgaactcaacagataggtctctgatgttaagtaaatttcctttttccatagtaacctcctacctcttaagcttagggtcaagcgcatctcttagaccatcgcccataacgttaagagcaaagatggtaataacgattgctaaacctgggaacaatgtgatgtgtgggaagtccatgatgtatgaacgaccatctgatagcatagcgccccactctggtgtaggtggttcaagtcctagtcctatgaaggatagacctgccgcgttaatgattgcgtatgcaacacctagagttgcttgaactatgataggtgccatacagtttggaatgatgtgcttgaagatgattctaaggtcgcttgaaccattagcctttgcagcttcaacaaactcattatcctttatagttaaaacagagcttctaacgattctggcatatgctggaaccgaggctataccaacggcgatcataaggtttgcaaggcctgtgcctagtgcgctcatgatggcgatagctaaaagtatatctggtatagcttgaagcacgtctataaatctcataactagtgtgtcgactttaccgccgtagtaaccagtaacagcgcctagtgttacaccaagtgctaaggcgatggatactgatatgaatccaacctttaaactgattctagaaccgtaaacaacacgagagaatatatcacggcccaagtggtctgtaccgaaaatgaattgtgagttaggtgtttggtatgttggaccaaccatgtcattgaatgtatatggtgcaactacgtctgcgaatatcgcaaccaaaacaagtatgataagtataagtagacctaccatagcaagtttgtttctcttcattctctttaaaacttcactaagacctgtttgtctttttgattttttaactgattgttctttattcatatttttttctgccatatcatcacctacatatattgactcttaactcttggatctatgaatgtgtatagtatgtcgacaattagatttacaagggcaaatgtaactgcaacgaacaatacgcatcccataacaagaggtatgtctctcatcttgattgaatctaccataagtctgcctatgccaggaatactaaatataacttcagtcattagtgctccacccataagttgtccaaattgtgtaccgataactgttgtgatagggataagagcgtttgcaagagcatgctttctgatgataactttttgatcttgaccttttgccttagcagttctgatgtagtcttgtctaattacttcaagcatggagcttcttgtttgtcttgtgataacagaaactgattgagctcctaatgctatcgctggtagaacccattgattaggcatgtcaaagcctgatgcaggtagccagcctaactgaacactaaatagcatgattagtagtaaacctaaccagaatactggcattgatatacctattagggcgaatatcattgtcaagttatcgaatatactatattgttttacagctgagatgatacctataggtatacctaagataacagcaaatgttatagctaaaaacgcaagtctgattgttgcgcctgctctgttgccaatttcttgcacaacaggcattcttgttctgtaactacgacctaagtcacctttaagcactaggttagatatgtatctaccaaattgcgtaaagaatggatcatttaggccaagttcttctctaagttctgttacttgctcttctgtggctgatgggcctaagatgttacgagcagggtctccaggtgttatgtataataaccagaaaacgaagagacttacaagcaagataacaggtattaaatagaggattctcttaataatatattttatcataatgcctccgatataattgaactatgtgagggggaagatgtccacctccccccttcaccattttgtattattctactattttacaactactttgtttaatttgtagtaaccaaagctgttcatttcaaaaccttcaacattcttagatgttgctacagttaattctgaccagtattcaggaatccaaatttgattgtcaagaatgtactcttgagcttttctgtagatttcgcctctctttgtttcgtcaagttcttgtctagcgtcatctaacatcttgtccatttctgggtcttctaaccagcagtagttaccgccttcaccctttgcacttgagtggaagcaagggaataagaatgcgtctgggtctggtgtatcagaagtccaagcgatttcaaacatatcttgtttagcattctttaatacgtcgttaaatgcagaccattccataacattgatagttacgttgataccaacttctttaagttgttctttgatgatagttgccatgtcaacacgttgttttctttcgttagtagagatagatgtatcaaagccgttaggatatcctgcttcagcaagaagtgccttagccttttcaatgtctctagttctagccttagtttctccaccgatagagtattttaatgttggtggcattgagttagatgcagtttttcctagacctaaccaaacctttggaattaagtcgtccatatcgatagcgtatgctatagcttgacgaacctttggattgtcgaaaggtgccttttgagtgttgaatcctaggtaagttgtaccatagtcagctgattttaacataacaagattttcatctttttcaactttttcaacatcaagtggttgtagttcataaatgatatctgctccaccagtttgaagttcaactagtctgttagttggttcagggatgatcttgtattcaaccttagccatcttagccttttctccatagtagtcttcgtttctgcttagcttgatagcgttagctttagaccactcgtcaagcttaaatggacctgtaccgcaaaccttatcagtagaagtaccgtagctgtctccagctgcttcaacttctttttggcaaaggattgctccacctggatgcattaatgatgaaatgataccaggataagggaacttaagattgaatcttacagtgtaatcgtcgtcagccttgatagaatcttcatcgatagtattgaacaagtgcttaacgttaggtgcttcacaagcacgttttaatgagaatacaacgtctgatgccttcatttcgtcaccattgtggaacttaacgccctttcttaggtggaaaacgtattcagtatcagataccttatcatagctttcagctagtagaggaacttcttctgctttgtcgtttagttcgaatagaccttcataaatttgaactaaaactttagaagatgcgttatcgttagttcccattgggtctagtgatatagcatctgagtcgttagcgattacaagtgtgtccttgtcgcccttcttttctccagttgacttgttgctgccacctttacaagcagtaagtactgtcataacaagcgctagcgctaaaacaagtgaaataaacttcttcataaaaacctccttgcatttctgcgtttgcttaagacctaagtggtcctagctaagattagagcctataatatgtatcgtttaggtgttaagtcatacaagagagtcggcctataaactctattgatgcctaactatgctacactctacttaatcgagactccttcttatattataacaccacttacatataattacaagatttttttgagaactcatacttaagtaatagacttcaacacttgtaggtgcaatcagtctaaagtatataagttcgtttatatgtatcaggctacgtgtatatggcacatggtatagatgatgccacacctatatatagaccctttgctatgtatatagagccttcttatatatagactcgcttactatgtatatagagcaaaataaaagacagctaagatagtcttagctgccttgatggatttaaaatgactttgcgaggcgtctttgctcacaaatttatcagatcaatctttatttattcgtaatgttttagatcaatcctagtttattcactagttttgcagagcaagcgtgatgattgcgcgacgtggaccgacgaggcaagcggaatgtacaaatgtacctgagcattgccgaggaaggaacgagcacaagggctcgcttgaatgcgaaactaattcaagaattttattgcttgagagcgcgatttgacgcctaattttctatatatgtttctcgcatgtgtttttgtggttgagactgttatataaaacctttcggctatctctttattgctgagtccgtctttgatgcatagtaggatttgcttttcgcgtgggctgagtgtgtcgtataagtctttgtggtccaaaaagtcccctaatttttgttccgttttgatgctgaagttcttttcctttgacacgaggacgtctccttttctcatagcaaggagggcgtcgtgaagtgcatcgcgtgtaagctctttatccatgatgccgtctaagtggaaatcttttggagatatgatcatctctaggcttggcttgtttgtcataagaagtattctgtagcgtctgtttttaacggcaatctcttgtagatctgtaatccttttgctctcgtctagctcatcatcgacgtagataacaaagtctacgcttttctttgttagatagtcttgcgctagggatgcttctctaaagctctctacgacgtgcatgtcactaaagagtgagagtgaagctctaagacctagtgcatatatatgtgagcctccaactattaatactctatatgatttaagcgccataaacgacctttcctctcttaattactttgtatgtgtggtttataccgaagtgatatacgaaataatcaatgttttcgcagttgaagatggcgatgtctgccttcttacctacttcaagcgaacctatggattccgatctaagtacgcttgctgctgcgttgatagttgctgcattgaatacttcttctggtgtcattctcatcttgattgaagcgatttgcatagctagttgtatgttctctgatgggcatgatccagggttgtagtctgttgagatacttactgggcagccttcctctatcatctttctagctcttgcgtacttgcctgtgtttaggttgaaggctgttgaaggtaggacgtttgctataaccccattagtcgccatcgcctttatgccttcgtctgaagctcctatcaagtgatctgctgagacgcactttagctcggcgcttaattccgccccgccaaagctaataagctcgtctgcgtgtatcttaagtttaaaaccagcatctcttgatgcctttagaactcttcttgactcttcgatagtataaacaccgtcttcacagaagatgtctgcaaactccgcaagacccttgttcataactgtaggattgtactcgttaatgaccttatttataaaggcttctctgtcatttttgtactcatcaggcatagcgtggcatggcataaatgtcgatactaagtcgatagggtggtcttcgtttaatttctttgcaacttctagctgctttagttctgtctcgaagtcttctatgccgtagcctgactttgcttcaactgttgttacgccgtagctaagcatgatatctaatgagtgttttgccttttcatataactcttcaaagcttgcttctttagtatgcttttgtgttgcgtgtatgccgcctcctgcattcatgatgtccatgtatgtcttgccgtgcagcttcatggcaagctcgttttctctcgagccgccatgaacaaggtgtgtgtgcgagtctacaaggcctggtgtaactaatttaccagtagcatcgatgacagtagccttactttcatcgactcccatagtcttgtactcgtccatagtaccaagtgcttttatcttgtcgtcttctgttattatatatgcgttcttgattacttctacttcgccttgtgccttgccagctttcactgtgccatgtgcctttgttgcaagaagcgaagatatatttttaattatgacgctttgcttcatattcatccacctttgccatttctttttctataatcttgtcgtcaactagataaggaatagtaatgtggtcagtgtccttgtgatctttgttgtattgtattgctgtttcgattgagtggtcgtttctagcccagcttcttcttgctacaccgctcataacgtcccaaggcattgctgcctttaagatagtgtctactctgtctgatccgtctagaaccataccgaagccgccgttgatggacttacctataccaacgccgccgccgttgtgtagtgcaaccatggacatacctcttgcgcagttacctgcaaagcattgtgtagccatgtctgccatgatgtttgatccgtctttgatgtttgatgtctctctaaatggtgagtcagttcctgatacgtcgtggtggtcacggcctagcatgatagggccaacttcgccttttcttaccatgtcgttgaacttaagagcgatttttagtctaccaatttcgtcttggtatagaattcttgcttgagaaccaacaactagtttgttcttttcagcgtctcttatccagatgtagttatcaaggtcttgtcctcttctgtccttgtcaatgcattccatagctgcgtggtcagtcttgattaggtcttcttccttatttgataagcaaacccatctgaatggtccgtagccgtagtcgaataacattggtcccatgatatcttcaacatagcttgggaagatgaagccttcagactcatcaacaccgttcttagctatctctttaacgcctgcatcgaaaactgatttcatgaaggagttaccatagtcaaagaagtatgttcctctatctactagtgtcttaattaattcaaagtgatgctttaatgtcttgtcaacaagtttgcagaagccttccttgtcttcagcaagcatctttgttctttcttcgaatgttaagccttgtgggcagtaacctccgtcgtattgagcgtggcatgatgtttggtcagaaagaagttctacgtgaatgtttttgtttacgcagtattcaagtaggtctacgatgttaccatgataagcgatagctctaggtatcttcttttcctttgcatcgtttgcccacttaaatacttggtcaaggttgtcagatgattcatcgatccagccttgttcaagtcttgtgttgattcttgatatatcaacttcggcgatgataccaacgccatttgcaatcttagctgccttaccttgagcgccactcattccgcctaaacctgatgaaatgaagatgtggcctcttaagtcgccatcgtgtggtacgcctaattttagacgtgcagcgttaagaactgtgttgtatgttccgtgaactataccttgtggtccaatatacatccagccgcctgcagtcatttgtccgtagttagcaacacccattgcaactgctttgtgccaatgcttttgattgtcgaactcacctatcattaaagagtttgtaattataactcttggtgatgtcttgtggcttctgaataagcctagtggatgtcctgattccataactagtgtttgttcgtcagtaagattttctaggtactttttaactagtctgtattgcatccagttttgcataacttgtcctgtttcgccgtaagtaacaagctcatatggatatagtgctacgtcgaagtcaaggttgttatctatcattagttgtattgccttaccttcgatgcatttacccttgtactcgtcgataggtttagccttgatattgccttcaggtctaaatctgtagccgtagattctacctctagtcataagttcttccataaactcaggagcaagttcagcgtgaagctcttctggaatgtatctaagagcgtttcttagtgcaagctcgatttcgtgctttgaaagagttagatctctaacaggtgctcttctaacctttggatcaatcttgtgcatcggtggcaataccggatcaagtttgattgtcatcgcatctttaatatcaaatttcataagtgacctccttacttaatatctatctaagttctcctacagccttttcaacagcgttaagaaccttgtcatcagctaataattcttcagctttgttgatttcaaagtacataaccttgtctttgtcgatgtagtcaattacttttcttacttcgtcataagcagccttagttcctctgccaagacccttgtctcctcttatgtcaatagcttggcatgcagcaaacatttccatagctataacctttcttgcgttaaggtagatttccttagcctttcttgcagctatagtacccatagatactaagtcctcttggttagctgaagatggtattgagtcaacacttgctggatgagcaagtactttgttctcgcttacaagagctgctgctgcgtattgaactatcatgtagccagagtttactccgccttccttaactaagaaagcaggtagtccttctgataaagcagggttaacaagtctttcaagtcttctttcagatacgttagcaagctcagatatgcctatacctaaaaagtcgaatggtagagccataggttcgccgtggaagttaccagcactgataactgcttcgtcatctgggaagatgattggattgtcagtaacagaattgatttcgatgtcaactttgttctttacatagttaaatgtatcctttggtgcgcagtgaatttgtggaacgcatcttagtgagtaagcatcttgaaccctcttttcgccttggcgagtgatgttctttgatccatcaagaattgctcttacgttgtatgcagtgtcatacataccttgatgacgtctaacgtcagcgattctttcatcgaatgcatcaatgataccacccatagcttccattgtaagcgatgtagcaacgtcagcaagcttagaaagcttcatagcatcgtatagagtaagtgtaccaacagcagttaatacttgagtaccattgataagtgctagaccttccttactagttaattcaatagtttcgatgccagccttgtccatagcttccttaccagtcatcttcttgccttcatagaaagcttcacctagaccaagcataggtagaaccatgtgagcaagtggagctaagtcacctgatgcaccaagtgagcccttctcaggtatacatggagtaacacccttattaagcatagctacaagagtttcgatagtttcaagtcttgctccagagtagcccttagataaagagttagctcttagtaggatgatggctctaacgatgtcttcgtcaaataaatcgccaacaccacaagagtgtgacatgattaaattcttttgtagattcttagtcatatccttagagatatgtacttcagagaactttccaaagccagttgtgattccgtagataactctttcttcttcaacaaacttgtcaacaagctttcttgacgcaatgattctctcctttgcgtcctttgagatttcaacctcagcatgacatcttgcaaccttgacaacgtcttcgattgtaagatcttttccattaataacgatctttcccataatatcctccttttattatgttagtactctgataaagtaaaaaggaacgcacacagcgttccttctatctataaatattaaaattgtgagcaaataaataattgtgtatgtaagtcatacctctcacctcatcaataagtattataccatagataaaatttatagtcaaggacaaaatatatcgataaggcatgggtatatataaaagaggtgatatacatggaatacgtaaatctatatacaaggcagcacgagaacagcttgtacgagcttaaaaacaaaggcgtcatacagaacaaaagactctatgtaagcctacatatgagagacatctcagactacttcttagaaaagtacgaccactttgtgaagatggcagcaaagagagtagctaagaatgatgatgtagcctaccctatatggtgcagcgtctcaaaggctaactgcctaaagcctatagataaggaagtcgtgtatgcaatcacagtaccaaaagacgaagtcatctactttgacggcgctaagtgggaccttgtgcttaacaatcagtacgtgccacttgacaaagaagatgcaaagcgcttcgaggacgtgcttaaaaagtgtggtgcagacaaggtatacaacatcttcgagcgtaaatacaacgggatatttgacgacataagagaagaaatcgtatctagctgggagaggatattcgatatcacagacagaagcgagtttgtcgtgcaggcaaacctttggcaaataaagaaggattgggttaagcatatagtttatccaggagatgacttctttgaaatagtgagtgatatggaggagacgtgggttaagtaataagcattaaaaaagggagctttcgctcccaattttttgatttaattatgtggtactagtactatacttgcaaatcctttcattataggtggatatacatcaaatctaaataccgtaccatttttgtatataaatataaacataatatattttccactgtcaaattctgtagcaacataatttacttcgtagtccctagagaagatttctccgccaaatcttttagcatcagcgatttttctttctgctatttcttttaccatttcttcgctagcatcataattcaattctcttaagatttcactagccttcttataatctttgtctgcaagagcatcatgaaccatagtaaatttttcttgtagttcttctttagacatttttctaatatctttttcatcatctataaagcgaataactggtccaacttgtgcactactcgagaattgaaactttccttctttttcagcgggaacagttttcattatactaactccaccacctgggtaagtaaatttaattacatgagttctaaatccatcgacatcttcaatgcttttttcaatctttgcaccttcagtatatattctagcgccatatagtgtagacatgtttacaatagttgccatcggattgtcatcagttagtggtacttgatcataatatttatacttattaacaacagtgttgttttgagctatcatacggtcaaaaatagcattatcttctttagagaatttttcttcagttttttcttctttcttatcttcttttacttctttaaagatatagcacttatcatcaatctcaacagttatgcttccatcagttccaatttggtactcatatccagttccaaagtttgattcattgtccttcttaggcatttcttttgcatcaacgcttgttaatatcttgccatccatagttccacatttcatgttcttattaatttcttctgtgtccttataaagcttagacttaatcataacatagcgaggagccttagctgcttttacttcgctagataataaaactgttttagtcttctcatcatagcctacatcaaagcctacaagcgcaccaagatctcttagttgcatataattattgccttttataagagctgtctttatgtcttttgcttcgccgttaaccataattttcttaacttctaacatagcttttgctttagcatctttgatagctgcaaggtcaccagcttctttagtataaggcttatctgtttcaactatgactaaattcttttcagcatcatatccaacgttgaattgtgactttttagctgtcatgatggctgcaacgtcacgaagttttacatagttatgcccttcaatgttgtaagcgccaatgtcaacagcttgtccgtcaagcgtaattttttggctagtctttctagcattggctgtcttgctttcagcaaacgctgttggcagtagtgttactagcattaatattgcaagtaacagtgaaattttcttcttcataatattcctccttaaatagatttgttaactttattatactacttaagaaatataaaatcaagccaaaagaagggagcaaaagctcccttctttatctgtataaactatttattttctttttctaccttagtatctttttcttcttttacttcttttgtgtcttctttcttatcttctttcttatcttctttcacttcttccttcttttcctctttcacttcttccttcttatcttcttttacttcttccttcttatcttctttcacttcttccttcttttcttcttttgttctacattgaatatctaaacttacataagtaggtgagtaattgtattgcatttcaagttgatctttagttccatagtcaaatgtatataataaaattgtatttgcaaagaatctaattgttctgcttgtataagtgtacttatccttcaatacatcaaagccctttgtcttttcttcaatgtacttcatcatcttgtccttgtcgccatctagtcctaggctcttgaagttttcgtaggcagcatcataatcctttttagcataattataatgaagagtccaaactggtgcagtgtttaggctaaagttcaaatccttatacttatagtgatcatcagcatatccttctttataatgatccccttcgtaattatttatgcccatcaggtagttgactccactgtctggtttaaaaaagtctaaagttattgtagactcagggctgttgaaaaataccatataacccttaccgtcagcataattttcaattctcttttccgccttatagtccttattgtactttgtaatatttacaagtttaactaagtttttcatttgtgaaacatagccattgcattcttcatcagataagttattaaaagttagtgctcttgtatacttgtattgatcttctgtgttatcatctgccatagcattgtataagccttcaatgttattaaaaattttctcatcatcttcagtgaattcatttgttataaagccatcatagcttggatcgtctccatacttagactctagttctatagtgctagtcttcttgtcatagttaatgctaaagcctacaagcttagctaagtctctaagttttaagtagttgttgccattgataaaagcagtttgagcactcttttcttgataaatttcagaaccttctgggttgtggtttatcaaaacatttttaactgacatcttagcctttgccttttcatcctttagctcttcaaggtcgcctttaatcttcttgtaatctctgccctttagaatgataaaagaattattttccttgtcataagcaacgtcgaacttcatttctgtgccattgaacatagcagcaaggtcacgtagcttgatgtagttggagttattgatgttgtagaagccaaccttaacttctttgccatcaagagttaatttttgactagtctttctagcctctactgttttgctttcagcaaatgctgttggtagtagtgttactagcattactattgcaagtaacagtgaaagttttttcttcataaaaaatcctccttaaatgaatttattaacttcattatactactaaagagataaaaaagcaatccactttatataattatcctctatactttctctctatttattaaaaatatttaataattactttacacacaagcttatccacatcagagatcgctatttcacaattataaacatacttatccactttatccacaggtcattttcataaaaatagtgcttgacaaagctattttcttgtgatttttaatttatccacagacttatccacaggcgtgccctataatattgtccccagcaataaaaaagctctgctcgtaaacgaacaaagcttaaactcatattattaatcgtcaccatcaactaggtctgatgaaacgtctggaaggctccacctgtacttcattgacaaaagccttaagactactgtagtcacaactcccataaagaaggcaaagtttgctccatatggccttagaatgatgaaggctacagctccaagtaatgaggcaactgcgtatatggtgttttttgtgaatataatcggtatggtgtctgacaaaaggtctctcataactcctccaccgcaacctgtaatcacgccgacgaagattagtaggaaggggttgttcatatagccgcgcgctatgccgactgttacggcactggctgtgaatataccaaggcctatggcgtcaagcactgaggctatttgagtgtatttaatcataaagtctctgttaacaccttttaggcttaggatctttatcttcttcgataagaatatgataaggatcaaggctgtcactatcgaaacgcttgtgtatgtagtgtctctaaatgccatgggcggagtgatgcctagtgtgatatctcttatgatgccgcctcccaccgctgtgattatggctaggaccactatgccgaagatgtccatgccctttctaatcgcaacaagggttcccgacgatgcgaaggcaactgtgccgactatttctgctatatagtaaaatttctcgtaatccatagtatctcctctctgggataattataccacaaaattgatttttctgtgataatatttggacgcacacaaaaaaaagtgcacatcaatcgatatgcaccttctatactattatatattacgatctcttcttaatccatgttatgatctcgtcaagtcttctttgtctatgctttggcttacccgaacggcttagctcgtggttctcgccgtggaagataactatcttcgagtcgactccgaagtacttaagcgctgtaaacatttgcacgccttgttcaagtgggcatctgtagtcctcgtccgagtgtatgaaaagcgttggagtcttgacctcgctcgcatattttaatggagagcgctcccataaagcttcaggcgataggaacggatctgcaaggttttgatcagtcgcaaagtagtagccgatgtccgatacaccgaagaagcttagccagttcgatatagagcgttgcgacgcagccgacttgaacctgttagtatgaccgatgatccagttagtcatgaagccgccgtagctgccaccagtgacgtgaaggttgtccctatctatgtcctcatacctttccaaagccgcatccgtgaacttcatcaaatcgtcgaagtcgatagtgccgtacttgcctctgatattcataaagtcgttgcctctaccatcagcacctctcgggttagtgaataaaacaaagtagccttgctttgcaaagtataggtactcgtgatataaaagctccccagtaacagtcttaggtcctccgtgcacctcaagtatcgcagggtacttcttgcccttcttgtatccatcaggcttaatcacaaagccctcaaaatcaatatcgtcattcttaaaagtaatcttctcatatggcttagccttccaagccttcaccaaagcctcgtttatggctgtcactttcttaaacttgccctcttcaaacttgtagacctcttgcaagttgtagtcaagcatgccgatggcgtagatgccactctcacaggcgtcaaactcgtcaacagagcctactaccttagaaagcctttccactttaccagccttgtcaatagcgaatagatctgcactattcgcaagtgtagctataaagtaaagcttgtccttcactgccctaaacgagtagccgccgccataacgaaggtcgcttccaacagatgagccaatggacatatcaaagtcctcgttaatgcacctcatgccttccttagacttgtcgattaggtagaccttcatattttggtttatgccgtgtgcctcttggtcagtcgcaaatataaagacatcctcccctgcgtaacttggtccgtagtaagttaagtcctcatcgtactcaagcttcacagatttatcgctctcaaagctatatacataaagctgactctttaaaggcgccttgtcagtgtatgactccgaagtgtagataatctccgacttgttaggagctatgtcgtagctcgatacattagtaaagtcatcagtaagaatcttaagagcgccactctttatattgtagatggcaagcgaagtacggatcttgttgatgtagccagcgccatttaagtagaaaggaatctcgtcatatatagtgtagtcgtcctcttgtttaatttcagccgacttcttctcgtaagtctcctgatccatgtccttaaagtgcctaatcttctcagagtttgagatcataagcacaagattgtcctcatccaaaacgcgcacactgtttatagggtacataagcctaaacagctcctgtctctccccacccgtaaagcttaagcggtaaacaatagacgcatactttcttttctcatctgactttgcaaaaatgattccactattgtcaatagcataagtagaagagacgtcattagtagacagtctcttcaaagaatcattctcatcaagcatgtagaacgagtttttgtacccgttcgaagccatatccacgtcagttacagtgaagaccttgctgcgtccgtcaggcgaaatcttaagcgcagatacaggtttgtttaatttaaaatcatctatcttaatattcattttattccacttcaattaggccgtagttgccatcctttctcttgtatactacattaatcgattcatccttagcattttggaacacgaagaaattgtgtcttagtagttccatttgaaggatagcctcatcagaagacattggcacaaccttgaacctcttgttcttaacaagcttagcctcatccacttcttccataggtttaatattttcaaaccttatcgagtcgttcttttggtatctgttttgaagcttagttttgtactttctaacctgtctttccaaaacatcaaccgccttgtcgatagatgtgtacatatcgtcagtctcttcctccgccctaaggatagttctgtctaagaatatagttacctcaacagccttagaatttctaagagccgagaaaacaaccttcgcgtccacatccttgccaataaacttgtcaagcttttggaacttcttttcagcaacgtcctttagactttgagttagttcaatgttctttcctacaaattcgattctcataagcttacctccttaatagattttctaatatatatatacccgagatagaagaaaaataaaacagctttataaatttattaagagaaagcgtgaaataatttatgtttgagtttatggtatagttttgatcatatatatgcaataaaaaaggaccgcataagcagtcccaataaaaattcttagttagcactttcaagaaagcaaaaattttcaagttttgaaagtgggaatggctttaaattgaattactaaatatttcttttgccttacttaaactatggtatttattattaagtacatatctacccatttcaaaaattacacctgaataaaacattaaatcatcactaaattttaatttgcttaaatcaataatttttttgtctattttttttatgtagttttcaccatcaaattctactaaatcataaagttttgaataattatgccactctttaattattgtgtgatcatgatttttaattatagctaaaaattgcgtgtgattagctccattacaaactaaaatattcataggatacaaataatgattattaatatttctactataattgatacaatcaaatttatttttttcgtttatgttatctaaatttattatcaaagaacgcttcttccataaatttaataaaattggtaattcacttagttttatttttattggatattcttctactaactcaatttcatccgtatgataatattttttgtcatcttcatttatataatcagttacaaatactttatgattttgaaaaacagcgtcttctatttctttgtaaatattttctatatttgaattatactcaagtttttctatactctctactgcttgaagtgcctctgagaaattcaaataattgacaataagaaaagttaaataatttgctactattacttcatttatgttaattacattttttattttttcatcttcaattaattttatataacttaaaaatttttccttttttctgctcttttcatcttcttcatcagttggaagatttttgacgcttttgttttttgcaaaacacatgtttcactcctcctttacctaataacaaaggcatgtgagatatctcccgcatgccttgtcatttttgcaattatttaattataattgtttctcttatatttgttcaaatttgctgtgaaattttttacttaacttctacccagtcctcttgaacattacccttcactcttctcttaaatgagtgagtgttagtagcttcaaccatgtcataatatccccagaagcttccatccaagtcgatgaagaacttgatattgcccttagtaggacagttcatcgccgacatagcgtcgtagcttctttcgaaaatcttgttaagaattacaaccgcttcacatctagtgataaatgcgtttggtctgaaagttccatcaggataacccatgattctgccagcttgatattcgctgcctatagctctttcagcccagtgacccttaacatctgcgaatggtgcaacaccataaggcttgttgtcaatagttgatatcatttgagtaaattctgctctagtgataggtgcgtttggtctaaatgatccgtcagggtaacccttcatgatacctctttcaacagccgcgttgatggctttgttgtaccacgcacttggagtgtcagagaatactggtttcatagccgatgcgaaagtatctagaccaagaagtcttgttactaatgcagcagcttcagctctcttgatataaccgttaggtcttacagttccgtcaggataacccttcatataagcagtgtgttcatgaacctctctagtatctaccactttttcatcttcatgtcctgttctacgatcatcatctctaccacgtcttccgtctctatcgtgaccgcctggtctatatcctggtctatatcctggatagtatggatcatatccattatcatctctacctacactatgtcctctaacaggtatagagtattgaacaaagccgtaagtcaaatcattatcactaataattagacttattggaccgtcaacatcataacctggagttacatatacctttccatctgcagctacaaatacaggtatagatacgccatcttcatctctagctgtaacagtagtaccactatccttattgacaatgttgataccactgtattgcatatcatttgttggctcaactacatttggtgttcctgtaacataagtttttgtacttggatttggatctgtttcgaattttgcatttacatctatgtttttatctatagctgtagctgatgttaattctggatcccatcctttgaatatatagcctacttttgctgtaacttttggtgcatctgctgctaagtctgctaatgttttgttagctgcttttggaacatagaatgtgttttcttttgctactgttccttttgttgcatctgctttaaatgttactacccaatttcctgaaggatttggatttggtgttacacctggatctactggtcctactattggatttggatctgtttcgaattttgcatttacatctatgtttttatctatagctgtagctgatgttaattctggatcccatcctttgaatatatagcctacttttgctgtaacttttggtgcatctgctgctaagtctgctaatgttttgttagctgcttttggaacatagaatgtgttttcttttgctactgttcctttgttgcatctgctttaaatgttactacccaatttcctgaaggatttggatttggtgttacacctgatctactggtcctactattggatttggatctgtttcgaattttgcatttacatctatgtttttatctatagctgtagctgatgttaattctggatcccatcctttgaatatatagcctacttttgctgtaacttttggtgcatctgctgctaagtctgctaatgttttgttagctgcttttggaacatagaatgtgttttcttttgctactgttccttttgttgcatctgctttaaatgttactacccaatttcctgaaggatttggatttggtgttacacctggatctactggtcctactattggatttggatctgtttcgaattttgcatttacatctatgttttatctatagctgtagctgatgttaattctggatcccatcctttgaatatagcctacttttgctgtaacttttggtgcatctgctgctaagtctgctaatgttttgttagctgcttttggaacatagaatgtgttttcttttgctactgttccttttgttgcatctgctttaaatgttactacccaatttcctgaaggatttggatttggtgttacacctggatctactggtcctactattggatttggatctgtttcgaattttgcatttacatctatgtttttatctatagctgtagctgatgttaattctggatcccatcctttgaatatatagcctacttttgctgtaacttttggtgcatctgctgctaagtctgctaatgttttgttagctgcttttggaacatagaatgtgttttcttttgctactgttccttttgttgcatctgctttaaatgttactacccaatttcctgaaggatttggatttggtgttacacctggatctactggtcctactattggatttggatctgtttcgaattttgcatttacatctatgttttatctatagctgtagctgatgttaattctggatcccatcctttgaatatatagcctacttttgctgtaacttttggtgcatctgctgctaagtctgctaatgttttgttagctgcttttggaacatagaatgtgttttcttttgctactgttccttttgttgcatctgctttaaatgttactacccaatttcctgaaggatttggatttggtgttacactggatctactggtcctactattggatttggatctgtttcgaattttgcatttacatctatgtttttatctatagctgtagctgatgttaattctggatcccatcctttgaatatagcctacttttgctgtaacttttggtgcatctgctgctaagtctgctaatgttttgttagctgcttttggaacatagaatgtgttttcttttgctactgttccttttgttgcatctgctttaaatgttactacccaatttcctgaaggatttggatttggtgttacacctgatctactggtcctactattggatttggatctgtttcgaattttgcatttacatctatgtttttatctatagctgtagctgatgttaattctggatcccatcctttgaatatatagcctacttttgctgtaacttttggtgcatctgctgctaagtctgctaatgttttgttagctgcttttggaacatagaatgtgttttcttttgctactgttccttttgttgcatctgctttaaatgttactacccaatttcctgaaggatttggatttggtgttacacctggatctactggtcctactattggatttggatctgtttcgaattttgcatttacatctatgttttatctatagctgtagctgatgttaattctggatcccatcctttgaatatatagcctacttttgctgtaacttttggtgcatctgctgctaagtctgctaatgttttgttagctgcttttggaacatagaatgtgttttcttttgctactgttccttttgttgcatctgctttaaatgttactacccaatttcctgaaggatttggatttggtgttacacctggatctactggtcctactattggatttggatctgtttcgaattttgcatttacatctatgtttttatctatagctgtagctgatgttaattctggatcccatcctttgaatatagcctacttttgctgtaacttttggtgcatctgctgctaagtctgctaatgttttgttagctgcttttggaacatagaatgtgttttcttttgctactgttccttttgttgcatctgctttaaatgttactacccaatttcctgaaggatttggatttggtgttacacctggatctactggtcctactattggatttggatctgtttcgaattttgcatttacatctatgtttttatctatagctgtagctgatgttaattctggatcccatcctttgaatatatagcctacttttgctgtaacttttggtgcatctgctgctaagtctgctaatgttttgttagctgcttttggaacatagaatgtgttttcttttgctactgttccttttgttgcatctgctttaaatgttactacccaatttcctgaaggatttggatttggtgttacacctggatctactggtcctactattggatttggatctgtttcgaattttgcatttacatctatgtttttatctatagctgtagctgatgttaattctggatcccatcctttgaatatatagcctacttttgctgtaacttttggtgcatctgctgctaagtctgctaatgttttgttagctgcttttggaacatagaatgtgttttcttttgctactgttccttttgttgcatctgctttaaatgttactacccaatttcctgaaggatttggatttggtgttacctggatctactggtcctactattggatttggatctgtttcgaattttgcatttacatctatgttttatctatagctgtagctgatgttaattctggatcccatcctttgaatatatagcctacttttgtaacttttggtgcatctgctgctaagtctgctaatgttttgttagctgcttttgaaacatagaatgtgttttcttttgctactgttccttttgttgcatctgctttaaatgttactacccaatttcctgaaggatttggatttggtgttacacctggatctactggtcctactattggatttggatctgtttcgaattttgcatttacatctatgtttttatctatagctgtagctgatgttaattctggatcccatcctttgaatatatagcctacttttgctgtaacttttggtgcatctgctgctaagtctgctaatgttttgttagctgcttttggaacatagaatgtgttttcttttgctactgttccttttgttgcatctgctttaaatgttactacccaatttcctgaaggatttggatttggtgttacacctggatctactggtcctactattggatttggatctgtttcgaattttgcatttacatctatgtttttatctatagctgtagctgatgttaattctggatcccatcctttgaatatatagcctacttttgctgtaacttttggtgcatctgctgctaagtctgctaatgttttgttagctgctttggaacatagaatgtgttttcttttgctactgttccttttgttgcatctgctttaaatgttactacccaatttcctgaaggatttggatttggtgttacctggatctactggtcctactattggatttggatctgtttcgaattttgcatttacatctatgtttttatctatagctgtagctgatgttaattctggatcccatcctttgaatatatagcctacttttgtgtaacttttggtgcatctgctgctaagtctgctaatgttttgttagctgcttttggaacatagaatgtgttttcttttgctactgttccttttgttgcatctgctttaaatgttactacccaatttcctgaaggatttggatttggtgttacctggatctactggtcctactattggatttggatctgttttcgaattttgcatttacatctatgttttatctatagctgtagctgatgttaattctggatcccatcctttgaatatatagcctacttttgctgtaacttttggtgcatctgctgctaagtctgctaatgttttgttagctgctttggaacatagaatgtgttttcttttgctactgttccttttgttgcatctgctttaaatgttactacccaatttcctgaaggatttggatttggtgtttacacctggatctactggtcctactattggatttggatctgtttcgaattttgcatttacatctatgttttatctatagctgtagctgatgttaattctggatcccatcctttgaatatatagcctacttttgctgtaacttttggtgcatctgctgctaagtctgctaatgttttgttagctgcttttggaacatagaatgtgttttcttttgctactgttccttttgttgcatctgctttaaatgttactacccaatttcctgaaggatttggatttggtgttacactggatctactggtcctactattggatttggatctgtttcgaattttgcatttacatctatgtttttatctatagctgtagctgatgttaattctggatcccatcctttgaatatatagcctacttttgctgtaacttttggtgcatctgctgctaagtctgctaatgttttgttagctgcttttggaacatagaatgtgttttcttttgctactgttccttttgttgcatctgctttaaatgttactacccaatttcctgaaggatttggatttggtgttacacctggatctactggtcctactattggatttggatctgtttcgaattttgcatttacatctatgttttatctatagctgtagctgatgttaattctggatcccatcctttgaatatatagcctacttttgctgtaacttttggtgcatctgctgctaagtctgctaatgttttgttagctgcttttgaacatagaatgtgttttcttttgctactgttccttttgttgcatctgctttaaatgttactacccaatttcctgaaggatttggatttggtgttacacctggatctactggtcctactattggatttggatctgtttcgaattttgcatttacatctatgtttttatctatagctgtagctgatgttaattctggatcccatcctttgaatatatagcctacttttgctgtaacttttggtgcatctgctgctaagtctgctaatgttttgttagctgcttttggaacatagaatgtgtttttttgctactgttccttttgttgcatctgctttaaatgttactacccaatttcctgaaggatttggatttggtgttacctggatctactggtcctactattggatttggatctgtttcgaattttgcatttacatctatgtttttatctatagctgtagctgatgttaattctggatcccatcctttgaatatatagcctacttttgctgtaacttttggtgcatctgctgctaagtctgctaatgttttgttagctgcttttggaacatagaatgtgttttcttttgctactgttccttttgttgcatctgctttaaatgttactacccaatttcctgaaggatttggatttggtgttacacctggatctactggtcctactagtttttgaacagcttttgctgtgaatattgtgtcagctgtgatttctactgtgcttggatctgctgttgctgttttttcagcatctttgtaccagcctggtttttcatggtttgcagcttctttatttgttaagtctgggaatgcattagctgtagttaatttactatttggtgctacagcataatatttagtatctactgttcctacttggattgtgtcatcttgttttactgttactttataccaaccttctggaactggatcattttctccaatatcttgtccatctttaacaaatttagctacatatggatttaccgattgagctattccaagtgaaggatcccattttgtaaagccataattagtatttggagtaactttaatttctggtgctgttgctgttgtttgagtttttgttttaaagtgtttggataggtctgtatttggttttacctttgctactactgcttttccagtctttgttccaacagttactgttcctaaagctgtttcaccgtctttttctgcttggaatgttgcagtaatatagtttgatggaatttctttgccatcactacctgtttttggctcagtctcatctggtaaaaatggaattatttcatcagaagtatacctacctgtatatactgcgttaaatacataattatcagtttctgcagctgttcctgttagtgtagatgttaattgattccacttttcaaaaactttatttagtttagtatcgattgcttgtggtttattaagtccagctatagcatcttttacatctttatcatcatagcttgtgccaatttttacatcgacaactctttctttgtccttttgattgttttcatcaaaggtaccttttacgccatctgttgctgcttcatctgctttaaaagttagtctcgcatagccctctggttttgttggtaatgtaactgtaccgtcactattaattttaggtgttggaactaatacttttggttgtgattgaataactatgtctccacctttagatgtagtatagtctttctttacaactttgaattcatcttcgccaattgttagtttcctatcaactccttcatcatcaatagttatttttggatcattgccaatgctattgatttgtgatcttgtgttatcatatgatgttaaattttgaattattgtataaaagtcttttctagttttgttattgctagttgtgcctaaatcaaaactataatctttggcaagatgtagatttgctcttggtgatgtgcttggaagaccttttgttaattcatttccataagggtcttggtatttaacactcatctttgtttcaggaagttcaattaaatcaaggtttattgtaattgctttattttcttttcctgctgatggtgttccttgactatagtcagctctaattgcataatctgttccatctacatcttctgcttttggaaccattaaataaaagtcatctaggccttgatatccagagctaggtatttgaatggttatttccttcgttgtatctgctctatcaaaatttactgtgtccttaacattctcatcttgaaaataaacgtcgattgctaatggatagttaactgcagtatcgtcaaatggcttatcatttgttgtatcataatctaatccatttaagccaatttttttaaggttaacaataaccttttgatccattagggttcctgttcctcttactggagcattaactatttcgtctccaaattctaatccatccgaattagaattattaaataactcttccttaatttctcttggtcttgttccaagaataattttcccgtcgtttgtttctcccagttcaatcaattctcctgacacaggtgtgcttggagcagtgggttcaaccactgctaaagcatcaattcctgtaccaaaaatcattataaaggctaggatgaaagatataattcttttattcatacttcctccgatctttgtaaataaaactatcttctaactgtgaaagtcataggatttgtcttagcgactactacgccaccttcacttcgttcaccataaatagaaaacctgtctcctttttttataggttcgtataattctattgtgaataaaccgtcaagatataatatatgattatgatatatttcatttgggcctggattacgtgttacgtgtatttctgttcctgcttgtgcaattaccttaatatacttatctcctgctcttggcatgatgaacttaacttcaatttgtttaggttctttgtattcaacttcatttgtactcttatttccgaacttatcttcaccagctactgttatttttgatatattgtcatcacgataaagttcccttagtatttcttgaactttttccattgatgtgatgttgttgattgttctagctgcagatccatccttgaattctattgttatattgaatttgcccactacaggatacttatcatctttcatgtcaactgttacatctaaccatctacgatagtaatcatcttgatagttaatcttactgattggtccttcgataattagctcagcaaaagctgtagatgtagctggtgtaaatgttcttccgtctttatcaggcaatgttgtctttataaatactttactcttgtgacctaatccattttgtgctggatcaaattgagggaaagtgattttggtgcctgtttgttgatctgctgtttttgcgcatgttattggtttattgtttttgtcaacaatttcagttccatcttctttgacaagtgtataaatagttcctgcttctggttcataaagtacaccgcctgttcctgctggtatttctgaagaaataactacttgaggatgttcatgttttggatcagtcgcgtcatatttatttttctcttgtactactttttgaacaggtatatttgttggaagttttaatacagtaatgcttccttctggaccataggtattattaagaccagttgcaacaccaaattcagcctttatttgctcatcggctttaaaaggtttttgtttaaagttttccatacgtgtaattttaattttatctttaccatcaactttagcaggttctacaactactgaatagcctactactgttgtttcagctggaataagtttccacttaccttcatctctatcatacagatactcacgctttttattttctcctggtagtgtaagagataatcctgcataagttcttgttgcgtcaatatcttctatatctatatacgctgctttgtctccatcatatactttatcgaattgtggttttggtatttctcttggaacgttatacatctttattgaataaccttgtatatcaagagctccttttcctgtattcttaattgattttcttatagtagctgatgtgaaagcatcgaaagtatcagggtttccgtcatcttcttcaaaatattgaatcttagcttcacgtcttttaccagctgtatccggagctataggaccttcattaactaatggttgccctggtcctggttgacgtgtatatatcacaatacctaagtctgcccagtcatttttaaatttgtagtacttatcttcctctcctacttttgtttcaactgctgaataagaaagtctttgaccaagctcgtcaaatcctggaactacaaagtttgcttttgtattggtaggtgtatcatatacctcttgtaaatcatatccattgtaagtatcatactcgtatttgtttctatctataatgaagtattttgcagctgcgtgtactgttgggtcagtgtagtctgttacagctgttctatatattaaaccaattgaaacatttctcctatcagcattgctaattgtatgaactttacctttagtatctgtgtattcgtcaacatatttagcatctttagtgttttctttttctatatatttgtagtctttatttacttggattccaaagaatggtctgtactgagcatataagtgaatgtaatctttcttcatccaatcatcatattttccatctagtcttaatttgtagccattaggtaacataagttgcgtagttttatttgttgttgtatctgtatacttagcaagtgtatctaatttaaagcttttcgcattagcctcagcttcacttaatttgttctttctgtcatcagctagctttgaattatcttttgcaagttctgagtagttataacctactagtaagtctgtgtcgtctctatctgtagaccaacctataaaggtatgtcttatatctttttctgtagaccttggtaaagtaaactctgtctcattaataaatttcttcatatcattatcagtaacagagttgtcgccgttccaatatggcgccttaggtatatctatattagcaatgccatttttgaaatctgatgcaagaactactacctctttaactgtttcgtttgcttcgtctgctttgttgtttgagtgtagataaatcttaattccttcgccccaaacgccataaactatttgatgagaatcgattggtgagtcttctgtaaccttgtatgcttttgctgtatcattccattgatcaagttgtgttaatttgtctgcttttgcaaattcttctggagtaacttgtttagttgaccaacctaagaatttatatgttttaccatcttttgtaaatggcttaggattttcaggccattttcttaactcaaggtcttttccttgtaatttctctccatctgcatctttcaaatatgctccctttgcttcactaaatccgttagctgtatatccgtcctcatcaaggaatttttcgttatctggtactatcttaactgtactatcgatactagttgcttcaatgttccagttaaagtccttgtttgcatcgaataaaactctagttctaactcttgtttcataccaatttgaaggtatggaagatccgtctgagttgttgactaaaattctcatatctttcttcaatgtttgatctgcagcaggtatttttgttgtattatcagctgtgtctaccatatcggcaatatttacagtgtattcatatttgtcgtaatctttaccgtcaactgtaacttttgtagtctttggatcagttataaatccgtctttatctctaacgctttctgctgcgtttgcttttccaagatatgttttattattattaggtaagaatctaagtcttactggtccgccatcgtatgaagcgtaacccacaagttgagttgtctttgtgttgaacgcatttttactagttggttttgcatcaacagttttgtagaagtcgtcttgtccttgtgcgtaatcgtttgtgtaaacttgttgatatggaagtagtacggacttatttattgcaagtgagcttagtacatcagagttatcagttattactaaaccatcgtatctttcgttagattttgtaaatgcatcatactttatagaagattcacttactcctccggtccaagagtaagcttttgcaataacttctgtgcctggtttaagcattgatttgtataatatataatctccgccagtacgtaatatggaagcattgattgtttttaattcattgccaccattatgttgccatgcaatagctctagtaaatttagttgttgtaggtgtgttttgtccttttagggtataaattaattctacttgtttaggtacttgtcctatatgaacctttatatctccattgtatgcttgattatcaaaacttaaatctactccaccttcgttccaccctgttgcattgtttaagtagaatagacgaacatcttcattgtcagctgtatctggcatgtaaactcttaatttttgtccagctttaattgttataccagttctgtatggaaccttataaattccttttgcaagtaattccataccatcaaagccgccaaaattagatacattctttagtgcattgtagtatggttggtacctctttataaagttgtctccatcgcctacttgaaccatgatttggccaccctgtggtgctccgttggtatcaatgtttaggcttcctcctgctggtataacaacatcatgatcaaatgacttttcaaatattgtcataccttttggatttgattcaacccagccagctacaaccccaaatctaatttgttcttgatcaggcgtagatgtaaatgttttgatgaacgcacttttatctaccacaaagtcaatgttagtaaagttgtctgtaccttcgtatatacagccatccatttgatcgattgttactatattgacctttgcctttttaaaattgttttgagctaaaacaaagtaagcgattgttttatcaggtgtatagtttatttggtttaattttaatgcagtttttatatatggatagcctggtttacttgtattttctaccttgttagcattttcaagcgtagtatatccaacattgccagccacatctgcttttaaataaggcacaagacttgcatcaaaggctatcatgtaaccaaagggtttgccatcgattgtattagctccagccatagttgcatgttcccattggtactgagtctttaataccgctaaatccttatttgtattagtttttccatttatagtttgaggttcattgtcatactctgtcatgaaagacctttgagcaactataagggctgattgtggttttggtcctctcataaaagctgtatcaacgttactctttgctgctactacagttgctttcgtgtaactagagtagtccataggtgatttacctggggcaaatgtgtaaatcttatcaagctttggagtggcaaaacgcatttgtatcaagtagttatcatctaaatctgaatacttgacgccagcgttaagaactaaatctataggcacgttgtgcttcgtgcctcctctgtctaagccaataaggtcacggattaacaaagctttttcgttagcaccttgagtatcataaaatccaagttttttaccgttagaattttcaatgaatgatttattaaaatcaatttttttgtataattctttgtcaaacttaaacaataagttatgccaccatgttgaagataatgttgcactttcatggtatacaagtcttaatactgttctaccttctgcgtttacaaagtatccttcataacttaagccgtaattatcaattacgtctgctgctgatacttttgttaattgttgagttgggttaagaccgtagtcttgattaagcttccatatgttggaagttttatcatatttttttgcccaattcactttttgaactctattgctaggaagattacttccttggctagggctcgttggtcctgcaaatacattcactggcatcatagtcactatcattaaaaatgccatgactaatgcgagtgtttttcgcaaataatttttcttttgcatttcatttctcctttcatctcttgcatgtgcaagttatcttaaccttctgtgccgcgctctatctacaacgcaaaaaagaagggtcgtgccaccgactcgtctaataatatacatgattgctttctttttattaagtatgtgtaatatacctagcaagtttttcctaagttatgcatgcgtattagtaaaaaactttgctaagttcagttttgtttctttaactacgttttctggtggcacaaaaaatcgtatttactttggtttaattgtagcacatacttgtccaagagtcaaccgctttttacatatttttacaattttttataattttttaaagcctgcaccccccccccatctcattttttgcacttcgatgtataaactcttgagtgtctaattagtgtctaattgcgagtggcatatcttgtcttcttatatatatgtgaactctcttatatgtagtaggcttcgtaggtatagccccagtgtgactatgtaggccgcttactactatataggaagcttctatatatatggcaggcgtgtgactatataggacgcttcttttatatatgtagcctactcatatataatttttgggcataagtaaagacctctctactcgaaaggtctttaatctcttcttattatattatatatttatatgctttgtgacatgacccaattgatgatcttgtatagtgctactgctagttcttctcttgtgaactcgcctcttgcttcgtagttttcgcttgtcttaccattaatgatgccaagttttgcaagttttgtaactgcttctttggaccaagctgggatgtctttgccttcgtacttgaagtcttgaatttctggcatatctatgccgcgttctttaaggaaactatataaaacgcttgcaacttccactcgtgtaagcttttgctctgctttgaagctgccgtctgggtagcctttgaagacgccgtgtgttaccgcccaagtgattgcgtctgcgtaccactcgtcgccctttaggtctttaagctcgatcatgcctactgttttatctgttgagatgttcattaggacttgtgcaagcatggcgcgtgacactgttagctttggagcgaattctgcacttgatactccgtttaaaactcctcttctaagcatctctgtgattgcttcgccgctttgaccttgtgggatgtcttgttgtgttactagcttaagtgctgtagcgtttactatgccgtagtctttttttgctttcatctctttctttgcaacagttttctcttctaattttgcttctttgtcttctttttcttgtctttttaatctttcttgtcttgttcttctctttctatcgttttctctttcttcttcttgtcttctttgttctgcttgtcttctatctaactcgtcatctaggtggtcacgcttaactataaggttttgattaatagtaagctctgtatagtctgtaaatactagtttgacgttgccgtttttcacacctgctgtctttgtgtctctgccactgatatcttcaactttagcattgtctatatgtttttggtagcctactttatctactactgagtcttttacttttacgccgtctctccaattaacatcggcatttttattaactgtgatgtcttttccttcgatcttatctttgatttcgttaactatggcatttctaaatggtattcttaaccaaagaaaggcttctttgtcaccacaagcttttttactaagtcttactccgccatctctatcttttacatattgtagttttgtacctctgccaatattcattgttttttctaaactctctatgattaaagagtttattttagcttttctatcttcatcattatctatgttagcaagttcgtcttctaagttttttccttcatccttacctagtgtgaactttattctatctatcttaccttctttatataaatcatttataagccctgctagctttgtcaattttaagtcggaaaatgatttttctttgtttattattgtaaatgacaattgatagtgacttttatgtttctgagggtcgccggtttgatcttgataatcttttggctcttcaactttattaattctaagtgtgtagtcgtcatttttttcgtctaggtctttcatctttttatccatggcgtctgtaagctctttaactgcttcttcatgtgttttgcaacctgccacttgtggttcttgtacatcttgcgcgcccgctagaactgctccagcattctctctatctgcaagctctgtgtctgcttgcgcatctagttcttcttctttgtccgctaggactgtctctgcatttttcgcatctgtcatatctgcttcaacgctctctgcgtgtattgactcgaactgagaaagtgcaaacgcaaatatgaatgccataattaaaattctttttagttttttcatctgatactcctctcttgcctatctggcttttaatatattgctagaatagtataacagtttcgaagcacgaaattatttacaaaatatttacaaaaaaaaaaaaatactatgtacctctcgatacatagcactagtaaattataatatttaaaaatattttgcaaagcaaatttatgcatgggactcgcaaacctaattttgcaattattttgtagataaaatcaatgaattttctttacgaagaacttttatgagcgaaatagtacataggagtacattggagcgattaaaagttcgtagtgaagaaaaggcgcgatttttgcacaaaagaatgcaaaattattacacttgccacaaaatctcgtctccctccgcatttaagcacatttgcagatactcaagtccaaaccttactgctgcttccatcttataacctttagcaaggtaggtggcgatggcggtagagactgttgcgccgagtccgaaggcttgtctatcgactctggttctatctatgactctgtcttgtccatcaacaatgagtacgtcctttgggtctccttcaagtgcgccgcctgtaatcaaaacgtttgtgccgtattctccgtagagtttttgcgccgccatgagcatgtcatctacgctagtgacttctaagccgcttagcactgctgcctctttcatgttcggtgtgatgaggctcactctgttaaagatctgctctttgatgtaggcaagtgtttctgcgtctgtatagatgtggccaaacttggatgcgatgactggatctaggactatgtgcacgccttcaaagaacttatcgattgcgtctcttactgcctttgcctgattaatgtttgagatgaggccgactttaacgcagccgatgtggaagtcttcgctcgctgccttaatctgatcgtagaccatggacgaggagagtgcaagtcttgagatgcacctttgtgtgttctggctcgttactgttgtcgttgcgactgtgcagtaggtatttagttttatcgctgtcttgacgtcggcttccacgcctctaagtgcgcttgagtctgaagctgatatggacaagatgactggcttttcttttagcataagtactctcctttattaagacgattttattatatgtgtggcattttgtcaagctccacatattttgcgatgtagtagtacttttcaagtatttcgtagtcttttactctatatgaaatgtttgccaaatctagctctacttctacaatgtcccccacattataatttttattcaccttgtttatggtcttaatgtctttgtacttatcaaggtttttatactttatgtgaagtgtgtaaacgtccatcagtctttgattttgtgtcttttttatcttaaactcatctacatcgtcccagctaatgctgatgggtttatatttggagaatttgtctacaaagacgttctcttttaaaaccagagcctcctctctaaatataagtaggatgacgtttttgagtgcattcaaaaccataaacacgaagaaaaagaagaagaggactataatccattgaaatacgctgcctttttcgactaggcttcctaggatcgcaaagccgatggtaaaggctggaaagactacaaatacaaagagcagcagccttttaaaataatgcagaacagaaaagtttatactaagttcttccataatatcacccaagatataatatcacctgattgttaagaaatcgtaaaaagctctctaagtttatctcaaagagctatcatcttaatgttctttattaagcatgtcgtttttgatgttccaaagttttttgcttaggtcgacgtagtactcgtgtgggttttcaagtcttttgacttcgtcccaaagcttatctacttcctctagtgagtacttttgaatctcgtctatggacttggtattatacactagtcttcctttgtcaaagattttctttagtagcggcttagctgtatagtttgtaagttttttcttcttccatgtgtacaatgggtggaagatctcgatctcttttgtgaagtcgatgtcctcgtcgtgtgttgtaacaaggtctgcaatcgccttgcctgtctcgttgtcgtagagtctgtatagctttttaaagcctggtgttgtaatcttctctacatcgccactgattttgatcttgtagacttcttcaccacctttgaatgtagagactagtttatacactccgccaaagactggctcgcttctggatgtgatgagtctttctccaactccaaagccatcgatctttgcgccttgaccaagtaggtccttgattacgtactcatctagtgagtttgataccataatcttgacattagggtagccagcctcgtcaagcatgactctcgccttcttcgataggtaggcaaggtctcctgagtctatcctgattccgactccctcatgaccctttgcgcttagttcgtcaaagactttgatcgcgtttggtatgccttcttctagtgtgttgtatgtgtcaactaataagacgcaggagtctgggtaaacttttgcgtaggctctgaaggcttcaagctctgtatcaaacatctgtacccacgagtgtgccatggtgcctgtcgcaggtacaccgaagaatttatctgtaagtgtgtttgctgttgccttggctccacctatgtaggcggctcttgcaccaagtatcgcagcctcactaccttgtgcgcggcgcgaaccaaattctgagatggctctaccttttgcgactctcactatcctacttgccttagtagcaataagtgattggtagtttatagtaagaagtatcattgtctccatgatctgtgcttcctttataggtcccttcactatgatgatgggctccttaggaaagactggtgtgccttcttcaactgcccacacgtcgcatgtgaacttaaagttctttaggaagtttaagaagtcttctgagaatatcttcttgcttttaaagtattggatgtcttcatctgtgaatttaagtttttggatgtagtcgatgacctgttcaagtcccgctgcgatggcaaagccgccattgtccggtacttttctaaagaacatatcaaagactgcctcggtatcttctacgccattttgaatgtagccgtttgccatggtgaactcgtagtagtccgcaagcatcgacaagttaatgcttttatttatatcttccatctaattattcctcccaaagctccttcaatctaccttcgagcttgtacttaacatgctttagctcgcctgtgttgcgtgatgacgtgatgagcataagctttctaagtttctctgagaagctgtttaggtactctgagctcgcctcgtatgatccgtggtagacatactttaatagctcgccaccaagtgcaacgacgtcggcacctataacgtaggctttgaatgcatccatcgccgttctaatgccgcctgaggcaatgagtgtgaacttgtacttcttctttagctctcttgcatatagtatagagagtgctgttggtgtaccaaagtcgaagatgtctgagaagtcttctctagcattggccatggactcgatcctggcaaagtttgtgccgcctgctcctgagatatcgatgtacttgacaccgagacttaaaagcgcctcgatgttcctttgattcatgccaacaccgcattctttaacaataactggcagcttaaagtacttaagtgctgcctcgatgttcttcatataattagtaaagtctctgtctccttcttcgtttacgagctcttgaaaagcgtttagatgtaggcagatggcgttagctcctataagttcaacagcctttttcattacatctaaatcgttattggctccaacgtttgctatgaggtagccgtctttgtttacctcgcgtgcaatggtgaaggtgtcgggaaactttttatccacaacagctatcttctcgcttccaagcatcataggtatattgaagtcttttgcgagtctggcaagaatctcgtttatcctaagtgccttttcggtgccgccagtcatcgcatttatgtaaaaaggacgagaaaagtttctgttgaagaacttcttttcaagtcgtacctcgtctatggaaagctcaggaagtgcgttgttgtctatgaagacatctgaaagaagcgtagtagtcttgccatcttcaactctaagaaagttggtgatgtgaagctcttttgctttctccttgtaatcaatctttttcatagttcctcctagatttctatatagtcttgtatattaagttttttgtctatattaagtgtccttaagctcctaaggtaagtgtccttgccctttgttgtgtagatcttaaagtcgcctttactaagaccgctcatgtcgaagctctttgcaagtagctctgcaggctttataaagctaagctctggcataaggtctttgaatacactgtcaatgaactcgtagtgcgtgcatcccaagataagtgttttgtagtccccactatcaatacacttcttgtactcagtaagctcgtcttcgatgatgtccctgttatcatcaaagttttcaataagagctgcaagtgatgcgctcgccatctctaaaagatcagtggcaccaatctccttaagtcttttgtcatactctttagaagcgatggtaaactttgtagcaagtatcgccatcttcctaagtcctaagttctttacctcgtctatggcaggcgtaactatgttgtagagcttgatcttgtgtgtgtagtttgtattaagtatagcactactcatagtgttgcaagcgacaaggcagtctgtaacgcccttttcgtataagaagtctaaaatattttccatgcaggaaagaatttcatcacggctcatattgccataaggcactcttaggttgtccccaaagtaatttatttcgatctctttattaagtttaaggagctcacgaacaactgataagccccctatacctgaatcaataactgctaatttcttcatatcacatgtccacacgattgtctatcgcctttctgatggtttctgcgtcgtagtagctaaggtctgcgcccataggaacgccggtacctatcctagttaccttgacagtcttgtcagggatgttctccttgatgtagtttgctgtcgccgtgcctgcaacgtctggatcagttgcaatgatgagttcctttacactgccgtctagcctttggaatagctcaggaatgtttatctcctcaggtcctacgccctcaagcatgttgatggtgccgcctaagacgtgataaaggccgttgtagccgccttctctgtcaaggcgcataacgttctcttccttttctactactaatatggtagagtggtctctctcatcatcggagcaaatttcgcatatgtccgcctcgctatagttacagcagattttgcatctatgagtagagttaagggtctcttctatgtcccttgcaagactcatagccttgtctttgttattcaaaaggtagtaggcgaactttatagacgacttcgaaccaaattgcggaaacgactctaagttttttactagcttatctagcttatccattatagtcctggaatacctaggccgccagttagcttacccatctcagtgttcataaggtcatcagccttggcgatggcttcgttcactgcaaccatgattaagtcttctagcatttcaacgtcgtctttgtcaactacttctggatctatggtgatcgctgtgatctcttttttgcctgtgatctcgaccttaaccatgcccttatctacttctagggtagtagcctcgatctcctcttgcttcttttgcatgttttcttgcgccttttttagctgcttcatcatgttattcatgttgccgcccatttgtgggaatccttttctcataattacctcctacttaattataagcttgccgcccaagaactcttttagatcctctctgagtttgagagtcttcttctcttggtcggagctttcaacttttatatcaataatatcactaaagtatttgttgagtgtttcaagtatcatgtccttgttcatcttgataagcgaaacgtttgtgtcaactgctacgtctcttgtcttttttagcacaaggacgccggatagaacttttacgtactcaaagtctgtgaatatggccttaagtacgcgcatagcctcgtcttttaagaaggcttcgtagagtgagttcatcttttcgtagtcctcttctacttcttctgctacttcagagctctcatctggggctatggcctcatcctctttcgcttcgtcaaaattttcttctgtgttttgtttttcttctgtctcttgtttttctgctgtattttgtttttcttctatgttttgtttttcttctatgctttgttttttatctatatcttgattttctgccgccttttcttcgcgtgctatgtcttgattttttgctatgtcttgatttttttcttctggcttagcttcttcctctggagctgcaaagtagaaaccttcatcttcgtagtcaaccatgcccatctctaagctagctaagtcatcaaaagagtcgtcttgattagccctatctgtttttgccgaagtggctgcgccattgcaattaacaccggcttcactcgcaggatgcgctaagttagtaactgtgacgctcctatcaaagttcatcttcataacgtcgctatcaaggctcataaccttaaggcctgccatctcgacgaagatcctcttttccttaacgaacttcatcctttcaaggtagtccatgtatatgtcgatggcgtttatgatgtccataagcttgatgtcgaaagtgaaattgtacttagaaagtttatttactttgtcgtataaaatctctctaagcgctttaattatgccgtctactatcatcgcttcgtccttaccatcaataaagagcttgtctaagttggcataatacttttcaagattgcgcgtgaacaaggcctcagctatgcctatggagtaggactcatcaagtagtcccaaggctttaagtacgctctccttcgtaagtgtgtctgagtagctgattgtgctctcaagcatggaaagcgcgtctctcatcgagcctgcacctgctctagcaactgcttctacggcttcgtcttcgtattttttgccaataatctctagcactcgcttaaggttcttcgcgatgagctcctcgtctatcctcttaaagtcgaagcgctgaacacgggagatgatggttttaggtatcctctcgggctctgttgtcgcaagtatgaagattaagtgcttcggtggctcctcaagtatcttcaaaagtgcgttgaaggcgccctttgatagcatgtgcacctcgtctatgatgtagactttgtactttagcttattcggtaggtagatggctttatcgcgcagctcgcgtatattgtcaacggagttgtttgatgcagcgtctagctctatgatgtcgactgccttgccgctcattgcctcaagacagttctcgcactcgttgcacggctcggcatcatgcgtgttaaggcagttaattgctcttgcaaaaactttcgcaagcgatgtcttacctgttccacgcgtgccggtaaataggtaggcgtgagatagtctacttagcattatttgatttttaagtatggttgtgatgtggtcttgaccgatgatttcgttaaaagtcttgggtctaaacctacgatacaaagcttcgctcatcccttgcctcctataaatacagttataagtattatatcacaaaaataaaaaaaaataaagacgtgagtagtctttacgaagtggctaaagcataaatatgctgataagaaaaaggctctcatatgaaagccctatctattattcaataaacttatctatagctcttttgtatctttcgtagttgccatatgctgaagcaccaattaaagtatcaacaacattgccctcgctatctatgatgaagctagtaggtagacctgtgattagtgtgtctaggaaggctttagcttcttgtgtagaaacatagtttttaaacttagcgtttgctttgccaagtatgttttttgcatcacttatagttaagtctctaatgttcttatctgtgctagatgatgagtccataagcggctttatatctctaactatgccgatgaagcctaccttatccttgtagtcttcgccaagcttagcaagctctggcatctcgtttctgcatggaccgcagaaagttccccaaacattaacaaaggtatagtcgtgctcagagagtatatctgcaatcttcgtcttattgccatcgaagtcttcaaggtcgaacttaagcttgcactccttcttaagcttatcagactttataataactgttctactttcttcgtcatagtcaagtttaaagcccactaagtctgagaaacttcttagctcgatgtagttactgccagagataagagctgatctaagctttctttccttgccatctacaactaggttcatatcttgcatagtagcagtagcttctttacttgctataggctttaagtcacttgctaattttttgtatggtttagctagctcaagcttaacaagccctctttctgagtcgtagccaacattgaactgcgccttcttgccattaagtaaggctgccatgtcacgaagctttaggtaatttttaccgccaatgatgtaggcagcagcgtttatgctcttgccgttaagtgtaaacttttgtgtgctcatcacagccttctctttactcgccgccatggacataggcataagtgttactagcataagtattgctagtagtagtgaaattttctttttcattttctccctcctgtattataagtttacttaattaaattttagcatatatataaaatatttgcaacgaaaaagggctctcatgtgaaagcccttaatagttatttaatatatttcttcaatgctctttcatatttttcatagaagccataagcgccaacgccaacaaatgtttcaagtatattgccttcgctatcaaagatgaaaactgttggaaaggctttgatcttaaaattaaaatacttctcagccgcttgactaggacatagattggaatatttggcattagcttggtttaataagtcctttgccgtagttatattttcttctctagtcttcttgtcataatcacttgatgtgctagtaagaggctcaatgttatgaataacgccaaggaagccagctttgccattataatcgtttgcaagctttgttaagtcaggcagttcttttttgcattgtgcgtactcagtcgaccaaacgttgactaaagtgtattcgtgctcggctaatatgtcagctatattatattttttgccgtcgaagtcttctaaatcaaaatcaagcttgcaaggcattttaactttttctgacttaagtattacagttcttgtctttgcgtcatagccaacgctaaaaccaagtaatttagctaagtcccttagttcgatgtaatttgtttcgataataaaggcagatttaagttttttctctttgccatcgataaggacatccatgtttctcatagtcgcccaaagctctttttgagatgaataagtcttgatatctgataggtcttcatatggcttattcgtttcgatactaacaagatgcttgtcgttgtcgtagtcaacgtagaattgcgcctttgttcctctaagtgcagcggctgcatcacgaagttttaaataatttttcccctttataatataagctctaatctcatgcgcctcgccgttaactgtaaacttttgagtgctctccatagcctttttttcgctcacagccattgacataggcataagtgtcactagcataagaactactaataataacgaaattttctttttcattttttcctccttgatttaccctgctaacaaagtatattgcttgtaaatatattataccactgaaaataaattttggcaagaaaaaagggctctcatatgaaagccgttaatagtcatttaaattgtattcataattatacggtccaaacctttggtgaatttcaatcttaaacacagctccgttccactctgtttcacaggcatcactgcccaagacataaccttggtcgtttgtgtagaaatcgtccttaatcttacggatgaaaaatatgttttctcttttatacatatcaagtgtcgtactaaataaaaagttatattcgcttataacggctgtgtttttaccatcgtctgaagtaaattcgtagtattcattggagccaaaaccgataaaaaggcctacacacgctgtgaataaaactactaccgcaattattaacgcaattatcactttgacaaatagttttttatttgtattcaaaatgaacgatagagcataaattatccacgctgcagctagcaaggtaagcccaaagcaaagccccggaaatgttatgtgtatgaagactaagtttactgaaaaaattagtccagtgagcttagttacgagatagatgagtccggtgactgctaagtatatcaggcttagaagtagatttcttcgtatgaccttgtcacccaatcgctccttgaaaatgttttttatactttccatcttagtttaaaatctctacttcatctatactcacataaatcactttgaaagctccctaaatgcttcatcgtattcattcataatgtcttcacttatcttttctgtattatttagctttaaatttagtggcaaagcattctctctaattgattgctttacaaacaggttgatagctgtcgatacgtttagtccaagttcatcaactaagtttataaatttttccttatcattcttatccatcgatattgttaaattactttttgacatattctcacttcctcatgtatattatacatctattacacatgtaaatcaagtgtaagtctcagtgcttagtctagaacttctacttcataagctgaatcgatggtaattaatgcgcttgatgtcagctctgtgttgtgagctgtgccgtcgaagtagactgtgacttttttgccttcaatatctttaggatcaaccggctctctgtccttttgaacgactacaaaatcaagttttactaagaatggatttggatactcggtatttttaccaaaaacatatttaaactcttctggaacgactatatcttttattctaagcatagtagcgtcctttgtagtctcgtcacaaacaacttcctctacagttcctgtaaaatttgcaacatattttttagtttcgctccaattgtctccagtcgagaacaaaagatatttgtcatcgtagtgaacagttaaaaagccctctccagcgtattggtactcgcatttatcaaagtttgactcaccgtcgttctttggaaactcattagtaggaacgactttgtcgatcttgccgtccatggtgccgcaagtaactagattatttaaacagccagtatccttgtataatttgccgtcaagcataacagctgggattagagctccctcatcagttctatctggctcgtctatttcatttgcttcatttgtttcatttgtttcgtttgcttcgcttttttcctttggcatctcatttggcttttgacacgcaaaggcacttgttagcattgctaaaatcattaatataagtaaaaactttttcatatcatcacttccttgtctgtattatatcacaataaagcataccttaaatggattttcattaattgttactattttgtaagaaataaaagggcccatagcactgccatggaccaaaaaactattcttctaaaatcaaaacgcctgagcaaaaacttattttttcgaaaattgcttttggaaaatctttcttgatgctctcataaacaaggtagtactcgtcatcatcccaataatctattgactcttctctgcaagcttctaatgatgcaagatccacaaaactaacgtcgcctataaaaattttgcctccatcattaagaaggctaagtaaagtcattaaaaaatcttttttctcagcatcaattatgtgatgaagtgaatatgttgcgagtatcgcgtcgtatttttcatttaaaatgctcttgtctaaggcttttgcgaaatcgccttcatataattttgcctttggcatctttttttgtgctatctcaagcatattctttgaaaagtcttgaccgtgtatctcaagaccgtcatcataaagcttttgcgttaaaaccgccgtaccaaagcctatgtcaagaactttttttgccttcatagttcttactgcgttatagatgtatgcaagaacatctttatatccagcgaatggatattcgtccccactctcagagatttcaacagttttgtcgtaatcctgagcccataaatcaaaaccaaatttgtctagcataagtcctccttatgtttattttttataattatatcataattttaatcataactcgaagaatttcggtgggtttccaccttttttcttcgagtccatataagaggcataaaaaaagtatgcacaacgtggtacatactttaataaatatcttagccttctaatgctgcgtcgatctttgctttgtcgtagccaaggatcttttcatcacctataattacaactggaacacctgtgaagcccatcttcatcatttccatcctagcttctttgtcttctgcgatgttcttttctgtgtattttaatcctttgctgtctaggtaatccttcaccatgtggcagaatgaacaagttgtgcttgtataaactgtaatgtctttcataataatatccctccttaaattctttcaccccatatatacccacggctaattcattctaaacaaaaaaggagtgacggctaattcattctaaacaaaaaaggagtgaattaacactccttctgaatatttattaatcgatgatttttcttaggtagtctctgtttagtatccttatgtccataccatctacgctgatggctttgtcttctgagaactttttcagctcttggttaaggctcggtctgttgacgcgtagtatgtctgagagcataatttgtgaggatggcatcttgaggtagtcgacctcttcaaggtgcagtatccagtaggcaagtctttgcgaaacttttgagtactgtgtcgctcttatgactagcttgttaaaacaagtgtactctgcgacgaacttaagtatgttcttagttaggactatgtctgtgtccatgatcttctcaaagtcttgaagcggtaggaagtagactgttgtctttcgtgttgcatagacgtcataaggcagctcgtgtgtgttaccaaagtataggtagaatggaaacgcatcccctgcaacgtagtaggatgagacgatctctttaccgtttatgttgtactcgcacgcttttaagcagccactttctatgaacatggcgtattttaaatctgagtctttgctaaagactttttctcctgactcaaaggtctttaccaatatgtctaagctttctatctcggccttcgattttttggatatgccttcaaatagtttaaaattcaaaattctcatttataagtactcctcttaatatattttatcaaaaaaaagcacaaaagtaaacaaaaatattttcttagctaatgtgcaaaataaaaataccagactcagccataagccaagtctggtactaatactatctaaatatattaaaattttatatctttagaatattccaagtcctcttacgaagattactatcaatacgaatggtagtacgtatgaaacgtatttcaatacctttggtacctttaatgagtttgctcctgtgttaacatcttctctgaatacatcgaatttccacttaaataatgtgtatagtattaatgctatcgcacctagtggcattaggatgttgcctgataagaagtctgcgaagtcaaacatatttcttcctagtattgttacgtcttttagtatattttgtccaaatattgttagtaaacctactataaagattgaagctagtgcgtaaacaacgcctttctttctgcttatctttaataactctgagaatgatgaacttactggctctaggtaacctagtgctgatgataatgctgcaaagaacattagtaggaagaataatactccgaagaatcttccgaatggtaagtgcataaatacgttactcattgttatgaataaaaggtttgaacctgagtctgctggtaggttaagtgcgaatactgcagggaatatagcaaagcctgctataagtgctgctaatgtatcgaagcctataaccataagaccgtctgttggtatatcagaatctttgtttaggtatgaaccatagacgaaagctcctccacttgctatacctactgagaagaagcattgtcctaaggctgcaagtattgattctgagttaatctttgagaagtctacgttcatataccacttaacgccttccatagcgttaggtaatgttactgatctaactacaactagtactagcattataaatagtgctggcatcataaacttacaagctttttccaagccgtcgtttaagttttgtgctgagattatacctataattactgtacatactagtgtgaatattacgagtgttgctgggctatctatcatttttgcgaaagtttcagcatattgttctgttgcaaagcctgccatctcgcctgttgccatctttataagatagtttagtatccaacccattatttgtatataataagttagtataaagaatgcgcttagtacgcctagccaaccaaagcttgtccaaggactgccttttttagttagctttctcatacctaggatagggctcgcttgtgcttttcttccaagtgctacttccatgtagaatagaggtattccgatgaacacgcatattagtaagtaaactaatacgaacgctccacctccatttgttcctactaaataagggaacctccatacgtttcctaagccgatggaaaatccggctgccgccatgatatatccaaatctactattccaagtacctctacttttgtcgctcataactacacctccacgctatgctttaaatatagttggtttgtctacctttgtttgtaatgctttgattgctctttctactaattcctctcttaggccttcttcacgagcacctaattctggatttccaactggatatggaattgctacagttggaacaattctgtttgcacctactgattgtgaaattgtagttatagtagccatgtgtactatagggataccatatctttctatttcttttactattgttgcaccgcaacgtgtacaagtacctcacgtactagtcaatattacgccgtcaacatgtgcatcttttaattcttgtccgatttctttaccgaatcttctagcgttggcaactgatgtaccagtacctgttgttgtatagaagtatttgtaaactccgccaataacgccttcttttttaagtcttgttaattgatctagtggagcaactctgtcggcctttgcgttacaatatactgggtcgaaaccaccgtggattgtaatgaacttgccttttagctcgtctaaatcgcttacatcatacttagcccacttttgagctgaagctgattgaactttgtctgggttgcctagaggaacaacaccacctgttgtaacaagtgcgataactgccttcttcatatcagcaataggggaagctggttctacttcgtcaaattctggcattggaagttctgtttcgaactcttcgcctttgaatctcttaagaagcatttcaactgctcttctagcaccaatcttgtcagagaattcagttaaacgtctaccttgtggcatataaccgtcttcctttggagtaaggctcttgccttcgataatcttattaactaaagctgccatatcatggatagcttccttcatcttagcagctgagtcagctgtttcaatgatgtagctgtttagtctgcacatatcaactgcagggttttcaatatacataccagtaactacaggtacgttcttgtcttttagtaggttaataacaccagagcaagccataccatatctaccagcattgaatgcaggtcctgctacaactacgtcaggttgaaccttttcaaaaacatctaatataaatttgtctgatacttctttattttcattgtagtagttgtcaccgcagatgatagtaccaacaacgtgaccatcaactaaagccttatcaaaagcttgtgcgcaacctactgctttttcttcgaaatgtggttcgtaatcagctttgtcttccccacctatttgtccgaagaattgatttacatagtataatatttttttcataaatacctcctagtaaagcttaactgttaggttatggaagcctatctcagaagttgaaccgataactgcgttaagttcgcatactatagttcctttttctgcatcatagcatccgtcccatccacctgctaagttcttaatagcttcaacgttaccaataatcttatctgctttttctaggtgaactaagtgagatacgttacctgtagaaactacagcgcaagcttccttcttagcgtcagctagtggttgagagtctccagcccaacctgagcactcgtcagtgattagaactgatttgataccagccttttcaagaccagcagaaatcataactaagtctgagtctgggttaccgtaaccttcttcagagattacaacgccgtcagctgcaagcatcttgcaaagcttaacagtatagtcgcaagttctaaacttaccatcaagagtagttaactctggaaccataatctctccaatgaagtttatagtcttgccgtgttctttgtataattccttaataacagagttgttttgatgttggaaagtagttatcttgtcacatgcagcaacacagttaccacttacaacagctccgtcaagctcttcatttggatgaagaagagttggaagaatcttcttaacgtcaacgccgtagatatatacgtcgtgaagtaaaccttgagctatcatcatttgagcatagacaactcttggtagatcttttaatctttcagattcagtcttgatgtccttaagctcaaatacttcagtattgtcagcttcaacatgttcaagagcgtttcctaagtattctgctgccttaagacctacaagtcttgcgcaagtttcgtgctcatgtggttcgatatcctttctagccttgatgtcaacaacaacattcaatgttttagagaatggagtgtagtcagcaccttcgccccacatatcgatgataccttcttggaaaccaacaacatcaccaacagtaacaacagcaacattcttcataatcttagttgttccgtcaccaagttgttctaattcaccagtaactcctgggaacttgttagttctacctaccctaaatctaggttcaatacagtccttaacaggaatgattctagtcttttcgccaggttttgctaagtcaataccaatttcagttacaaaatcaacttcctctaggcacttaatcatttcttccttgttgatataaagagttttgttctcaaccttagtaacatcagagaatttaacatcttcaatcaagcaattttgatactctaatctcataatctaccccttccttatttttctaatccttccttaagaagaactacatctaagagtttatagtcatcaccgttttcgtaatctggccttcttacgcccatagtgttattgtaagtatcaatagaattctcgatgacctcaatcgatttttcactgaaacccttccttaacgctacgcttctaaacggcgagtaaaacatcctgattgatgcagcaagtggatgagtcaccaaagaataccctaaatgtgtaagatctcttaccttgtgtagcacatccaagtaatctccatcgacctttatagtgttttcgtactcgctaagcactcgatcattattcgtaacaattacgatatccttgttcataatcatcctccttatacataaattaaaccatatagagcaaaaaaagaaaagttagagctctaacagtttttttcaattttgttagtgcactaacagttttggtattaaatttattaatccttgctattgataatatgctgaagtgtatatagggttaatgtgaaaatagagataaaaagtgtttttcaaaaacaaaactcaaaatttaaaactaagaaactaggcatatagtaggagcatctctatacatatgaagccacacatatagtaggagccacgcatatagttggagccttgctatatagtcagaggcttcatatacaattagaggctcgctatataattagaggcgtataaaacataaaaaaaagaagtgccctgtggcacccataaaaaaaagagcagacataaatctgctctttcatatatttctattacttagaaattattgttccagtctttccttcgataccttcgcctgctttttcaagtgatgtgattaaacttactctgcctggtttcgactctgcaaacatgattgctgcttcaacttttggaagcattgatccttttgcgaagtgtccttcttctgagtactttttcatctcatctactgttactttgctaagctcttcttggttttctttaccgaagtttatggcaactttttcaaccgctgttagtatgattagttgatctgcatcaactatctcagcaagtttttctgaagcgaagtctttgtcgataactgctgctacgccttggtagccttcgccatctttaataactgggattccgccgccgccaactgtgattacaacgtctcctgcttcgattaggtgactaacaacatctttttcaacaacgtcgattggctttggtgaagctacaactcttctgtaacctctacctgcgtcttctacgtatgtgtcgcctgttgccgcactaagtttttcagcttcttcttttgagtagaatagaccgataggcttagttgggttttggaatgctttgtcatctttatctactagtacttgtgttataactgttgctacgttctttttgatacctcttttgtttaattctgccttgatggcattttgtaagtggtatccgatgtagccttggctcattgcaccgcattctgcaaatggcatctcgcctttgaatgcgttgttgataaggcctacttgagggccattaccgtgagcgatggtaactttgttaccttgttcgattaagtcgacaattggttttgctgtcttcttaactagttctttttgttctgcacaagttttgcctagagcgttgccgcctaatgcaactactaccttcattctatagttttcctatagttgctaccataacggctttgatagtgtgcattctgttttcagcttcgtcaaatactcttgagtacttgcttctgaatacttcatctgtaacttccatttcttttaagccgtatttttcaccaatttctgcaccgatcttagtgttaaggtcgtggaaacttggcaagcagtgtaagaagataacgtgttcattgcctgtagctttgatcatcttcatatctacttgatatggttttagaagtttgattctttcttcgaatttgtcttcttcgcccattgatacccaaacgtctgtatagataacgtctgcgccttttactgctttcttaacgtcttcttcgaattcgatagttgcgcctgttactttagaaacttcttccatttctttaacaagttcttttgatggccataattcctttggagcaagtgctacaaagtgcatacccatcttagcagcgcctatcattagggagttacccatattgtttctagcgtcgcctacgtaaacgaatttaacttcgttgaatggctttggcacatattctttaactgtcatgaagtcagctaagatttgtgttggatggtaaaggtctgttaaaccgttccaaactggtactcctgcatgttttgcaagtgtatcaactgtttcttgtttgaaacctctaaattcgataccatcgtagaatctacctaatacttttgctgtatcttcgattgattctttcttgcccatttgtgagtcttgtgaacctaagaatgtaacttggccaccttcgtccatacaagcaacttcgaatgaacatcttgttcttgtactagttttttcaaataatagtacgatgttctttctatctagtaaatcacctttaatacctgctctcttcttagcttttaagtcgctagcaaggtttaataggtagtgtatttcatctggtgtaaaatcttttagtgtgatgaaatttctgccgtgtaaattaactgccatgttttaataacctccgtgttttttagtttagttaatataattatttaacgtcctctctgtaaagtggcatagacatacatcttgggccccctctacctcttgaaagttcatatgatggcattctgtgtaatttgattccttctttttcaagtaggtcatttgttacaacgtttctgtcatatactacaacttcgcctggagcgatagctaatgtgtttgaaccgtcgttccattgttctctttgagcgtcaattcctaatccgccgccgcatctgattagttgaactttatctaagcctagatagtgtgctagaactttgtctagtgagttcttttcttcagttataacgatcttgtcgccgtctttaaccattgaataaactactagtggtccttcaacttctggatggatagtgaatttatctttgtcaatcattgtaaatactgtgtcaaggtgcatgaaagcgtgtgattgagggatgttgattgcaagaactgtcttaaattcgccagcgttcaaaacgttttcagctagtttttgaagtgctgctgcttcagttctttgagagatacctacagctaatacatctttagtaagaataagttggtctccgccttctgtgtggaaagtatctgttctgtcataccatctaggtacgtctactcccttgaacatttcgtgatggtcgtagatatatttaccaaataatgtttctcttcttctaacatttgaccacatcttgttgatggcaacaccgtgaccgatgtttgcgaatgggtctcttgtgaagtaagcgtttggcattggtactgttaagaaatatctgtctgcgtcagagaagtcagcaagtgtttctttgcttctcttagtaagctcagtcattcttgtaccagctatcatcttcataaccatatccttttcagacttttgttgtaacaaaatgtccttcatgatatatctttcgtttggtgtgtgaagatcagcttcgtctaagaattcttcgattaagctttctttaaggtttttgtccttaattacatcagcaactaggtcttcaagataataaacttcgcatccactttcttttaaaatgtttgcaaagtaatcatgttctctaagtgcttgatctaggtaaggtacttcgtcgaatagtagttcttgcatagtatctggtgaaacgttattgatttcttcgccaggtctgtgaaggattacttttctaagtttaccaatttctgaataaactctaactcctttttccataaaatcactcctttatattttatttgcaattacattttaacatatgacaatttaaaaagcaagtaataaaattacaatttatttttaaattgtactaaatcgatatagaagttttatactataagcaagttattatttatatatatataatagaaggaaatcttctttgagatagacatatatgaaaaatattttttaatgctttttcgttgttactattttgtatagaatatttgcctcattagccttgtaaatgatttttttatattgtataatcattttgtaattcgaaagaaaaatttttatggaggtaaaaaaatgaagaatttaaaaagaaatttaatcttactacttatggcaagcttattcttatttagctgcaacaaaccaagtagtaatgagcatgtagtagatcaaaaggaaattgttactactgaagctgatatggacaaaggtactataggtataccaacaagtggtgttagatacactctaaaccctgaagtttggggcaagcctttcgctaaccctcacgtttttagtgagcttcttgaaaagagagaccactctagtgacatctacggtggtgtaagaacaagcttcgctactatggaagactttgaaaactacagcaaggttatgactgacaagtctttaagtgaagagcaaaagagaaagtcttttgataagatcatcgaaggctacaagaagatgtgggctatcaatgttatagctgatgagaagatgccaaaggacgacgaaggcttaaaagcactaactggctttgacaacaacgaaaagcttgcaagtgttgatggatataactttgtttggtcatatatgaacaaggctgaaggctatggtgaagaagatcaaaaagcttacgacaaactatatgcagaccttgacaatgttaagaactcaatcaaggtagctaagccaagtaatccaaacgcggctcaagaagcaaacagctctactaagtttgacttcgacagtgaagacatagaaggcaataaattcgttgcaaaggacttcctagctaagcacgactatactatagtaaatgtttggggaactttctgcggaccatgtaaaagagagatgccagaccttgcaaaagtttacgaagaatacaaggacaaaataggctttttaggtgttgtagctgacataccggtttcaaaggacgatatgagtagtgcctacaagcaaaatcgtgacgagctacttgcacttgcaaacagaatcgttactgacaagggctgcacttatccaaaccttgttccatcacaagatatgaacgataagttccttgtaaacatcactggctacccaacaacattcgtacttgataaagaaggtaatatcgttggctcacctatcatcggagctcaaggatacgatcaattcaaggcactttgtgaaaaatatatttcaaaataagatgaaaaagaaaagagtaacacagtacgtctttctagccatggcaatagcttttctattcataggctacaaaagacttgattttctgacagttttgaagaaagctgccaacatctgttttgaatgcataggattaggttagaattatgaagatagttaaaaaatcaaaaagatggatctcgcaagtattatttttcttcgcgtccaaccccatcttaccaaattatttaaaaggaaaaatatatcaaggcgatttaaaacaattttgcgtgccaacgcttaactgttactcttgccctgctgcgcttggagcctgccctataggctccttgcaagcatgcataggctcgcctgcacacgcgatagctttctacgtactaggctttttgttcctatttggcatactattaggtaggttcatctgcggcttcttgtgcccattcggactattgcaagacttactatacaagatcaagacaaagaagcttgtgataaaaccaagtatcgcaaagtacctaagctacataaaatacgtagtgctagcagtctttgtagtgggtatgccactactactaaaggacgactacggtatgagtaatccatacttctgcaagcttatctgcccacaaggcatactagaaggaggtcttccactaatcgctaagaatgcagacctaagagcaatgctaggaacacttttcttctcaaagcttactatcttaatagtagttgtactggtgagcatattctcatacagagtattctgccgtttcatctgcccacttggagctatctacggcctattcaacaagataagcttctacaacttctccatcgactcatcatgcatacactgcaagaagtgcgagaaagtttgtaaatttggcatcaagacatacgaaaaccctaactcaccagagtgcatcagatgtaacgactgcgtaagacattgtccagttaatgccatcaaagtgcatcacctatttaatcaaggtggatgcagcacttgccctaagaaagaaaatttgacaaattagtctttgctgttatataatcataatataaacaaggaggatattatgaaggatataacgcgtgatatagagctctttttgagaagagcagacttcgcagtaagagtcgagggtagaaaggttttgtcggacttagcagtaacgccaccacagtttacagccttacaattcatagttaaagaaaagaataatcccataagcataggtgatttaagcaggtccatgtgccttgcattctcaactgttacagaccttatcgataggatggaaaagcttggctacgttgaaagacaaaaagacgaaaaagacaaaagagtcatacgcatagttccgcttgaaaaaggcgaggctgtcctagaccaagttgtcgatcacagagtcgacttcgtagagagcgtaatcgaaggccactacacaaaggaagaaaaggaaaccttgcgtgaagagcttaaaaagctatctgagctgcttaaagaaagcaaagagaaaaaagagaataagtagatatgtatacgtagagctacacattaatgtgtagctctttttttgcgctaggattatggtataggaacggcctttatatatgccagacaagatatatataagaaggttccatatatataagaagctcatcatatattagtgtgtttttatacatagctaggcctatatacatagcaaaatttctaaacagcgcacaaaaaaagatcccgatactactcggaatcctatatagcaatattaaattagattgagcaaggactataaccacagtcttggcactctctacaaccgcctgagtgattcatcttgccgccgcacattggacacacgtcaggattttctgcaagtgcgttctttgcaagtgcatcgatttcgccttgaagctcgtctatcttttctttagtagactttttattgtttgagatcaatatgccggctctttggcagccatctctatagacagttacgcccttaaggcctttttcccatgcgaacatgtatagctcttcgacttgctctactgtaaactcgtttggaacgttgcatgttgatgatattgatgcgtcgataaactcttgccaagcggattgaacaagtattctgtccttgtaatcaaggtctttacttgtaactataaagtcaggaaggtcatcttcgtctacgatgccgtgcgcatccatgtattcacgaactatctcagtgtagactttgtagtaagtgtcttcgttgtttaagctttctgtctttcttgtgtatgagatttggaatatcggttcaacaccattggagcagccaagtagtgttgagattgagcctgttggcgccattgttaatagctgtgagtttcttactccatattccttaattaagtcgattacgtctggatcggcgttcttttgaaggaactttgatgctaataactctttttctctatacattgggaatggtccgtctttcttagcaagcatagctgactctctaagtgcttcatttatcatgactctaccaatctttttgattaggtcgatggattcgtctgagccgtatcttatgcccatcttgatgaacatatctgcaacacccataagtcccaaaccgatttgtcttagatttttagctacttctctttgttccttaagtggatgaagctctgcgttctcgtcaagaactccgtttaagaatcttacgccatgtttaacggctactttgaagtcttcgaagtcgaagtaagcatcttccttgaaaggatatttaacgaagtttgagatgttgattgaagataggttacagctaccaaaggctggtagtggctcttctgcgcatggatttactcctgcaaattcaaagtcatcgaactcactcattagatgccaagagtcaattctatctttgaacaagatgcctggctctgcgtcgttccagttattgtaagctagcttttcaaataattctttggctctaacctttttgtgtatctcttgaccgttggcttcaacagtgaagtgtaggtcgtattctgtatcgtttttaacagccttcataaactcgtcatcaacattgacagagatgtttgcaaaggtaaccttgtcaaggtcattcttaacattgatgaattcttcgatatctgggtgagatgagtccatgtttagcataagggctccacgtcttccgcgcatacctataagtccagtaactaagctgaataagtccataaatgaaacggatcctgttgtagtaagtgctgcgttattaactcttgctccctttggacgaagcttggagatgtttacaccgcatccgccgccataactataagttctagctaggtactttgcagtatcaaagatagattcgatgctgtcttcaaccttcggcattacatagcagttcgataatgtaatctttcttccaagcttgtcaaggccgcgtcctgcaagaattcttcctgccggcataaacttcttgtccttgatagcctttttaatgtattcacttccgccacttactcttgtaaggaaatcattgaaagtctcgctgtcgtagcgatacttcttttcatagatgtccctttgtagagcagtcatgtcccagcccttttctctaagcttagttctctcttgtctgtagaggatgtacttctttgcaacctctggtctatacttcattagagcaaattcaactaagtcttgtatgtcctctatatcgacttgttccttagctttaagctcttcaaaaacttcactcgcaatcttcgatgagatctcttcatctacacctttttcagtctccttcatcgccttttcgatggcaatcttgatcttgtcttgctcaaattcaacaacattgccattgcgcttttctacctttaacataagtcctcctatctatatattgtgtttaaaatttacttacatacatattatagtataagcaagatgatatttcaagacaattattatgacattatcttcatataatatcatagagtaaattgttttaatactaaaaggctaagctaaaaagcatcagttcccaaagtcaaatatttttagagtttgggaaataggaatgatgaagtgctcttgattacttgattatgcaataaaaaagaacctagtattaactaagttctttgtagataagctaattgtttttctcatctaacagccatctcgctaaatcaaataccttaaccccctccataagcgtcattgggtgctttgtatttgagataatgagttttggataagcatctcttattgaaagaagcggttctaactctctcttcatagttttttcgctattaatatcgtccgatacttgtatatatattttctcatttgccttcatcacaacaaagtctacttccttttcataaagttttccgacgtaaacttcgtaaccccttctatataactcaagagcaaccatgttctcgtatatcctgccatagtccatgttttttgttccaagtatagcggatctaaagccatggtcaaccaaataatatttttctatagtcgctagataggacttgccttgtatatcgtacctgttcatcttgtaaaacaagaatgactcacacatgtatgagacgtaatcagctatagtcttgtgattaacaggctctttgtcgctcttcaaagtgtccgcaatctttcttaaagaagtaaggttcgatatattcgaaagcataaaatcacctagtttttttagtagcaccttgtctctgatatcatgcctttgaacaagatctctcatgatgcttgtctcataaacgctctttaaataggcctttctgtcctcatccttagtatagacgtaggagcctgccatgcctcccatatcaatatatgagctaaatgccttgtcgatgtcatcatattcaaaatattccacaaactctttaaatgagaatggaaatacctctacgccaatgaatctacctgtgaataatgtagctaggtcactacttagtaaaaatgcatttgatcccgttaagtagatgtcaaagcgtttttgagaatgaagactatttatagttttttcaaaatgtttgcatagctgtacttcatctataaagaggtagttattttttgcatcttgataatgacctatgatgtaacgattaagctctttatagtctaacagttcttcattttctaataattgaagatcaatatagataatgtttgcctttgtatcgttttcttcaagatactttatatagtttttaagaagctcagacttgccagaacgcctcatacctgtaataatttttatatcgggcgtatttctaagacctatgagcctgtctaagtacttttctcttttaatgattttcataatatcacctactaagtacatcatagcacttctacttcccaaagtcaaatatttttagagtttgggaaataggattgagctaagctagttaaatacttgattgtttatgtaacaaaaagtgttttccttcgcttgctagtctacgaaaactgataatttctaagcttgttcacctgcgttcccatattcgttcgctgcgctcaactagatgggcccgcgggcggttcgctgcgccaagaaattaaacagttttctccgaatgctacgctcgtgaaaatcacttttctcactattaaggtattatagatggaacgagttcaagggatcgttttagtgcgaaattcaaaaaaaatagcttgtaacagtccgttacaagctataatacatataattaattatttattaatattggtagcactatcgacaagatcattataatactaagtgctagtgcgaatgttcttgctagtgatttactctttctccatttgcgttttaatttactcatagtctcctctttctatatatcaagtgttatttctatatgccacagagaatattatactatgtttttataaaatgtcaaggctttttataaatttttgtctgtttcgcacaaattttataagtaaacaagctttatgagcttcatatagttatagtcgacgatgacgttgtagtagccagctaggtactcatttgttgcatcgtctcctgtgtctgctagtaaattgccgcctactatgttgttaagtttggactgtgttgcgataacgatgatgttttccttaccaacttctcttattactctcgaggaaaattgctgattgccacggccgaatatatatccttgtcctcctatgatggttacgataatctttctcttcggatacttcataagtgcttcgtagatctctttttcgcttgcgtctttcttgatgagcttcttattatatacaaggtcgactccaagtagtgagttctcaaggccaagtagattcatcacgggtctgatgcttgagccgctaccaactatatacaaggtgtcatcttgcatctcgtctacaacaaattgggcgatggactcaaggtctgcattctctgatgcgctctgtggactcttgcctacttgcatcatccttcctttattaaccacattaagtgcgccatatagcttcacgttcaaaatttccttcctgaacgcttcttcgtctatgtccataacttctgactcgattatctcgtaggactcatctagtatgaaggctctgatgacttctgaggcggactttggtgaaacgccaaagactgagctgtgcatctttgtgccagcaggtataccgattacgggctttgtaaggcccactgcgtcgtagacgtcacgcgctgtgccgtctccccctgcaaatacaatcaagtccacatccttcttaagtatctctttcaaagcatttttcgtatcttccgccgtagtatcagcatctgtctcgtaaacgacttcgtagtttagacttaaattcttcatctcgtcctcgccgagtctgtgatttgctgtgtagaccataaacttatcctttatatcaactaagtgactaaaagcttcctcgcatcttaggtgcgccttctcgctcgcgccacgctttatcgcttcttcgtatatggcctcgccgtctgatccctttagtgcaactgagccgccgactcctgcctttggattaacaattaaagctactttcttcactatataccacctttccgttctttatcgtatacataacttttccttttaatttttcccctatgaatggcgaattttgagactttgatgagctatgttcatatataaattccttgtttatatcgaaaattactaaatctgccttcgatcctaccttgattatgccctcttcaagtccataaagccttgcagggttcactgttagcatcttaataatccttagtagatcaataccatgcttatggtgaagttcacttatagcaagcggaagtgctgtttcaaggcctatgatgccgctcggtgcgctgaagaagtcctttgccttctcttctttcgcatgaggcgcatgatctgttgcaatcatgtctatggtaccgtccttgatagcgcggataatggcctctctgtcggcagctgtccttagtggagggttcatcttcgcaagtgtgccgtgcttttctacagcatcctcagttagtgtgaagtggtgcggagtgacctcggcaaatattttatctgtgtactttttatactgcctaataatttctaatgaatcagccgaagatatgtgctggaagtttaattttgagtcagcttttactgcaaggtaggcatcacgcgcaaccatgaccgcctcggcaatgcctggagctgtttcattcttacctgccttcttaatgaagaatggatcttcttcgtgtaagctgattggtgcgtcgtactttttcgcttcgataagtgcgtcgtacaataatttcgccttcattatgggctttccatcatcggtaaagccgaccgctcccgctttgtgaagcgagtccatatcaacaagctcctcacctagcatgccctttgttactgttgcgttttggtatatggatatgcctaaattttttgatctatttaaaatatcttcaagtgtatcagtattatcgacaacgggctttgtgttcgccataagcacgactgcagtgtagccgcctctctttgcagcagctgcgcccgtaatcaaatcttccttgtatgtttgaccggggtctctaaagtgcacgtgggtatcaataagtccgtgcgatatatatagaccctctccatctatcacgcactcatcttctttatcgatgttctcatctatctctgcgactatgccgtcttcgataagcatatcaacagagtgaatgctgtcattgactgtatcaataaaattaatcttctttattaacatcacacacctccataacgatttttataattatacccaaaagatgatgaattttgcaagccgttatgttataatataaaaaaggaggaattactatgtcagaaaaaatttcatggctaacagtttctaacgaggttcttgaagacatcactgagtacaacgaagaatacaaggactttctttcaaaggcaaaaactgaaagactagctgttaaggaaatcatccgcatggctgaagctgaaggctttaaggatgtagaaggacttatagaaaaaggtaaaaaaattaagaagggcgacaagctatacttcaacaacaaagaaaaatcagttctattattcgttattggttcgaagaaattagaagatggtttaagagttgttggtgcgcacattgacagtccaagacttgaccttaagcaaaacccactatacgaagcaagtgatcttgcctttttaaagactcactactacggcggtgttaagaagtaccaatggacaactatacctctagcacttcacggtgttgtttacactaaggacttaaagaaggttgagatctccataggcgaagacgatgaagatccagtatttactattacagacctacttatccacctatcacgcgagcaaatgcaaaagaagcttgctgaaggcatactaggtgaacaactaaacgtacttatgggaactataccactagagtgcgaagacggtgatgacaagtctaatcgcgttaaagccaacgttatgagaatcatcaaggaaaagtacggcatcgaagaagaagacttcaaggttgccgaaatcgaagtagttccagcaggtaaggctcgtgaccttggtatcgatagatccatgatctttggatatggtcaagacgacagagtttgtgcatttgcagcgctaaagggtatacttgagatgaaaggtaacaagcacacagctcttgctatgtttatggataaagaagaagttggctctataggtaacactggtatggcaagctatgttttggaaaatgcactacacgagcttgcagcacttgaaggcgaatactcagcacttactgttagaagatcactaaagaactcatgggtactttctgcagacgtaacagcaggcctagaccctaacttcgactcagtttatgaaaagaacaacgcagcagttttaggcggcggtatcgcaatcgctaagtacacaggctcaggcggaaaaggcggctgcaacgatgcaaacgcagaattcttaagagatgtaagagatatatttgacaaggcaggagttgcttggcaaacaggcgaacttggtagagttgatgcaggtggcggcggaaccatagcctacctactaagcaagtacggcgcagaagtagttgactgcggaacagcagttctaaacatgcacgcacctaacgaaatcacatcaaagttcgacacatacatgtcatacagagcatacaaagcattctttgaataaaatagataaggagcaccttagggtgctccttatgcataagaggtgttatatgaaagattataagataatagatgggaaatacttgataagtgactacttagatgggcttggcatcacaaatttgatgagccttaagcccattaacataaaagcaaacgaagactactttactgatgagcttccaaaacttcttgaagatatcggccttaattatagctcaataaacgtaacacgccaagtgcactcaaataacattgcccttgttcatgataatggcacaaatttctacgacgagacagatggccttataggtaaaagtggcaatgtgctcgtgattaagagcgcagactgcctacccgtcatagtgtatgacaaagtgcataagcgcatcgctgccgtgcactcaggctggaaaggcacagcaaactccatagtcaaagaagcgattagtaagatgataaagctcggttcaaacgcgaaagagatgcacatatatgtagggccacatatacagaagtcctccttcgaagtgaaaagcgatgtaaaagacatatttgagaaaaacttttcttatgacggcatcatagaaaagaaagatgaagagcattacttgattgatctaggaaaagtccttagcttagatgcgatgagcctgggcgttaaagagaaaaacatatacatctctaagctagatacagtcacagatgagcgcttccactcatatagacgcgacagagaaaagtatggacttatgtatacactggtatgtatataaactttaagaagaatttgatattttgtcgcgaatatgatacaatattcgcgacaaaggagaagataaaatgaagcaatgctagctaagtaaatttagctggcattttatttatctcgtctcattcaaatgtgtatatcaagccatcttataattttcatccaagtaaatggcgcgattttatccaagtaaatggcgctttttcatccatgtaaatggcaaacaatctatggccttaatgatgttattggcacgacatatactccgtcatttcttttatatgcaaaaggtgcttgtgcacacaaaaccatcataaatgaaggtgctttcatgctattagtatcgataagctcagacaaagacttaagtgtctcagccccctcttcaataagtttgtctccacccagttttatctcaacaagaccataagaaccatttcttaaatgaatgacagcatcacactcaagtccgctcttgtctctgtagtgataaacattaccatctaaaagctctgaatatacccttaaatcacgaacagctaagttttcaaacaaaaatcccatagtgtttaaatcattaattaaatctttagggccaatacccaaagctgctgtagcaatggatggatctataaaatatcttgtatccgtcgaacggatagccgtttttgaacgaatattcgggttccaagcaggagcatcctcaatcacaaatatcttctttagtgcatcaatataagaataaagtgttgtctgatcaaaagtatcagcctgattagccagaatatccgcccttatagtctccaaaggagcctgcgatcccacatgccttgcgtatgacctaagtagccttttagccttttctacatctctctttacagaatcaaccctgcttatatcgttttgaacaatagagtcgtaataatcaattgcttgaaataaagcagttttctctcctagccctatcgccctaggccaaccacctctacatatcaagaaagcgatatcatccaaacttgtgttgttcgtagaagatatctctttgccatcaaaaagatctcttagagaaactgatccatctgagtccttggactcatataaactcatagtcctcatataaagtctcgatatccttccagtccctgtgtgcatagactcatcaaagtgtgctggtactgcagagccacttaatataaactggccaaactcgtctctttcatcaacctcatagcgaactgcgttccatatctttggtgcaagctgccactcatcaataagtctaggagtctctccttcgagcagggcagcaggattaagctcagccatctgttgatactgtttagtcatatctggtttgtctatagctataaagctctttgcaatttgttttgcagttgtagttttgccgcaccactttggtccttctagtagtatagctccctttgactctagtctttcactgagtaagtaatcagcaattctttctaaataatctctcataccagcctcacctcttagactcataatagcacatatatacacatttgtcaatatttatccaagtaattggcgcatttttatccaagtatttggcgcgattttatccaagtaaatggcgctttttcatccaagtatttggcatacaaaaaagagcagcctaagctgctcttagtatattcatctcttagtttgttacgttttttatccatttctttgatattactcttggtagccctatgcaagccttggctacttcttcgcagcatgccatcaaatacacaaaatgtagaggtaatttaaatactactgagcctaaaaatgacattggcactccaattagccaaacgcagctcatctctaaaagcattgagtatcttgtgtctccaccgcctctaaatatgccgactacaagggtcgagttatgtgttttaacaaaaagtattagtcccatagctataaataagcttgatgcgattgcttttgactctgctgtgatatttggaaacatcacaaagaaagcatctctaaatattatcatcaagccgccaagtataacgcctgttagtgctgataactgcaaaagccatgtgccgtatttgtatgctttttcttcatctcctgcgccaatgtagttaccgactataactgtgcatgcgcctgctaagcctctagctagaacgaagaatatattttgtactgtcatacctatctgcaaggctgtaacgcttcttgtaccaagctttgcgtatgcaatttggtatacgatttggcctagtgaccagaatgtttcgtttataataactggtccggctgtcattatatacatttttttgaaatggctgtcgaatgtcacgaagtcttttaatttgcctgttagtggtcctctatgttttttaagtgctatatataaaactgaaaactctagtatacgtgctaagatggtacctagcgctccccctgctacgcccatggctggaaagccaaatttaccgaagatgaagacgtagttgaagaaggcgtttccgaagaaggcaactgtcgaagctactagtggtgtcttggcattgcctatgcttctcattgatactgagtaaataaagttcaccgctgtaagtatgtatgagaaagatactactctaaggtaggttactccatatggtataacttttgggtcttgtgtaaagactctcataagctcttctggtatcgctagtgcaagtatcgtaaagactagtgacactactacggataagataagagccataccgtgtgactttctaactccttggtagtcttctttgccgtagaactgagcgatcatagctgaagttcctgtcgctataccaaagcagatcaaggtcataaagaagaagatctggttggcaagtcctactgctgatattgcgtagtcacctagtgatgatatcatggtagtgtctagtgtattaagtacgctcgcaagcaaattttgcagcgcaactggcaccgcaagactatatactagtttaagaaagtgcttatcttgaaacatagcttttaaatttttcatctaactcatcctttcaatcgtctaattttaccactaaaatgaatatcttgtcaagttcctatcaaacaaaaaagaagcctcgcttaaggctcctttaaacttactgattcaaatgactacttttcttccattactagtatttcttcgtcagcttcgttcttagcatcttcaagtgctgcttcataagctttgtaaactttttcttctaggtcagctcttgtttctgtgttgattgggtgagctatatccttgtatggtccgttaggtacctttcttgaaggcattgctacgaacaaaccttccttgccttcgataaccttgatgtcgtgaacaacaaaagcgttgtcgaatgtaactgaagctgtagctttaaggttcaatccttccttagtaacaagtcttactcttacgtctgtgattgtcattttccatcctcctcgtttagctaaaatatttgcttgctttttgtcataatatatattatgataatcatataagcataaacatacactagcttatatatatattatactaaagagttgaagataatacaagtactttttgaaattttgggaggaaaaatgggcttttttttgaaaaaacacaatattgacaatatatttttcataggcataggcggtattggtatgagtggtcttgcagaattacttatagcggagggctgcaaggtcaagggtactgatactggtgagagccaaatcatagaaagacttaagaagatgggtgccgttgtatacaacaagcacgaggcaaagaacgttgagtcatctaaggtcgttgtctacactgacgcaatacgtcctgacaaccctgaactaattagagcaaaggagcttggtcttgagatctacgatagagcttccttccttggcgaagtgatgaagctatatccaaactcagtttgcgtatcaggaacccacggcaagactacaactacgtcgatgattgcctcgatcacaacacatacacagatggaccctaccatactcctaggtggtgagcttgacgagataggtggcaacatcagaatcggtaaaggaaacatcatcatcagtgaggcgtgcgagtacaaggcaaacatacttaagtacaatccaactatggcgatgatactaaacattgacgaagaccaccttgacttctacaagaacatcgaagacatcatcgcaactttcaaaaagtatgcagacgacgtaccatcaacaggctacgttctatataacaaagacgacgagcatgtccttgaggcgataaaggatgtcaaggcaaagactatcagcttcgcggttgatgcagacgcagactacaaggcggagaacatcacctatgatgagaatggctgtgcgaacttcgaccttgttcacaacaaccaaaagactgagatcaagctaagcattctaggtaagcataacgtgtataatgcacttgctgccattgccatggcaaacacttacggcgcatcacttgaagatatcaaaaagtacatcttattatatacaggagttcacagacgtatagagacaaagggctacataggctctgtgcgcatcatagacgactacgcccaccaccctactgagatcatggcgacacttgaagctgtgaagaagatgtctaaaggtagaatcataactatattccaacctcacacatacacaagaacgcaaaagctattgcaaggctttgcagaagcgtttaagagaagcgatataaccatcatcacggacatctacgctgccagagagaaggacactaagcttgtgcactcgaaggacttaatcaagtctatgaaggagcacggctacgacgctatgtacatctcgaagtttgaagacatcgaaaactacttacttgacaaccttagagataacgacatcatacttacagttggtgcaggtaacatatacaagcttggcgaggatctactaaaaattaaagaaggaaagtaatatataagacaaggctctcagagatgagagctttttttctttctcttgctatgtaaatgattctagaggctacatagcaaggcttctactacaggcctcgctatcaaatattgaattttttatatcacaaacgctcttagtataaaattatcttatgctatgaataagaatttttcattataggattcttatatttcatttacactttactctgtttatgttacaattgaacaggtgacaaattttaaaggaggtatgtaaatgcttaatacatatttagcattcaaactagagcctatcatcaaggctatcaatagtgtattatggtcaaagtttttgatgtatgcactactagctctaggtatattctacactatatacttaggcttcccgcagatcactaagattggtctagcgttcaagtacgcttttggaggactttttaagaagaaagacaaaacagaagttaaagacggcgaaataaaggtaaactcattccaagcacttgctacagcgatcgctgcacaagttggtacaggtaacataggcggtgttgctactgctgttgcatctggtggaccaggcgcgatattctggatgtgggtttcaggtatacttggtatgtcaactatatttgcagaggcagttcttgctcagctttacagagaagaaagagacggagagcctgtcggtggaccttcatactacatttctaaaggtttaaagtctaaaccacttgcaattatattctctattacaataattcttgcacttggctttgtaggtaacatggttcaatcaaactcaatctcactagctttgtcaaaggcgataaatgttaatgcactatacatcggtattgctcttgcggttcttgttggcttcgttattattggtggtcttaagagaatcacgactatggctgagcttatagttccattcatggcagtaatctacatcatcggcagcggctttatactatatgtatacagacatcacttgcatctagtatttaggatggtcttcactgaagctttctctactcaagcagttgtcggcggtatggctggtactgttatgaaggaagctatcaaaaacggtgttgcaagaggccttttctcaaacgaagctggtatgggttcaactccacacgctcacgcaactgcaaatgttaaggacccttgcatacaaggtttcgttgcgatggcaggagttgttgtagacactatcatcatctgctcaatcactgcacttgtagttatcgccacagaagcacacttctcaggcgagcaatcagttgccatcacgcaatatgcattcaaagcagcctttggtgagccaggatctatcttccttgcaatctcacttatgttcttcgccttcacaactatagttggttggtacatgtttggcgagatgaacatccgctacctattcaaaggtaagacagcaatcaatgtatatagagtgcttgtacttatatgcatagttgttggctcggtattcggcgcatcaatcatttgggaccttgcagatacattcaacggtttcatggttattccgaaccttatcgccctattcttacttgcaccacaagttaagaaggcatacaaaggatatgtagctaagaaaaaagctggcgaattagattaattttgtatattgaaaggctctcaccataaggtgagagcttttttacgtgcaaagagctaatatataattataaaactatttgtcaaaatttgcttttaatagagcttcgaggctatcgtagcctttgcagtcaagctcagtcatgttagcagtgtagtcgccttttgaatcgatgacaaggactttattttccttatcaagcttgtatttaaaagcaaagatgctgcttaagtagtctatgtcaaagtaaagagtctcacccatgaccttcgcttcttcaggcgcgtgctttttataagaaaaactatcaatgccgtcgtcatcgccatcaaaagcgtagctgatattgtagctttcgttgtaagtcaaagcaaactccatacttccagggtagacaccgtagaaaatttcgttgtcattaacgagttttgagtaatcagtaacttcgtctaaagccttgtcgtcagcatattcgccactcttccaagtgcgagccatgaccttgttaatgccagagacgctaaatagccttgcgttaatattctctacgtagccgtagtcttcgccgtcaacacttacagcgtagtcaatacagtcaaatacatctactttttctttacttgttttttcttcctctttttcttcgcctataggctccttgccctctttagtctcaggcaccgcatcttgatttgcgtccgcttccttgattcccttatctatggcctcctccttgttatttcctccgcacgagaccataaacatggatagagcgagtaaaattaataatatttttttcatataaacctcctaaactagtttattgaaagccttcttttgaagatcatcaagcctttccttgttgcccttcgccatagcaccagtaaaaggcacctcataaagcacctttgctcctagatgaactaaagtgatgttcgccttgctgcttttataatccacagtaaaattttcaatctcctcccaaggcatcaaaacaaaatttcccttcacagtgtttgaaatttccttctcatatatgcccttctcattaaagtacaacacaaaagatctagcaccgtccataatgtaatacaatctactcaaaaataattttaataaaccccttttaaaatcattacgttttagggcaaataaataatttttatcgtcattaaaatcttccttgaccttatctgcgatttcactcgcagtattcattaaaagacccacttctatacctcctacttaaaaataaatacttccttgatgtctttgcctaagaccttgcaaatcttgtaggcagtctcaagacttggactgatagttcccgcttcatatgccataatggaccttctctttaagtccaccgccttggcaagcctgtgctgcgaaaggccctgctcctttctaaattcagcgattctgttttcgattataacgtccaaactatcaccccccttataattatggttacatttatagtactaaatatgttacatttatagtaccatagtcatagatctttgtcaatagttttttataaaaataaaaagtgacctagataaactaagtcactgtgcttatggttttgaatgttcgatttttattttttatttaaagctaattaattcttcttcttttaattcataaacaactgtagattgcaactctccaagctgatttgtccacgagtcataatctacacgaattttcttaaagccaagcttttcataaacgtgttgagctcttttattatttagatttgtcgttaggaatatggtcttcgcacccattttgaaaagctcttctataaacaaagtaagtattactcgtccaagccccttctcttgataagtgctatcacatatctttatacctatctcgcatctagcatcatcagaaaactcataattcatctcgccaatggccttgcctttgtactcaatcatcaaaactctgtgaagatcagtgtaatttttgatctgccctttgattctctcttcattagtgttcacaccattggggaagcctgcgtgagccatgacagagccgtcattccaccaagatgcgagctgagcagcgtcagcctctacagcgtttctaattaaaatgtctttataaattatcttcataagtaagcttactccttgatttatagattcttcttgtaatatataaataataccacgaaaatggctaaaagtaaagaaaaagtgacttagaactaactaagtcacctgtgattatggctttgaatgtccgatttttgttttcaatgtccgattttgattttctatttcagaatatttccattatggaactttttctaaatatatcctaaataattgtatccaaactgtctttattcaataaaaaatcaaataaatttatagttactataccattgtcgtctaaaaacgcttttactctgtctttaattataattatctttttgaatgaatcatctatatttaataaagatttcttctcctgctctgctttgtctaacgattgaagtgaatacgctgactgaatgtagtacctcttagtaccaagattggcaataaagtcgacctctctttgcttctttatgtccttatcgtttttgtccttctctctagtcatgaccatgccgacatcgaccatgtagccgcgatgcctaagctcgttatatataatgttctccatcagatgcgttggctcaatctgcctaaagtttagccttgcatttctaagcccaaggtcttcaaaatagattttataaggcgttcctatatattttctgcccttcacatcatatctataaactttttttaaaatgaatgagtcttcaaagtattcaataaacttgtcaatggtattcgcgctaatttttgattttagtgatgatgaaaatgtagcctctatcttcgatggatttgttaaacttgacatacctgatgccaatacatttaaaagatctgctaattcactatctaagcgaatgtcgtacctattaacgatgtctcttaaatatacattgtctagctgagtctttaaataattcatcttgtcttcgtcactattcatagagcaaagtgctggcaagccgccaaaaacttgatactcagcgaaagcatcttccttgtctaggctagtcgtttgcatatactccgaaaagcttagcggcataacatgtatctcgtctccacggcccgcaaactcagttattatgtccttcgataaaaactttgagttgcttccagtaacatacacatcaaagttatcttgatgcaaaaagccattcaaaacttgctcaaacgatgcgagtagctgcacttcatctaaaagtatatagtacttgtccttagttttgctcttgtccttgatgtactctaaaaacttcttcggatcaacaagcctctccccactcaaaatatctaagtccataagatcttcaccaatcttaagtaggtcatcacccgaatcaaaggcgaatttaattatatgttcttcatctataccgctttcaattaaataattgtagaagatggtatttagtaaatatgacttaccgcatcttcttataccagtaataaccttaataaagccgttattcattttgcgaattaatttatctagataaaaatcacgtttaatttccattctttcaccgccattctatttcagaaaaattccattatggaactttttctaaatagattatatcatattttatgaaaataagcaatttctatttcagaatatttccattatggaactttttctaaataggatttatttacttatttaatttttcttcaatgaaagccctcaattgtaaagaaaaagtgacctagcttactaagtcacttcttatccgttatttactttactttcttgcgcagttttgatgcgatgaagaagacaaacattcctagtactgctgcgagtatgattgctccacccggtttcacgtcgtagtagaaacttgctgtgataccacttagcatatacacaaggcctaagagtatggtaattatcagcgtcttcttgtatgagcgtgctagtatcagtgttgttgcaactggaagtactactagcgatgtcagcattagtgcgcctactaatttcaccgccatagctatggtgatggcgcttagtagtgtgaaagctgcgtttactaattttacttttactcccgatagtctcgctgtgtttggatctatggcgatggcaagtagtcctgcatactctttgatacttgcaaatactacaaagacaaagactacaagtgaattaatcacgtcctgcatagatactgaagcgatactaccaaataggtaggagtcaaatgaagttccgcctggtgcgaagtccgaaagtatcgaagctacgccaaggcctatactcatgatgatggctgttgccatgtcgccatattgaggaaatttatgacgaatgatctcgattagaaaggctgcaactatgcagatccctagcataccgattagtgggtcaaatcctagtataagtcccataccaactcctgctagtgctgagtgcgatagtgcgtcacctatcatcgaagtttttctgtttaccataaccacgccgatggctggtaccatgattgaaaggaagaaggctactacgagtgcctttctcataaatgcgtactctagcatgtcttcgcctccttgttcatttctaatttataaagaccagtgtcctttatctcgtaagttgcgtctagttttgcatacttcataagctcgtcaaggtcgtgcgtaactaaaactatgcttgtgcctttgtcgtcatttaaagtctgtattgtttttaagaaggaaattcgactttcttcgtcgacgccagctgttggctcatcaagtattagaagttttggattgttaagcatggctctggctatcatagttctttgctgaagtcctccagatagctcgttaaccggtttgttcttgtactctataagtcccaagtactccaaaatctcatccaccttttggtagtgcttcttgcgtgggaacttaaagaatccaaagtcctcgtacagattcaaaaccaccatctctctaacggtgatagggaagctaaccttgctaacaacactcatttgtggcacgtagccaatgtccttgtagcttttgtaagacgctatatttttatctaagacttctaccgtgcccttttgtggttttagttcgcccagtaagttcttgatgaaggttgatttgccgctgccgttcgctccaacgatggcgatgaattcacccatctcaagctccaaatttataccagatagaactttgtgatcaaggtatgaaaagtccaaattttttatactaattgctttcattttgtttcttcatctcctcatatagattcgtaaggttcatcttcatcaagtcgatgtagctcatctcgtcaatagtttgaccaggtattataaactccatacttgctagtgggcttatatccgagccagctatctcctcagatataaccttggcgatggctgttggcgcaccgtactcgtagaatatcgtcttgatatgtcctttctttgcatagtctatggccctgaccatgcttctaatgctcggttcactcatagatgttaggccttgaagtgggtactgcgtaagcttaaagtccctcgcaatgtaggcaaaggcgtagtgcataacgatgaactccctcttatcaagctcttggaacttgtcgcgaaactcagtttgcataagagtaagagtgtcaacagcgttaaaccttctcatatctatcatcgcggccttattaggaacgagcttcgttatctcacgcgcgatggtatttagataagtcttcgcattgttgatagatagccacgagtgcgggtcgtaagttaccttgtcaaccttttgcgagctgccccttaagagctcctcacccttcataggattgtcatgcatatcgacaaactcgaaagaaagtatatcctcaggaagcctgtcagtgtagactatccacttaccgacttcaggcagtacatagtttagctcgccagactcgtgacgcatctttatcctataaaccttgccgtcctcaacatcaagctgcgtctcttggcgaacgatgtcaccttccacgttcatgatcttgcggccctccttgatgagctcatcctcgctcatagtgccgtcatccctcttaaacgctatacgcaagaagtcttcgtgagtgtggccaaagagcatattgttccttttttccttgtaatcaaatcttgtcatcagctgaaaatcgccgatggctgcagcgcccgtgtatgagattaggtcaacattgtcagataaagttaaaacctttaattttggaagattctccttaatcttgtcaacccacctctccatattcgcgccgttaacaatcaaaagatcagccttagctagcctttttatatccttagccgatggttcccactcgtgcacagtagcagaagtaggcataaagctcttcacaactacatcgtctgcggcaaccatcttcgtaagcttgtatatagggaaaaaagaggtataaacaacaggtttacccccagtcatacctctttcttctatagcattatcacatgaaaaaaatgttattgatacaaggagtaaacataggaatattaattttctcctcatattaactaaattactcagttaattcttcagcaatgtcttggctgtctacagatgttctgatgtatgttgggaaccacttgctgtcttggtccttaatatcatctaagttatcagtatatcttgtgtgatagtgagctaagtgctcttcgccatggatttgcattaaagccatgtacttcttaacatctttagaatcagtttcaaatacgaaccagttaagagtcttgtttccgtgaggaacttggatagtgtcaactaatttgtactcagccttagcaatctccttgccttcaccaatcttgccatcatagaaagtgatagtgttaccttcaatgtgtagacccttgtagtcagttgctcttctttcttcgatacccttgatgtagtcatcagctgacatgttttcttccttagccttcttttcgatagcttcctttacaacaggatcatcatagaaagcgttgatagagttccagtcaccagcccacatctctaaagtaacttcttcagaaggagcctcagtcttttcctcagacttatcttcagccttttcttcagtcttgtcgttagtttcagcagctgcttcagtcttaggttcttccttagcaggctcttcgttcttcttgcaagcaaacatcatagatgaaactagagtaagagctagagctagcgttaaaaatctttttgcgtttttcattaaaaaaacctcctaataaatttcttttagtgattcgcacccttctcttagaggcgccaaccattagctatgttagcacagccttatacatatgtcaatagcctctagagcactaaatgcatacctttgaagcgattttgatataagagagcatttatattaacccaagttaatattttctaattgagtgatgctcagaagggttagcacccactaatacatctacatacttgcatatatagagcaaatttcatcatttatcacgaatagacatattggaaaacttttgaaaattttgcttagtataaaaaagtttatattagtacttgcacaaaaaagaagaaggcatcgctaccttcttcttaagtgatttattttgttttgccaaaaaatccatacaaagcgattgaatcatcgctattttaatttcgctggaaaaatgaagaacctcgtctttaggcgagaacctttgcactacgattgattgcgcgaagtggaccgacgaagcaagcggaatgtactaaacgtacatgagcattgctaaggaaggaacaagcgcaagggcgaattttagcgcgaaatttttattatgacaagttctggtcgattgaatattcgtggtacacgtgttgactcacgtgccaaacccctactcactatcatctcagtaccatggtcaaagctatataaaccgccagcatatttcgggaagaagccctcgtccggcgcgaaagtgccatttaaaatgccgggtatgcgccactgaccaccatgtgcatggccagtaagtatgaggtcaaagccataatcaaggtagatgttcacaaaggaaggacgatgcgcaagaagtatgctaaactcatcagcgtgccttgcatcacgagtcttatcaagctccgcacgcatgccgatgccacgtccagtgtagcgcgcctggtcaggatcgttcacgccgctaagagtgatctcgttagaattttgactcacgcgcacgcacttgccgccgatgtccttaatgccatgctcatcaagccaagcaagcatctcatctgaacgcatgctccagtactcgtggttgccagtaacgtagtagcacgggtagtcctttgcaatggctgtaaggaagactttcgtgttctcatcaggtatctcgtcgtcaaagatgtcaccgcccagtagaacgatgtcaggcttttctctgttcaccgcatcaatcaacgttttttgccctgcgccgtacctacatgagtgaagatccgtgatgagcgctatacgcatgggcttatttattttatccgaagtaatagtgtagtgaacagtttttagacgcacatcaaaagctagtagcgcaaggactattagcaagacgaggatgatgtacttaatgtgttttttctgtattttcatttattgctccttaaatctacttaaaaacggagagtatcagccctccgttatgattattatattaaatcttgcaaagcttgtcaagatatatagttcattaaaacaatgtcaagagatagccatccactgctgcgacgactatatacataggaatcgctcttagaaatgcttggatgtgctttttgggacttaggtacaaggctttctctgggactttcgttagtcttatacgacttgcatttctccaccaaagtaggtctatgactaataggtcgaagacatttagcgcttggcctagtatgagtaagtttataaagttttgcataaaatcttttgtgtgcataaagaatccgaaaattatgaataatactaaaaacaccacaaggtttgcaagccatgtgcgcaccatattagcttcgtggaacttacccttatactcttctacttctcttatgcgtctttgtacttcgtctgggtaggaggcgtagctccttaggttcttctcatctgtgcctgttccgaggtagcatagggcgaagaaaagcgcacataaaatgattatctctataattaacatggtatcactccttttactttattatatcacattagctatggctaataaatatttttaataatttcaaagacatttgcaaaataaaagcacctatgattatagatgctttgtgtaaatattacttcttctttagctcttcgatgtttttattaagcctgttaagctctttaataataatccagttttgatcaactagtccttgtatgccactaaatctagttaccttatatgtcttatacatatcctctatctcttcttcgtcaaagtcttcaagcttatatcgctcgataaacttttgcttatcctctctttgcctttcttcttttgctcttttatctgaaaatagtcccataatatcactcctattaattatattataccacaaaacaatttacatatagaaaagataggcccataacacctatctttttattctaatttattagcttccacgactctgccttagcttttgcattgatcagatctgagtaaagtccatcattcttaatcagttcttcatgatttccacgttctactatttctccatcttttaagactaaaatctggtcagcatttctaattgtctttagtctatgggcaatcattattaccgtcttattttttgttaatgattctattgcttctttaagtttatcttcattttctggatctatatttgctgttgcttcatcaaagataattatatctgcatcttttagcatggctcttgctatggagattctttgtttttctccgcctgatagacttgctccaccttctccgataatagtgttatatccttctggtaaagcttctataaattcatgacatcttgctttttttgcagcctcaaccacctcatcgtgacttgcatcttgttttccaaattttatattgttttcaattgtatcttcaaatagatatacatcttgaaataccatggaaatagaattcataagattttctatcttataatccttaatattttttccacctattaaaatttcgccagattttacatcccaaaatctcgcaataagattacaaaatgttgtcttaccagatccagatggtccaacaatagcagtcatagtattttcttttatctctgctgatacattttttaaaattggtctatcatcataggaaaatgatacatttttaaagactatgttgtgattttttattggctctgtaatacttccttctttcatatcttccatatcatttacataggaataagaatctattgcattctcaaccattcttagcattgccatagcagagccagacgttataagcccatcaaatattacaaaacttgctataagtatcataatagtattgactatttgactgttttcaacaaaatacaattttattgatataaataacatcaaacaaattgttatagctattatgattttagctaataaactatatggcattatagttttttctaaatcaaaagaatatttacttgcaccatcaaagcttttgtcaagttttttattgttacttccccttagattgtatgattttataatttgcattccttgcaatgttgataagacttctttggtaagtgatacctgaatctcatgaatcttatctgcatttttactggactttttttgcataagagcaacaatcaataaaaatacaatagacccaactattgctgcaataccaaccttataagaaaacaaaaataaggataagataaaaacaatagcattaagcataccaccgaaaaccataatatacaaagttggaacccaagtctctatattatctaagttagtagttgcaatagttgttaaatttccaaggcttaaacttgagaaaaatcccatgggaactttttttattttttcacctaattcaattctcttgtgtccagccataaaatatccagcatgtgtttgtttgagcatagagaaattttttgaaataattactccagctatactaactaataaaaataaacatgatattcctattgttttgaaacttatatccttgtttactatcccaaaaatcgcataataaatggctgcaaattgtagagcattaaaaatagaaccaaaaaaattagcaaatattgatttttttatatacacttgttcttcattagaaaaattccatatttttttaaaaacactaagcatctttttctcctttcaatgcagttatccatagattattataatcttttgattccttcaaaagctcttcatgacttcctttacatgcaagttctccatttttaattacaaatatattatctacatctgttattgtctttaaacgatgggcaattataattagagttttccctttgacaagctctgatatcgcatcttgaatcaaggcttcattttcaggatcgatataagaggtagcctcatctaaaataactattggagcattctttatcatggctcttgcaattgatattctttgcctttctcctccagataaatgtttaccagcttctcctactcttgtatcatatccatcggacaacttcattataaaatcatggcaagctgatttcttacatacttcaattatttcctcatcactagcatttttatttcctattctgatgttatctttaattgacatatcaaaaagaaaattatcttgtgctacataggaaataatactagataacttttcaagggacatatctttaatatttacatttcctatacttatagaaccactagctacgtcccaaaatcctgaaattagttttgcaatagtcgactttcccgaacccgattcgcctactaaagcatttacacttccttctcctatctttatatttatattgtttaggacttgcttatctttttcataagaaaaatctacgtttttaatctctatattataattttttatatctagatttgcgtttttatgagataattctctcgcagaaagtatatttttaatctcttcgaaaatagttgacattcttccaatatcatcttcaaaagtcattactctcatgatgttttgaatagtgccaaaagaaagaattatcaatgttaaaaatacaccaccatttagtgaaccattcatgaagaaatataaaccaaaaggtataattgtcaaaataccaactggggcaatagacatacttatcgcatagtctcttgtattttctcccatccaatcgtaataataatttgcttttttatacacattatccctgtattttttataagatttttcgccttgattaaatgttttaataacttctattccatttatatattcaaccacggaattattcatatcttggccaattttaactgcttgtggaaactttaccttcattcttttcatcggccctgccataaaaaatccaccaataactaatggaattaaagatattaaacttagtctataatctaaaattaacatgtaaacaaataatattataggtccgactaaattagctgtcatctcaggtatcatatgagccaatgttgtttcagtattatcgacttgatttacaattatgtcttttaacttaccagtagattcattcaatatatctcctaatggcatattaaataatttttccataaggctttttcttatatctcgtattatttgataggctgttttatgggaaatcattgtagacaaaaatacgaacacttctttgattataagacatgaaagtatcaagaaaattttatttatatagtaataaaaatcttgactaccatcaatcaatgatataatcaccttacttagaataatatatacaaaaagatttgaaattactccaagtattgcaaataacacagaaataaaatatggtgttttatttctcttaatgtatttttttaatagatccataaatttaactcctttcatcatcttttttcataacatttgtaaaataagtctctatcatttcagttagatatttcttattttttataaaattctcacgcgcattcaaaatttcgcaagccatcaatccggaattcatgatattaatcataaactcaaatgtctcatcagacggcaactctttaaacaaactataaaataattctttaaatacttgtatggactctttttttattttcacatatagttctttcagatcatcattttcttttaactcacataaaaacataacataaagctttacataatcattatctgcaagtatcttgtctataatcattcttgaaaacaactgtggacttaatattaaaccttcatcataaattgatttttgaataatatcctttctatttaaattaccatccaacataatatcaaataaaatttcataggtagaaccataatgatgatacaaaccacctctagaaagcccagtagcttccataatgtcgttcataactgtatttctaaaccctttgtccaaaaagactttcatagctgcttgtctaatctgcttttttctttcatcagcttccattttcatttcataatcacctccataccgacactactgtcggtattattgtatcaacattgataattattgtcaatagcagtttttagaaaaacaaacaaaagtctaatcgtgacaaattaataatttttatattgaaatgtatatatttaattaaaaaaataccctctttaccgaacaaatagtaaagagagtatttatcatactaaaaattaaattattaattttatttctttttaatgctcataccgacactcatgccaagcatcatgccgaccgacaagccgatggcgatattgtcagcatccattgctatggatacagcaattcctaagcacatacctatagccatgccctcagacatgtaggtttcttctgttttttcgcccttgtcagtgccttgccttttcttagctgtgtaaatcatgtaaacaactactacgcagactatgagcaagggaagaataattcttaaaattgccatgttttctcctttgtttatataagtgctttaaatcaatctgcattgattatatcaagcatttcttctccgatttctttgattaaatcaactacaagcgcattgcccatagtaaaatatctgtgtgaatttgatactccatcgagtttagtccaatcatctggaaatgtatttattctctctgtttctacaggtgaaagcactcttaaacgattgttgcccggatctctaactacatgactcatcctagatacagtagactcagatgtaactatagttcttgctggtctatctattggatctggaaattgcatgctacccataccatatttatattcatatcccttaggtgatttttttatctcacggaacccttttttctgtatcttaaatctttcaattttgtcagagtccaaataaaatttctcatcttctatattttctaatagcaaatctttaagagcggcctcttttctgcattttggcacatagtctgccatatagactttgccttcaaacataactccagtttttttaaatccttttttaacgaaaaaatcatttgaaaattctgttaaattattaaatgtgtttaggtcaatttttgtcagattagatacagactcattattcatagtacttgatagtggagccatatcttttataaattcgattattgtatcgtcatctttttttacaatattagatacagtttcataaaaattacttccatttctatatgcaaatataaaagttcttcttctacgctgaggatatccataatctgcagcatttatcattttccaagaaactccatatccaagatctgataatgttcttagtataattccaaaatcgcgtccagtcttttttgtttttactcctggtgaagctaagagcctatctacattttcaaataataaatatttcggctccttgtgctttattaccttgcgaagctcccaccaaagcacgccttttttcccgacaataccttttgcgccagatgttgcaactgagtagtcttgacaagggaagcctgccactaataagtccatgtctggtatttcgtctttatttacttttgtaatatcttcattgcttatttgcgttttaggaaagttctttatatatatattataagcaaactgatttttcctagatggctcgtattgattagcccaaaccacttcatattgctcgcttgctcttgataatccaaggtgaaatcctcctacacctgcaaatagatcaacaacttttatttttgaattactcatggtttttatttattctttgcctttcttcatcaataattttaattgcttcaagtatttctttttcgctatattctatcgataaattcttgtcatcgattgcttcatacatcattctttctttttcttttaatcgtctatatattttctcatctatatatccagggcgataactctccaatggctctgctgctgtttgtagatagtaatatcttgtatattgattttgatcaagacctaaacgatgaattctatctcttgattgcaacataaatgtcaaattgaaattatattcaaaataaactgcatcatgaactgtttgatgtaatgagattgactcacctaaagtttgtggatttgataccaatacttggacatctccatctctaaactcatctattagtaagcttctttcaagtttattagttccaccatagactaaattaaccttaatccctttatcttttaaagcatctctaattttatacagcgtatcaataaatattccccaaactaaaacttttttaccttcactaacaagttgttggactagattaatcccttcagtaaattttggagaaatcatattgtcaacatctatatctagataagagttatctatactagcattgccattctcatttaatagagagttaaactctgactctgagatagcgtatatatcaccatcatcgtcatatgacattagttccttataatcgattgccttatttacaagagatggattagttgaagcttgaatcaatctaattaattgtgccaagcttgagtcttcttttgaatatatatattcagctaaagccaattgttctgggcttggattcactcttataatattgtcatcttcagcttttggaacatttaaatcatttttattagttctccagaagaatggatatagttttttattaatttcttcaatttgtctcatttttggattatatagaaaagtagaatcccatccaaaatatgaattatactcattaccatataatatgtgaagaaaattataaatatcttgataagtattaggaataggtgtacctgttaatacatacttaaacttaggctttttagatagctctaaagctttttctgctcttttgccattaggattttttattctgtgaacttcgtcaaatacaagcattgtgttcatgtcaatgttttgctctaattttgttaaatatttaggtagagactcatagttaactaatactaagttactaactccccaattaattgataaatcataactaaaatctgctgatgtttgtgagtctattgacctaagaaattttttattgccaaaaacagcttcaaactctctcttccagctatcaaatgcattaagaggggaaacaacaagtattctatctatcctttcattagctggagcatcatctctatttaaataagcaaaaacccccaaaagcatagctgttttacctgccccaggaacagagaagtttgctgctctagccatttcatacataaaataagctgatcttaaatgtagttcataaagcggcctagttacttctgattgaacaatttcagaaaactcttgataagatattttcttatcgttagggaactcatctaattcacctttatatacatcacctaatatcttgtatttttctattgaatatttgtattgttgtaagtactctgatactgctttacttacaatgacttctaaaccttttctttcagctctttctttagtaactgtaataatcctttctatatctctataagttgtatctttacttatagtcgaattatcttcctcgaaaaatatagatatgtcgctgcctggttttaattttctatcacttgctgttaactgtatatcagttctatcatctctaattacaactccatctattaacttaaagataattgaatttggatgctgatcatattctgtctcattgtcattaagtctgtctatattaactattgttgattgtgattgatatttagcaatttcttcataagctatatcagaaacttctactaccgttactccttcttcttgatcgttccataatctttcaaatcgttcctgattagactttattctagactgaacactgtcactaatatcccaagacgtatcaacgctgatactttcataatttatgttcataccgctttttgtttcattgacagatccattgaaaaatactttttcatttccagatgaaataatgccaaatttatcatgaaaaattcctctattagtaagagcaatttttatccttgctcttcccatggcaatcataaaagctaagtttccaagctgctcttgagtttttagtgtaagcctttcatttctttctgctagctttaatggttttacctcttctagtaaatcatatcccactttaatcctgtcatagtcttccttacttatttcttttgaaataataaattctaaattaccgccattttttgctagctcttctaagctgtctgaatacaaatccaaaccagacgtgctaaaatagccagaaacacgttgatatagctcagcttctctaagcagtggtctgtaaaatccctcgactagattactagtatactctggtttaatttttttctttaattcattggaaaatgccataattatatatccttatttaagcgatataaaatatcattaatatctttaatatactctcttgcttgtatatgttcatctgcagttagttctgcaaaatcttctgcatcaatctctgataaagaatctctaacattttctagctctaccaatgctttagttctttcatttataattttacctttatttataattatatttgtagatcttactagtgagtctacactcttttgtgctccaatatcttgactaagtacagtttttaactcgttagcagattttagtggactctgttcaaatgcatccataataacatcaactttttcatcagcagcatctaaaaagtgttgcaatctatcatggtcttgaagcacattctgttttaaatctctcataacacgggttgtatctttttgatcttcgccaaccttagatgatatcatatataccaaagcagcctcttttatagcttctttattctttgattttaatttagtgatagtgttttctatctcttctataggtccatcaagctttaaatctcttgctaaataaaatttatcaataggattgcctcccggagatacaatttcaataaattttatgattaattccgctaatcttatatctctattaatacctttagtgctcttagcgccagatgcttttttatactcatcaatagtcattagcttttcaacttctatagtgttgtaaacatcaaagatacgatcaatcgggtcataattaactctttcctcgcgacccaactgcaaatctaactctagctctttaatgcttttttcatcagattttaaatttgcattcagtggtaatattacagcattgaaatattgtgctatatttttatctctttcaatcattcttagagctgttaaccttctattaccatcaataaccctgccatctggaagaactacacctggctcttgctgagatttttcttcgatagaaagtttagtatctttcattgcttgcacatttgattcgtatataaattgctcaaaaaccttattgtaatctgatttcccaggttttggacttagcaaaccattagttgagctatattttttatacatagtattaatacgaccattttgattattataatataagtattctaacggtatcgcataaacatcatatttatcatcaacttgattacgtattgataattttttcttttcaccagttttctttaactgatttccagctgccatctctagcaagttcatatactaaacacctatccttccctatagattctaacacattttattcctaaaaaattaaaaaatggactcattttataagtccattatactatatttataaacaaaattccaatgtgatttgttaagcttattaccttgtattaatatcattcttattttatcaaaacaacaccccacctactcactctctcgtcgaataatactcatcacaaaacttatcccacttatctacatattcctcatgatcaagcaagatcaaatcttttgctgtgtatatatttctttttcttgcttcttcaaagaagtagtcgaagctatcgaagtcttggctaaaataagcgtagacgtgcttaaagccgaggatatatgcaaggtagaggcgtgtatggccgtctagggatgtgtatgtgccatcgtgcatagcaactggtataatcacgtcttcttctctcgtaacaaagttctttactgcttctaatttatctctatcgacgaagaactgtattggctggattttgtctatatcaagcttaaatagctctaggtctttgaatttcttcacgattttgccgctctcgtcgtaaaactttgtgatatgctctgcgttgaagcgaaactcgtctatgacctcgtcgaagtaggcttcatctcctattataatagcctcgctctgtgatatgattttgatctctatgggtacatcgccatttacaatgtagcagccgtgctgattaagcgcttcttgactgaagcgatggtcgttgtaggtattgattctagttatgttcattaactcaccacctaaattacttgttaagtctattttctaagtatataatttattttatcattttatcggaacaatagcaaggctgccggaatgatgtatctcattttgcggaacaattgacatgaacatggtaaagtagtataataatgcaaagaagattcatatgttttataggaggtgttttatgtataaatctaaacgaattattgctcttcttctttctttgatgcttatagttttaacatctgctgcttgtgcaaataaggatgaacacgcttacacaaaggctgagcttaaagggatgaatgcgcatgatttgtatgaattattaaaaaagaatggtttagaagctggcgctgacattaaggaaattctttctgataagaaattggaagagtacatcaaagaggattttgacttgcttatagagggtgcttgctcaagaagtgataaggcgtacaaaaatctggctgatgaagtggaaaaagtttacaaaaaattgattaaggagtagttttacttaaaaagcgatacaaaaatggcgatagattttaatttctatcgcctcttcgttttattctaattaaataatctaagtataaaaatcgtaattcctacaatcaatagagctattgctgcccataaaaatccgtctataattttttgatatggtctttttgctctttcttcaattttttgtatctcgtctaatcttttgccttcggtgaaagctacaatctccttgtatgtttgaatatcattatctttcttgattttctcaactttgattgcaaaaaacatagcacaagccactaatacaaaatatggaataaagccatacaagccaataaatttaagtagtggcataagagaaataaatgctgctagcataagaattcccatcattgttgcatagaagttcaattttttaacttcttctgagttaatttcatttttcatttgttctagatctcctttaattaaattatcaattgatatttcaaaaacttcgcttagtaatacaatgctatttatatcaggataatttttattgttttcccaattcgaaatagtttgtctcgtaacatatactctttctgcaagttcttcctgagataaacctttttcatttctgtagtgtttaatatgattgccaagctccataaaatccatacctcctttcatgataattatattagagatcttgtattatttctatcaaagcttctttacatttgtatattttttctgtgtcaaaagctttttacattagctatattgctgattttgctgtgttttctatactaaattcaaattcatcaagactctacttcttgatatattcttcatactcttttcactcacccaaatactttacatatatttgacaagggttgttctcgtcccataaatccgggaagacttctaattctttatatccgagcgctttgtaaaatttattcgttatgtcgtaatcatcgtaatggccggactgaacggtttttacctgtgtgtaagtgtagcctaagctctttgctaagtcttcataggccttatttagctctcttccagctccatgatgatgaaactttttcttcacgcccatgacaaagatctctgcacagtcgtggctacttgcgccaagaacgacaaagcctactagctcgtccttataaaagcttgctaagaacggcttttcttgtgactctttaatgtagttttctgtgctctcgggcaagccgaaccattctggcaaatcattaagcacttctcttgcgatattttctttttcttttttatctataatttcttttacaataaatttcatgctataattaatccattatcctttcatctgtaattatatgctctacgccattttataagcttgcctatctatagaatatcaccacttatgaatttctccactcatcttagatgcaaatagaatatcgtagatataaagctggatagtcagcataatcaatatagtaatagtccacagaattactgtctcatataggctatatttgccttttgtctgaaattttccaagcaatgaatcggaaaatgatctactaagtaattcatatattccataacctagtactgctccaaaagtattcgtaatcaagtcgtttatatctgtagtcccaaatccaaacatttgaatgatttctatagacaatgaaaatagaaatccaagcaaaaaaactttggataagctattatattgctcatagagtaatggcagaaaaattcctaatggaagaaaaaaaattacgtttaaaattgtatcttttggtcctctaatcatatctataaaaggtagcattgaaaatctcggtgaaaaatttgcttttaaacaaacacctgttgcagacaagactccaacaagataaaaagaaaatataaaagtcaaaattatatgtcctttgcttggcgtattgccaaatgattttaatattataaaatataatattagtaatgccataataggcagatatccacttattacgtgattgaaaataaattctaaatccataaaaattcctccctgtttattgtaaacacattgtatcatgtttactttaactatattttccttatatttcttttaataatttcaatgccaaatacaatttcccaagatcgtggttggcgctattaagtccctctacctcataagagctctcatctaaaacatctcctgcttcaagaaaattataaagctcaaagccataaaaatcacaagctgcttgtacgcctgcaagctccatctctactgctatgcagccttctgactttctctttgcgacaagagcgcgcgtctcacgaagcataacgtctgtagtccagacctttccattaatatagggagctttttccttgataaaaaattcttcaagctcatcatggtttttaatagcaatgtaatctgaaggagcggcataataataagatgctccttcacccctgtaagcctctgttggtacaatgtacttgccaagagtcttttccttgtcaaggctgccgcaagatccaaacataataaatttattcgcacctgtaagccagttgacttcagcgcagcttgatgaagcaagtgccgagcccatcatgctaaggtagaaggcaaattcttgaccttcaaaatggcttttatatattggcattgagccattcgctgagtctactctagcaatttcttggcactcaaaattatcgagtaaatattctactatgctttttgaaaatattaccaagcatttatctattaaatttttcttctcgccataaaaatgttctagacttataagtggctctgtgtctatatcgtaactgtctataatcataatttttcctctttcgtttacactataccatttgtgagtaaattaataattatattaaatggtgttattataatatttattaaattattgatatcaaatcctgtaattatgaaaaggatcaaaacaggatataaggagtagaataaatctacagctttcaattgtttttttaaagctattttcaataaagctacaagattgattacaattaatataaagtgagctaaaagcagtaaggcaaatattaaatctataagtctactttgagtatttttcaaaagatgtatatcatagatataattaaatcttccttcaaatttaataaataatgctatgaaagatattataagtaagtgtgaaattaaagtaattattctaatctttttatagtttttcattttaatacctcaaatttttaattattattcatattgtacaactgagcaaatccaaccattaaaccctttcatctgtaattatatgctctacgcatttatgctccgagctaagatattttttcataaatgttgggtacgcctcgcacttatcgagctcatctatcggcacccaatgcattgtctctttagcacctgactctgtagtgctttggctcgtaaagtttcttttgcccatgggcttcatcatatagtagaatgtaagctcatggaagtccactccttttaagccagagcttccgatgaagaagttctcatgtattacagcaaggtgatctacctcgtaattaaggcctgtctcttcaaatacttctctcttcacggcttcttctgatgtctcgcccatgtgaaccgctccgccaactgagtagtaatagtcgtcctcatcatttcttgcaagtagcacagagccctcttcgactatgatggctgccgctctatatctaaatgcttttttatcgttaataatagcgcaattattttccatagttttctcctttatatactttctcatctaagatgcgtaacttatggttcaaatgcaaacaagtttccaagctgaattgaaaatccaagtgatttatacatttgtatatcgcattgtgcacaagcaacagtcattgaacttatagcacttgacctatatgcaaattggactagctggcgtgctattcctttatgacgaaagtcaggacatatgaaaaaatcttcaaatattccacttggcatatagtcaaaagttgaaaaaccaactgttattgaacagcagcctaccaatgcatcgccttcccatgctccgaaaaataatatttcccctttgctgattgcatctttcagacgtttcttggatatatcattcggtatatcctctcctatttctgctttatattgcttttgaagttcccacaaaagatcaatttgtgaagcatctatttccttgtaatccattcatgacctccatataaactcctatttgtttaataattaaaggagattgtttgtttacttacatctacttttgcttctaccccaaaaggaattatacatcttggagttgagtgtccaatatttatattatagacaataggtaagtctttattagtaatttcttctaataaaatagatttatactcatcataatagacttcattttgaggtttccctactagtattcccgacaatacatcaaacaagccgtagtcttttagagcaagtatcattttcctatataaatctggttttgttttttcttggcttgtttctataagtaaaatcttattctcccatgcctcaagacttggaaataaatcatatttactacaaatttctactgtatcttcaaataaagaattatcgaacatatcatatattgattctatgcatccgcctaaaattttcccactaaatataggatttcctcttaaaagctcaaacccaatattaatatgacttttcatttctacgccaatagctttctcgctaaaatcttccctttcctcataccaaacttcactagggtgtatctcttttattttccctgtttttataagttctaaaaagtatttttctgtataagctaacatgttatcagatagttcgcatacatctgtcaagaaagcctgaccataaaatgtttttatgccaagtttatttagcataaagtgatttattgttgagtcagaaaagcctaaaaaaagtttttgtttgacaatattttttaatctatcgccttcgaacaaataaggtgctaatctataagtatcttctccaccaatagcacataaaatcatatcaatagtgtcatcttcaaaagcaagtatcaaatcgtctgccctagcttctggatgattctttaaaaaatctatgcctttcagagaattgggtaaaaactctacctctacacctagcttatttaatctgtctaatcctatttttacttcatgctcaacaaaactttcccccaaaacaccactagataagctaacaattcctattttctttatcataatttcctccttatattttttcaagtcgcacaattgattcgatatgaaacgagtaaacactaagtatgtcaagtagctacgttcgtatgtgggaatatatccataaaccttttaacgatagcttaagattatcgttaaaaggtattgcctcgacaaactgggagttgtcagcttataagcttactcgctaacttgtacacttgatttatttctttactttctaactcccagttataaagttcctctttgattagctctggaaattttttactaatatctctcaaagcatttcctactgactttctaacatattcactcgtatcttctttcaatgcagcaattcgtctgatagcttcatttggattatctttgaaatatggtctgctcgtccatattcttaatccctctgttactgctctccttgtattaggattattattttttaaccattcatcaattactggaagtgctttttcatatcctattttcttacaaaattcatcaaatgcctttgccaagacttcctgaactctccaattatcgtctttggaaacttcatctcgcataaatgctaaaatatcatcttgttctgacaagtatccaaaaagaaatacaccatacaatctaacttgatatacattggatttataggctaaaaacgccatttttttactatgctcattatcattagatttataatcagcaaaggctcttttttcttcctctttgaagccattttctatcaacgaaaattctttttctaaactcacgatatattctttcatgcagcttcatctcctcctaacttccaatttcttactttgccaccttttcaaatcttattaatcagctttcttttgaatacactgcagccatcactttctccaataaattcaaaatcatttttcaccgcaattcgtttggtcttttcttgattcgggtcacactcaataatcaagtttttccctatctctgaactacgctttataaaagcttttgttaattcattggcatatcctttcccccagtatctcttattcattatccaaccaagttcgaaggagtctttgtcatactcatgaaatattacatatccgataaagttctgattaaaatcctctaccgcatagatcaaaggagaatcaatcagtgcaacactatttagaaaattcgctgttttttcccatgaaaaaggcggttctataaattccatgacatcttcatctgaaagtagattatagagttccattagatcattattagtaaattttcttatctttaatcgctcagtaatcatgcaaacccttctttcttttttccgttgttttcttacattaatatgagacatcaatgctaccgtcttaacatggcctgaggcaataacattgatatcatgtgtcatttgtaagttattcaatgtttgcatctttgcaaacttgaatttgctgtactctatagcataattactccacacccataaccaagaagttctttatgtccttttgcaatcctttgtagaactgttggtttgcaatgtaaattatgcttgccgtaatcaaataaattctctttagcctgttccgaatcgttgcacgcaccaatgatagaaaagtgttttgcaaactgcttgatattcgaatccgttggaagtatgtttagcatcggaggatagagtaaccaagaataacaaagaaaagctttatactctgtagatgaaaagcaatccttgaaaaacgcctttgcttggtcaagagatttctcgactaagctatcgctaatattcgcacctttttgaatatggcaatttatcacaggcgctccattgggcaatgtccgtttctgttcttgtgaaaacaccatataaggctctccaatggtttcctcgtccaaataaatcatattgaatgtttggtattgcaatactccaactttgaaaatgtgcacattcataatgtggcggaaccaaataacatcatctttagaaatgccaattttgccatgctgtttatagtacaagtttgcccgcagtgagacatctctaaaagtatccaaaacaatttcatctgttacaccaatggctttatactcggcatacttttgcgtcaataaatatataactaccaccaagcgagttagtggcattcgtctgcatagcggaaaatcaaaatcgttgctactgtaggcggttgctgcgatttcttcaacttgccgtctacttttaatcattttttgctttactgcatcctcaatgttaggttgaaattctaattgaggaagtaatgtttctaatatcatcctgtgtcctccataattagttctgtaggattatttaccgtgcgtcctccacacaccaaaattattattcttcataatgaaccaccctttcataggtgtatttattacagcgccataggcgatgaatatcaaaaattcaggttgattatcagttcgtcaacttccgatttgtaactccgctaaaaacataataacacacgcagtcttcaatgccctataagaaatacggactttcctgagcctttacctagtctcaaaaacgctcataaatacactactcttgatatttattcgttttcagtctccacttttttcattaatgctaccgtttcaacttgttcatcattgtccaaacttatattcaagtcatcatctataattgggagcttgaaagtaattgattttagccattgtccgttaggttgtttttcttcgtaaatttgaatttcagaaatcaaagctgtaattaactgtctacgctctacatcattcatgactttatagagtttatcaaaatagatcagaaccttatatatgttatctcctgtgagtttttcagcttcaatggtttgtttctttgctttcgcatcaattagtgatgattctaattcatctattttgtcatacatacgatatagtctatcgtctaaatcctgtttccttctcttataatgcttatcttcaacatctaaattatctatttcctcaattagcttaaactttgtagaatgactcttcctcaattccttttggtaattatctatttctttttctatttcagaggtgtccaccttcatgttgattttttcttgcatcatagaaacaaatttcggattacttacaatcttgacaattacctctgcaacagcatcatctaacaattcttctctaatttgcttactgaatgtacgcttatgacctcttatcatctgcctatgtttacaaccatagtaataaaaagtctttatactttgtgccatctttctttttcttgatacacttgttcccaaacattcccactccacatatcgggcattttacaattccagaaagcatgtgtgtgcgtgtatcttttcctttattcacatgctcatatttctttgcttgagattttagcataacctgagcagcttgccaaacttcatcggaaactatagcttcatgtatcccttcagatattagatattcatcttgttcaacctgcttatattcatttcttgtaccatgaactttttctaaagttcttcttccaaatgctatttttccattatatacaggattctttaatatctttcttataagacctgcatcaaacaaaggattcttaccattctgtcttggaatttttctaattccatgattttctaagtatttagatagcccattggctcctatcgtagtatttacatactggtcgaaaatcgttcttatggcaactgcctcttcctcatttataaacagcttgccatcttcaagtttatatccatacggagcaaagccaccattccattttccttcccttgctttttgaatgcgaccttacattgtttgaatacgtatgttttctctttctatttcagccacagctgataaaacagaaatcattagtttcccagcatctttagatgaatcaatgccatcttcaacgcagataagattaactccataatcctgcattatctgaagtgtagaaagaacatcagcggcatttcttgcaaatcttgataacttaaacacaagaacaaaagacactccatcttttccagattttatatcttccatcatgcgagtaaactgtattcttccctcaatataacttttctatatcatatataaactttgatttttgaatttaagtttggactatcatttcaagtatattataacacttttattagtccatctcaatttgtgtttttgccatgtcaagactatttttcatctcttgattttttactggcgttggatcgggcagattatctaaatctaaaacaccagcatattttgtaatcagatttgcaattaaatcagccagtccattccagtcactatccacagacaccactccttcctttacaaactttctataatcaaaatatgttttcttctatattttaagtttaacgactttggtaggtgcttggcagcaacataggaatctcacctccgcctcttattccagacgagccggcttaaactattgaagtatcattatcactacttgtttcatcgaacaggttgccacatctgtttttatgtattcttatttatcgctcgctttcttgtttccttgatttctcagtattcataaaaccaaaatttctttcagcagaaaggtcatggcgtaagtcataatcctccacaagtagataaagtcctacctttggtctactcagttgtcaaggaacaattatttgaaagagacttttctttgtattcttttcatttgaaataggcaatcttcactatcataaaaaaatacaggaagtcaaacttcccttcactttacataaggacagattgaccccccttgcttaccaaattttttaatttatttgataaaatttttcggttttccattaattttgttttttataatttaaaaatcacgatataaaagcgactaagttattttattcttaatcgcttcaaaaattatctatatgtgctttacaaagctttttaattcttaaatgtcggttgcttttaatcgtttactttttttacaatctccagcttgcagctcgttctcttgccttgataaatgctgaataaattccttctctatttatcaaatcgttatgtttgccttcttgaaccaatttaccgtcatcaatcactagtatctgatcggcttttttcacagttgaaagtctatgagctatcgaaactacagtgtgtcctttggacaattcctcaaccgcggccaaaatctcatattcattttcaggatcaacggagctggtcgcttcatctaaaagaataataggtgcatttttaagtaatgctctagcaatagaaattcgttgtttttcaccaccggaaagagaactgccaccctcacctaccatggtgttatagccatcaggaagttccataataaaattatggcaacgagcctttttagcagcttccactacttcttcatgacttgccttaggatttgcaaagcgaatattattctctatagtatcttgaaaaagataaacattttggaaaacaagtgaaagatttttcagtaaactttctactttataatctcgtatatccctatttcctaatcttatttcaccactgtcaacatcataaaaacgagagatcaaattgattattgtcgtttttccggatcctgacggtcctacgatagctgtctttgacccttgtggaatagtaaatgaaaggtcttttaaaacaggcttccctttgtcgtaactaaagctcaccttatcaaagacgatatcctgattttccataacttccaaagtcccgtcacttatttcaggaatatctaaaacctcatccaaatattgcatattggcaggattcttaaccatgaggatggctgcattttcaagttgttttaaaccgccgaaaatcataaagccagcagctgaaacagtaagcgcttgtggtaataaaacttcccctttcgtataaagataacaagaaaataatgtaacaagtagactcgaaagattaataacagtagaaaaaattcttgcataaataacaaagacgatttcaaaatgtacttgagagagtctaagttcttcagaagcatttttcaatttagaatgtatttcttcaacaacaccttcatctgcaaacggaaaactgcgaagcacaggaatcccgctaatgctatcgactaacgcatcacccacctttgtaatagctgcatgctcacgtgcaacctctttttttgcttgattaatcataagagacatgcataaccaaataagaattaaacaaattaaagttaaaaatccaattttagtatttacaccgaacatcccaaccaacagaaaaaaggatattgaaatgcctgaaacagcaaagtcgatactcattgcagagtaattttcaagactcttcataacattggtaaatgccgccataattcttgataggctttgttctgcaaaatatcccataggcgcctttttaagtttttcgccaactgcaagtctgtagtctttgaaaatgccaaagaaaacaccgtcactaagaccacttttcgcccagcctgtcaaaaaattaaaaagaaaggaagcaaaaagcactccgaaaattgtccaaatatgctcccatgtagtttcattcatccaaccgaatgcaagaaagagagcgaaaaatccaaacagcattgaagcattttgcagaaaaataagaaaaattcctgccttaagacgatttttatactgtccagccagtttgaatgataatcttataaactccatgtcttattcctcccctaaatattgtttccacaggcttgcataaagtggctcttccatcagttcttcatgtttacccttggctataatttgacctttatcgattagaattatttggtgtgcctgcttgattgtatttaacctatgagcaaccatcacaagatttttcccctttacgagattcgatattgcttcttggatgagagcttcgttttccggatcggcataagctgttgcctcatccaaaataatggttgatgcaggtttcaaaattgctcttgcaagagttattctctgtctttcaccgcccgacattgctcctcctgcttctcctgcttttgtatcataccctttaggaagtgccataataaagtcatggcaatgagcagcttttgctgccgcaataatttcatcttcggatgcattaggctttccaagacgaatattatctctaatacttacatcgaaaagaaaattatcttgtgaaacgtaagaaatctcttcagcaagctgtttaaatgaaatattctttgtatcaacattaccaatggaaattttacccgatgactgatcccaaaagcctgctaaaagctttgcaattgtagattttccgccacctgaaggtccgacaagtgcagtcacttctccggggcttgtttcaaaagaaatattatgcaatacctcagttccgtcatgataagaaaaacttacattatcaaattttattccctttcccctatctatagtaactttattttctgcatcaggacgtttttgatcaggcatatcaagtaattcttgtatggatacccaagtattggaagccatctgaaaaagttcaaagctcatcatgattgcaaaagcttgtggaaggatagcaattggcagaataagtgataaaagcaatgtttcaatgcctatttgcccgttcccatataaatagaaagctaaaggtaaactcactatctgtggtgtcatcattgcagccgtcataagtgctttgccaaaccaactttgcttccaccatttcatcgttgaaaaatgatagaattttaccgcatctgcaaactttccatacgaaactttgtcttgtgcaaatgctttgattacaggaattccacgaacatactccgcacttctgtcagcaacattagcataacttgatagccacaccgccattctactacggtatttatacatcattgtaatcatcgctaaaaaaacaattggtagcggcacaaatattgataatcctatacgccaatctaaataaaacaaaataactgtgcagagtatcggatgcaaaagcctactaggtagttcaggcatcaaatgggctacccagtcttccatatctgctactcgatccatgattattaccttaattttacctacaggattatccaccaagtaccccattggaattacctttaatttttcaaacaaagtctgtctaagttttgcaagtatggaaaaagaggttttatgtgaaatagttgtgctaaatcctgtaaatataaagtaaaggagcagtgatcctattgcaaaaaaagcatatttcaatagtgcatgaaagccgaccggattactcccggcattttttataagccatcctgctgcataagcactaaaaaaataggtagaaaaactaaaaagctctccaatgcaggcaaaaataacagaaattcgcatcctacccttatactcaggtgctacactcataagtgctttatttaaaccacccatactgattttaggttttttttcgctttgctctacatcactttcgattcgctgcataatctcatcaggaacatccaagtttaaactctctacctcttttattaaatttttattttgcttgagtttcttgctgtccgaagcagagcaaatcaactcatcattttttttcttcattaactcatctccttttcagttagcttatactaactattagtttaaaaaaaattaccttattttacctttttcataactatcaataaacagctttattatttctataaaaaactctctattatttataaagctatcccttgccccatctaagatttcacaacctagtataactgtattcataaaaaatattaaaaagtcatttgtgagatattcgcacccatctttctttgcaactttaactcctatatatgtagcctttaaggattcttcgaccaaaattgggaacaaattctttaggtcatcattgtttttcgtagcctgaagatatatggcatatacgctcatgagttcactttcatcaagtactttatcgacaatcatatgtgctacagcgttagcatctagctctcccgaatactctgccagaacttcattaatcttgtcgactcgataagccataccttctcgcattaaatcatgtaatatctcaactttatttttgtaatggtaatacacacctcctcgagaaagcgaggtttcaacaataatatcttccattaccgtgtcagcaaaacccttccttaaaaaaacctttttagctgcatttaatatttctttttttctgatttgactggctttctgttttttcccttccaaaatatatacctctctttgtaaacaaaactgacaaaactgtcagttttattgtagcataattttaagttagtgtcaactaattttttcggaatacactttatagtgatttgtaatatgaaatgcaacaaataaataaaataatccatggctaatctgataaagtgttactacccacaaaaacacaaagtagaagccatggattaagtatgatgaaaatcccacggtccattcagatcgtggatgtcactaccgttggccgggttggattcagcgtatggatgaggcgggccttactcgctctatgtctaaaaaaggctgtactggcgacaatgctgcttgtgaaggcttttttggaagactaaaaaaaaagagatgttttacaataaggattcgccaggagtcaacatatttgaattcatgcaggagcttaatgattatatttcttggtataatgaagagcgtattaaaacgtcattgggaaatcttagtcctgtagagtataggagaaaacttggatttgctgcataaaaactgtccaactttttgtccgcacccccgtaccttttttaaattttattcgtttatttcaccagcaatatctatatattcttttaattttcgttgtaataaattcttgtctatcaattttagacaattcatcttcacctatttatatatccaaatggtgctctgtattaagtttggataatagagttaccgtctcaacatgtgctgtaatcgttgcaagggcagcaccttcaatggcgtattcacccataactgtcattaaaatcggatcaagaatgatattcagtaaagctccaagtcccattatcatcatggcttttttcattagaccttcgccacgcataaccatgtttgcggactgtgtaaaatttacaaagagggaaccgataaagattactcttaggtatctgataccataagctttgatctcggtcaggtgcaggaaatagtcgctgtccatcgtgagaaagccaccgtcccgcagggttgctactacatggcacacactgggctttgacacctccatgtgccgagccacatctacggagcgtaccatgccgagtttcttttgaagaacaagaatggtttccagatagtactccccggacgcatgaagtttcattaagacctcccttatgcagataatttctgttcggcgttccacatggccgcatactttccgcctttagccagcaattcatcgtgagtaccggcttcagcaatctttccgccagataccacaaggatttgatctgcatttttgacgatggaaagggtatgagcaatcattaccacagtctttttctctttcagcagattggcgatggcctgctttactgccagttcgttctcgatgtcaagggacgccgttgcttcatccaaaagcaggatcgggctgtttttcaggatagcgcgggcgattgaaattcgctgacgctcaccacccgagagaaggtttccgttttcgccggtcggcgtatcgtatcccttttccatcttgcggatgaagccgtcacaattagcctcccggcaggcagcctcgatttcctcgtccgtggcattggggcgggcgtgccggatattctcacgaatggtatcatcaaagagaaatacatcctgatctaccatcgaaatttgttccaacacacgctcagcggatatatgactgattggcttaccgccgatacggatttcgccgccagtcggctcatagtatttggcgatcaggttcaagatggtggatttaccggaaccggaatcaccaacaattgcagtcaatttctgatttggaactataaaggaagtttccttcaaaactgcttcgccaggaatataggagaagtccacattatcaaaaacaatctcataattcttaactgtgaacggttctgtactgccgttttcttctggctcatggattacttttaaaatattgttttttgaaatcacaagatttttgtagctaaacaaatctactgaaattgccccgattagctttgccagcaacatagggagcatacataaaagcagaaaatcaatcgtctgaatttctcctgccatccacggagaaatcccaataaacataataaaaggaaccataagccagttaataatgttaaaagcaaagtttatgggaataccatgcgcttcatattcaaagctgacctgactgaacaattgcattgcttctgtggttgccttattttttgtgccagccacgccgtatgcacgaaacgtctgaataccttctatatattccacaatgctgcttactgtttcagatgaaaccttattttttctggttccatacttttttaccgttcggaaagaaagccacatttcaggaatcagcatggaagtagaaagcaaaaggatccctcctgcgggcagatacaaataacagataaatacaataaccataacggccagggcaatatttttggtcaagttacttaccttgtgtgtcaatatttgttcataactatttacatcgcatgtcattgtatttacatattgccccacctgcccatgtgtgaagcgaaagagaggaatcctcttaaatttatctccaaggaaaaggcgaagattttttgaaacggcagccccgccgatctggttctgtgtataacctatactgtaaataagcactcgcaaagcatagactacgcacagaattcctgtgattgttaagatgtctgttgtagttgttttcttgccgagcagaatctgaatgactaggtaaatcgtcatataactgcatccagaaagaaaaccttcaataaccgtgaatatcacgcctatattaaagtggatatttttatgcaatggccctgtttctttcattatgcttcatctcctttcccgccatagacgatttttcttgaagcattgtaatcgctccatgcctttctataataattatttctggaaaggacttcttcatgggtgcctgcatcggttatcgtgtgattttcgacaattgccactttatcacacattttaactgcacccaaacgatgtgcgacaatcaaaacggttttccctttgcaaagattctcaattgcccgatctatttccaactgattttcgggatcggctgcacttgtggcttcatctaatatcagaataggagcattttttaaaatagctcttgcaatcgctatcctttgtttttctccgccagagaaacgggagccaaaactgcctactttcgtatcatatccatctggcaaagacatgatgaaatcgtcaatctgtgcctcttttgcggctgccctcacttcttccagagtggcgttactgcccatacggatattctccaaaacactgtcgcgggtcaaaaacgtcttttgaaatacaatggatatgttttgaagcaatttttcatagtttatgttttttacatttataccgccgattaatacctgaccttcctgcacatcgtaaaatcgggagatcagctcaatgactgtgcttttaccagcaccggaaacaccaatcagagctattttctctccttcagctacatacaaactgcaattctccagaacattctttttcccatcatatgaaaaggaaatgtttttaacggcaatatcacaatgtgtaggaaaatccccatcgctttcataaacaggcaactccagtatttcctttgtcttagtaactccattcaatgcctgtgcaaaggttgttcctaactgctgaagtggaagtagctcagttaaatatagagaaccaacataagcgaaaagcaaaaacacactggaagtgatagaatttcttaaaaacagcattccaccaataggaaccaaaagaaccattccacattccagaataataataaaaattgcaaagggaggtcccattttacgcgagatcaaattccatactctgttttcctctttaatggcatccgagaattttttgaacgatttacttcccatattataggctttaattaaccgcattccgcgaatgtactcaatcataatcgaattaaatgcaataagagattggtttgaatcatgcatgatacttgacatacccttaaaaagatgtatcataacaattcctgcaatcggaaggggaatcaaagaaattatcgctaatggaatgtttactgtcattaaataaataaaaatgactatcggaccagtgagataacttaccaactctggaatattatgagcaaggcatagttccagtttttcaatatcctcatttaaaacagttttgatttctcccgtgctatgatcatccagtacgcctaacggaacttttgccaaatgttccactatcatacaacgtacacgatataatgcaccataagctcctttatgagaaagaacgcctgaacaagccaaagtaatcatacgcaggatagttgttgcagaaatcagtacgatattattcaccaataaccgttgtgttatattttcggataaaatcgcatccataaggttataaatgccaatatacggccctattacaaataagccgcttgcaaaagcacaggcgacggacgcaaaaagataccgtttacttttccccgaccatgacaaaagaagtcttattgggttttcttgtttctgctccatatcactttttctccccctgttccataagtgcataaattctttccttgttttctatacaaacgggaatatcatctgccaaaacgtgacaatcaaagcgaatcagacgcgagcatgtttggcagacaaattcataatcgtgagtgacaacaaatatgactttattttttgcaaggtcctgaatcaatttgctaacttgctccatgctgtcataatcaagacccgaagttggttcatcaaaaaccaccacttccttaccgcatatcatactaacggctacagcaacccgctgcttttgtcctccggaaagtgtgttcggatgccgtttacggacagaaagaaggtccaaatcatctaatgctcttttcaccagcgcaggatcagtgtatctgattccaaacgtacattcagcttctacactatctgcaaacaattcgtagttaacatcctgcataaccataaaagatcgcttcatgcgttccttttcattttgtgcattgccttgccacaagaatttccctgtggatcctttatgcaacccacataaagcacgaaggaatgtcgttttcccagctccattgcatccgacaacgccaatgatttcacctttagaagcctgcattgagatgtgactgataatcatctgctttttgtaaaatagtgatacatcttgtatttccagtacaggtttttgaattggaacattggcaacaacgggatacacagtttctaatgccacagcgcgcagccccatattctttctttcaacatccgagagctttctgagttctgctgacgtccaaattgcctggatttccccttctgacaaatatacaatgcgatctgctatatcaagaagataataaaggcggtgttcagcaattaaaattgtttttcccgcttttttcagaagctgcaaatatttttttaagtccgctattgaggccatatccaagttagaagacggctcatccaacaagtaaatatccgggtccattgcatacacagacgcaaaggcaactttttgtttttcgcccccggataattcaaatatatttcgtccctgcaaatgacggatatgtaagacatcaagagtatttccaagtctacgatgcaattcctccggtgggacagccgcgttttctattccaaatgcgatttcactgtccacatctacattaaagaactgggtcctcggattttgaaatacagatccgattttttcagcaagttgatatgtaggtgtttcaaaaaccttcaggtcatccacttgtacatcgccatttaactcgccagggaaataattagggataagtccattaatcaattttgtaattgttgtcttaccacacccagaacgaccgcaaagcaaaacgcattctcctgtttctacaaataggtcaatatgttttactccgatttcggaagcggttgtccctgcataggcaaagccaacatttttgaattggatcataccgcacctccaatctcacctgcgttcaacgccaaaagaaacaagaaacaaatgattaccaaaatatcctgtattctaaatttgatttgtatcagacaggtccgtgaatgaggattttcaatgcctcttgttacagatgcaattgcaagttcatcagctgccttggacgcagtcattaaaagcgggacatacaaacactcaattgtcatcccagggtgatgaataaaacccttaaaagaaagtgatacatctcttaaacgcataccgtctttgatatagtgccaatcttcttgaattgtcggaatatatcgcaacataactgccaacggaatgtatattcctttagaaacatgtgctttattcattgctgtcagaaattcatttacactcgttgtggacagtatgattccagcgagcattgcacaaggatacactttgtagaaaagccccatccatgcgacaaacatcgtatgtacaacacccgtttcaagagagagaacgtaaagggtcagtaaataaaataaagcaaaaaagatcagatggcataaagagcgtttggcttttccgcatgtgcatccaaaaagtgtgatgaataacactaatagccatacatgccgcaacgatggagccatcgttgcggcaaatacagtgattgcaagtaacaagatttttgtacgtggatcaaacgtacacaatccactatgaatttttgtgtactgtatattcacgctgtgatacccgctttttcaaactgtttctttaatagcttgcttccaacaaaaccgctgagcaaagcaatcactattgttccgatcaacattgttacaagtacgatccaactggtagatgcaagcatactatcaagatattcctgtgtcgttcctttttccagcatagtatttacccatgtttgcgggttaataaaatatgcaatatatgtgccagttccacccaagcaaaagaatacatacgaaagaatattcatttttttgcttttataatttgcagtgtgtgcgacaatttctgcaagtactccaccaattaaatagccgattgtcattccaatgtgcatacctgttacaaagcaaaagattgccataagcgcacttgcaataaaaatggggcctttctttggtactttcgcaaccataagcaaatacactggaccagcaagaagagcagcaccgacaggatagtagaaagtgagtgctggcatcatcgcaaacacaccaccgctaaggctgatacagataaagataattgcggaaaagacacctgttacgataagttctttgacagaaagaccggatttcgtgttagacattttttgttcctccattttgatatattccacatttgactttttaaaatcaatgtggtaagctttgattagttccagctaaccgctgtataaaattatacatgaactgatttgctttcgcaacacattcagcccattgtcgtccgatgtgtctgaaagtatgtctaatgtgtctgaggaggatgattatgtccgatattgctgctcaattcaatactatgttgataaaaagtggttttcagaaaatgccaccaaatggaaaatttagctctattggaaacttttattgtttgcctgaatcatttggagagggaatttattggatatacggtgaaaaaaacctatttaatatcaaaatacatgatttctatttttacgaggatgaatttttcgatcaggaaagcctaaactggccggagagcctaagcatcacctattacgaatctgtatctggtgaagaaatcatgccttaccggcgccttaccgcgggatgtataaaaacattctttggaggccagcacccatacaaggcaatttttcataaaaacataccaattcggacgattggtatagagattatgcctgcttactatgaaaagtatctaaaagaagcatttccagatgaatatataaatccagatgaagcatttcgcgagattgatcaagcaaatgatttccctgaaatggtttctctgttacgcaaaatctggaattataatggagatggaatggccgcaaaactattcttccaaagtaaagttttcgaggcagtagctttgattgtcgaacataacaaaaagagtccagaaagagggaaagtccgtatttcatcacaggatataaaatctcttgaaaatgtcgctgcgtatatcaacgatcattacaacagaaaaattcttttagataaactagcgcgcattgcctgcatgggaacaacaaagttgaaaattacatttaagcaggtctattgctgcaccattacggaatatattcaacagcggcgtttatctcagggagaaaatctcctttgctccaccgatttttcaattgagcaaattgctctggctgttggatatagtaatgctggtcgtttttcaagagacttcaaaaaaagtactggtctatatccttctgaatatcggaagtgggcacagcaaaaaaaaatcaataaaaacgatgtaacaaatcattctgtttagagaagttcctctataaactattgaaatatcatcttctttctcttgtgcttagcagagcagaaggaaaatatttcgacatattcgaaaatccccttgcttttttctacataatagcaatcatgtttagttgggcaagaagcgagcgtcagggaatttttctctggcgctcattttatggcaccgaataggaatgataaaatcccccagttcaactggggggggcaataatgccctctttagagagccaccaccggagataggcccttatagtgcctatctccggtggtggctctccaaaatgttttttaaaagctgaagaaaacttgccttgatttaagtatcctgctaaatccgctatttctccgatagacatacttgacttatgaattagtaactctgctgccgcttcaagacaagtttttttaatgaaactgcctattgaatttccggttatataagcaaaacatcttttaagacttgattcagaaattgcatatttttttgccagttcagaaatagaatatctgtcaaaaggattttccataagagctttgaagcattcttgagttgcttcgtacacaggctcagaaaaggatggaagtttatgtgtgtctttactttcaactaaactcagaaatagtaatagttctattgttttaattattgaatatggaagctgtatcctctcatcaaccctatataattcaccaataatatgattgatttcatgacgagagcggataattaacgccgccccatttttgcacaccttatcccgcatttcaaacaaatctatatttccatatggaaaatattttgaaatggacttttgtgctatactcatatcaataaaaagagaaagccctacatattttttcatgggataatttataatactatctttttccattttctaattttagttctgaaagttccaaaaggtgcaaccgtatttacatgaataaacttatacacttcccaagtcgctgttttagtcgcttcatcagcccactttctcatatgcggttcaaataattcttcctcactcaacgaatcaatcattgcataaataaaattaatattttcatttaattttgctttcaactcttgcagagataaatgagcgtaggtatccgtgaaccactgatataattcaccaagttgattccatttaaatttatccgatggtgtttttacttgaagcccctttctttcggtttattctagtatagagaaacagctctttcccctaccctacaatatctgtacaagttttataggttttatctcgtagaaacttataacttgcaatgctcgataaactgatatttgttgattcaaattttcatacctactaatactttaaattcctctaaaactactaaatcatcatcttttaatgattcatctatttcttttagttcattgttaaaaaaatctatatgcacttttttccaatattctaatgttctgtttccttcaccttctttatatgcatgttcagacgatacctctttaaactgaacaatttcaactctaatagtttctataagaacttgatattcacctttactatttgtaatgatacttaaattaccaacttttggtaaatcctcattttccatttcataaaatttatacagtgaagatgtggcggtttttattccatgagatattaaatataacagttcctcttcaatactctcatcaaaactccaaatagactcatcactaacatttaattgattttctttaatgtatttttcaatttgctctctcatattcattattatcttccttacaaattctaatttaccttattcttttccatccatgccgttgacacaacctgccaaaatatctaaagtgttaagcaattttcttaatttccgcaagcgaagctaagaggaaattattgaaaatgcttacctacttggtgctacaaccttttcataatatttatagtgttgctgcaagcaagtatttagaaaacattcctgataaataatttcaaaatttccagactcttattgttgaatctaaaaatcatacacctattaattttaagcctttcaaagtctagttactcattttctcttgtcatcaatacaacgctttccaagtgtccacttcttgcgaacatatcaactgcggctactctatccaccttatacacctcactcatcaaggcgatgtctctcgccaaacttgcgtggttacagctgatgtatacaatcttttctacaccgctcttatttagcatctctaccacttttttgtctaggccctttctcggcgggtcgactatgactgcgtcgtaagttttttctttcaagactctatttatcgcgtcttcggccttggcgtgtatgaattttgcgttttttatgccattgactctagcgttttcatctgcgcttttaactgaggcttcgactacttcgactgctgttactgattttgcttctttggcggcgcataggcttatggtgcctatgcctgagtatagctcaagtacgtccatgcgcgatgcatcccctaaatactcaagtgcttttttatataaaacgtccatcatttctaaatttacttgcaaaaatgtttgcagatatattttaaaatcaagtcccaaaatatttacgcttaaaaagtcatcgccatatagcttagtaaattttcttccgtacaaaactttgtctgacttatcgtttatgtttaggtagatggatttcaccttactcatgtcgatgcatgactttaatttttctacatcaatcacaatttcatcgtgcgatacgaaggtgatcatcagctcatctttttcgttgtttctaaagactatgtccttgatatcgcctttcttggccttccaatcgtatcccttataattttcttttacgaagcgtctgatgccctgataaacttttagcgcttccttattcatgtagagcatctcttctgagtcgactactgtgtttgtgccttcttcaaaataaccgatagctacttcaccattatatccacgagcgactttgacctgtgtgttgtccctataatgtgttaaagtcttcgccatatattcttctacgtctgcgtcaacgcctgccatcttcttaaggttcatcttaaggccattaactttccactcgaattccttctcatatgaaaggccggagagtatcgcctcatcacttgctacctcaacacgaaactccgatggcgagactatatccaagacatctgcctcgataaagctcttctttttcacttcgtttgtgattgtgactgtatcgccaagcacggctcctttaataaaatagaccagtccctcggactttgcaacgccccttagctgactggtcatatcttcaatgtaaaactctttcattagattgaacttcttaaattgattgtgttgtctatgatggaaaggtctatgactttgcagtcgtcgatgacgcgctcgttgtaatcgggtgtcttttcaatgtttaaaaacttgttgatggttccgatcgcttcttcaattatgataagtccgtcttggtcaagtcctgtgcctttttccaaaataattgtcttaaatggtgtttcgtttggcttaactgatcctgataatggatgtgttaagagtttatatccttcatgaattaggtctctcgccttaagtaaaacgcctgtatagttgtcgactttgtctatgtagatcatgtcgaagtcgtctttgtatttgtctctaacgtagtcgttgtttgtaactatggttctcttcattttaattctcctcatttattcgtaaattttctgccatttcagcaagttttttaagtctatggttcacgcccgacttgccaagctccgggctcataagccttccaagctctgcaagcgacgcgtctctattgtccagtctaagcaaggcaagctctcgtaaatcgccttgcagattctcaagtccaagtctctcgtcgatgtactcgatatctgctacctgccttgtcgatgcatcgaccgtcttctgtatattcgctgtttcgcaattggtgcgtctgttggcattgttccttacatccttaactactctgatgttctcaaagctaagtactgcacgcatcgcgcctataactgtgagaaagtccgagatcgcctcggcgccctttaggtaagtgatgtagttctccttgcgccttacgtacttcgctccaaggccgtagacgttcattagctccttgacctcgtttgcctcaaactcgctttcgaagagcatttcgaggtggtagccgcgctctggattagcgatggatcctactgctaagaaggctgctcttaggtagctacgcctcatctcatcgttgtctctaaccatggacggcaccttgttcacatctaggaagccctccagcctcgtatctttaaacatctgcataactatgtcggtatcgcttagaacgattgtgtagatgttcatcttcttaagctgagtcatcttcgagatgtcgacatctaggtcggtgttgtatatcattctgatgatggtgaagatgcgccttgcaagcgccgccttctgcactctgaatgagactgcgaccttgcctgatatgaagctgatggatgagacgtatcttacgtaggccatgagctcagcaagggagctattgtcattgaatatcgcaagctttgctgcctcgtccttagctttttgtgaaaaactcatttctactcctcattcttctctctgtcgtactcctcgatggcttttctaattatgcttctttcttggctgtacttcatcagccttatagcctcgttcctgtcgtagaactttgcggtcttgaagccttccatgctttgtggtatagtgtgcgtgtcctttgtcgacatcaagaagaagtgcacagtcttgtctaccttcacattcttcatcttgttaatgaaggagtactcgatcttgccaaggtattttttgatctctccagtgatgccgctttcttccttgacctcgcgtagtgccgcctcctcgatgctctcgccgcgctctatcctgccctttggcagtacataatcgccgttgtacttcttcaaaagtagtattaaattgttattaattattacgcctcctgagctaagtaccttcacatctatcacctgaacaatcttaaaaatttctcttcatcggagtttgtactttccttgttaagaaggtattccttcttgataagtatctcttctaattttagtctgcccttcttagtaagagccacgctgtagtcagagtcttccttctctatatatcccttcttgagtagcacttcatacgaattactaagcttctcttcgacaagtttatcagtctcatctactcccaagtagcttgcgagtctgtcctcttttatgtcgtagaactggtaaactaggtagatgtactcatctatgtccttaatgtcgaaggttttgccgcttctttcctcttcttcatattttttcttaatcctaaatttatttctgaacctttgattcttagtcatcaaaaagccaacaagtaaaaatgcaagtaacgctacggcaactaagcccttaagcacaagctctgaaacactcggcttgtctatgcgtctgatttgcatcctagtaagctcgtcgttacggtagtcctcgtagtccatatcctcatatggcgcgttcacaaactcattctttggatacttaacgctcaaagccaaatcaataggtgcagtgattttatctaaacccataggtccatattcagactcaaacttagtgctaaagcttgaaagtgaatcgtataaccttaggtccggctcatcatagtaaacgctgtcaaaatatatgtcaatggagtgaatgtgtgtattaaatgctctatacaaaccaaagacaaaaccatctgcccttttaaaggctttcggaagacccttgatcttgtacgaaacttctttgtcgccgcctttgaagtcgaagatgtacttagttccagatagaaaactatctctaagactcttgccttctacatcatagacctctgcgccctttggcacgtcgatagcgaacttaaagcctgtgtgctcagtctcgattttgacgtccacatacatcgcgtcctccataagattcatcttgtaagtcatcttgttctcgctctgtgcatgtgatgtgcttgttatgagcagcaatgcgcatacaagaactgttaagatattaaactttttcacttgactcgcctcctaatactctaaatatattaatacccatttactccataaaagctaacagcttcacatccttttttatatttaatttcttaatgtcatcaggcttcatagtgactaggcacatggatgatggacctgctgatctatgatagtcgaagccctcacttacgatgcgcgcatttaatcctgcatgcgcctcaatctcttttagctcatgcatagagccctttgagccaacaggaactatgtcatgaatgtaagtctgctcctttaaatataaataatcactcatgctcatagccttgtctctatgcttaataagctcctcaccaagaagtgctttgcctatagcgtagagtgcatctcccttttgtgccttgcgtatatcaaggccgcgtcccaagactgtgactcctaagcctgtcatcttagttacaaagttctcctcgcttgagccagtgaaaccattcacctcgtcaagcctcgcgtccttcatcgcctttttgatgccgcgaatgattttctcgccataaggctccatctcgttacatagagtgtccaccaagaccattggcgtgcttcttgcgcataaaagttcgactatgggcacgaaggctgcgtagtaggaaaccatctctacatctgcaaagacctcgtcacaaggcttctcacctatgccagaagcgctatcacatgcaagcaccagagctatatcatctaaaattattaaatctctaaactttttcatacggcctccattacatattcttaataaatatgatataatatatattatatcataagtagggacacaaaggaggacaaaatgaattttgaagataagttaaaaaattatgctaaggttgttatcgaaagaggcataaacgtacaaaagggtatgccgcttgtaatcaatacatcgactgaggcgatggacttcgttagacttttgactgaacttgcctacgaaagaggagcaagtgaagtaattgtaaggataaaagacgacgagtgcgagaagctaagtgcgatgatgatgagtgaagaggcaatcaagcacgcacccgagtggaagcttgatatgatgcttgactacgcagagagaaaggcgggcttcttatcagttgcggctcctaatccatcactaatgaaggatgttgaccctgaaagaataaaactaatgcgcagcgtgaacgcaaatcttatgaagccattccaaaagtacactatgaacgacataaacccatggtgcataatctgtataccatcgaaggcttgggcggataaagtacttcctgacgtgcctgaagaaaaacgtatggaagagctatgggagctaatatttaagatagttagagtggacggagctgacccagacaaggcttgggacgaatttgaaaacactatacaagaaaaggctaagtacttaaatgagatgcaattcgaaaagcttcactacagatcaaaattaggtactgatttgactatagagatgccaaagaatcacctatggataggcggctcatccatgagcgagacaggggttcgcttcacagccaacatccctacagaagaaatcttctccgcgcctaagagagatggggtgaatggtatagtctacgcgacaaagccactctcattatcaggaaaacttgttgagaacttctcactaagatttgagcgtggtaaatgcgttgaagtaaaggctgagaaaaatcaaaaattattagaagatttaatcgcgacagatgaaaacgcatgcatgcttggcgaagtagctcttgtacaaaacgactcacctattagtaatagcaagagactcttctactcaacattatttgacgagaacgcatcttgtcaccttgcctttggagctgcttacccaacttgcatccaaggcggcgctgccatgagcgaagaagaacttctaaaaaatggtattaacgacagcaaaattcatgtcgattttatgattggtgatgaaacaacagagataattgggtataaagatgataaggaatacaaaatatttgaggaaggcaactgggccttctaaggaggggtattatgaacgaaaattttgtatacgacgaatttaatccgaagacaaagggcggcagagcaagcggcataacagagatttttcaagcaacaaatgcctacatcaaaggtaacatcaaagcaatactttgctttgcactagtttacatcgtgcttataggaggcttcctagccttaaacgttggatccataatgcaaatttcatcagacacattaaatctacaaatgagaaataatgatcaagttgaaatgaatatcaatggaattaatgatttaacaaacgagctagacgacgcagaaagctttgatgacgttatgaacagcgtaaagaattttagagataacggcggcctaaatgatagagatctaaatgctttcatgaatatcacaagaacatcagtacttatgatactaagcttcttaatcatgggcatagcaattcaattaatcgccatcgccttcgttacacacgttaacaaatggatattcaagatggaaagaggcgcaaaagaagtaacagagtccttattcataaagcttatcaagtccatcgccattatgataatctttggactaataagtggcgcaacagccataatctttggtataatcggcgctataataggctcttatgaagcgatagttatactaatgacactagttttagcactagtaaacttctacatcggccttgcaggctccatagcctactaccttgttacaacaaataagtacatcggcataggtacatgcatcagcgcagcctttggcatagtcaatagatttatattaaactggataggtaaaatgattttaatatatatagctacctttgtagttggaggcttcgcaacattgattatagcctttatcgcaacaggactaagagctccttgggtcttcgcactagcagcagtgccttggatattcgcaacactttactcaacagtctactcacaaatggcactttgcgactacacaagccaatacgagtttagaacaggccgcgtcgtaagagactacgactactacgacatctacgatgacgacggctacgactacacagacagaccaaaacgctaccaaaatgacgaagcaagaagcgtggatgacttttataatagcttagataattaatagaatacgtaaatggattaagcgcatcatatggtgcgctttttttgttgagtgtatacaatagcataaagatgaactatatgatataatgtaaatatgatattttaggaggaatgtttaatgcaaaatcaaaatcaaaacacgctagctgagactttaaaggcggacatatttagaggcactagaggggattatagaaagtatttagacttaagaaagaaaaatatcttattctacgctcttcttctagtctcaccacttttatatctcttgctgtcatttatttttaagaataactgggtaataccatttttaccgtttggcataggtgcaggctatgtatttttcggaagattatttgtagatggtaggcacggcattcgccaaattacagactggaacaactttaacaagctaaaaacactaagaggcgaagcagccatagagctcgcagacaaagttttccctaagctaattgtggcactggacaaagcttataagaagggatataataagtcattcttcgatgtttatgtgataaacactaatccacaaagcctcgctgacactatgggcaacagtttctgggtttctctagccatcggaaagaggatgtttactcgttcatatcaggtacttgcgcaaacaaaccttaaagttataagggcttttacctatgtggcacaaaagaacccaacactgagagattattatggattttaatagattaatagctttatatgaagcgcagcttaggctgcgctttttttatgggaaaatgtctatatatatgttataataaatgtaataatattcaaaggaggatactcatggataaaaaattttctctcatggactacatcgctctattgcgtctgagctgtagacactactactggaacataagctacgcgggaaagggctctatcactttaaagaggctaggtcaactatttacaagtatggctaatggagactatggaacagctttcgttctatttgtcgcttactctttagtagttgacactataggtgtgaattttttcaaaattttgagctggttacctgctataccagcttatattgcaaaaggcagaattgtagccattttaggtgtaattatagtcagactagctgcaatggcatttggattttttgtactacttaatccgaagagattaaagaggtctcttagatacaaggagtctgcatttttcaaaaatactggcataaggcctaaagaagtcgttaaagacaagggcctgtgcggcgagtaccttgcaacttgtgttgaagaggaagcttttaaagcgaataatatcgaaggacagatatttaacagtgtcatcatacctcagcacggcggcaacttctctgaagctgacgttgtctctgtaagcagcatgggtatcaatgtcatcgaggttaaggctcttggtggcgagatagaaggtggtgagacttgggaactttggcagcaaactttgggcaaggaaacttatgagttcagaaaccctatcttgcaaaacaacactcacgtaaactacctacttgcctaccttgaagatagcatgaaagctagcggctacaagcccggcgtggcattgtcgcactcaactatcaactcagtattgttcctagacaataaagttagcttagatatcaacagctttaacgggcttaaccttttgtacctttacggcactacacatggttacgccgacatttacaaagacttcaaacgtaagaacgttataaacttgtataaaaacgacattgattatatagctaaagagatcaaaaaactttcatctcacagtccaagtgaaattgacgccatgatgtctaatagacaagcagccatagacagaggcgagtacaagtacccttcagtctaccacattgcctactgcgagttcgacattgtaagacgcgaaggcggcatctgcttaatcaaggaacaaaacggctaccaattctactttgacccgaaagacaactggtttaagtatgtaagcacaatgcgcatcactagaatcgaagcaagctaccgctcatacgatgaggcaatgcgtgcatttaacaatcctagcatagctagccaaaggtaccttgtcaagtatttatattaatattaatcataagaagcgcagtctaggctgcgttttttttgttgagtgttgtggagctcactgaaaattaaggggaaaattccccctaattttcattttacatatccattggacgtcgaaaagtgttttcatcgcttgctcgtctacgaaaactgataatttctaagcttactcacctgcggtctcatatccgttcgcttcgctcaactagatgagcccacggtcggttcgtttcgcaaagaaattaaaacagttttctccgaatgctgcgctcgtgaaaatcacttttctcactatttaactatgttatattaaacatgttctataaacaatttgaattagaagtgtttgacaagaccataaacatggctttaccattctcacaatatatgttataatgactacaagaaaaaatatatttaaggaggaagagatgagtaaatttatagcggacaaaagcttttttgaattattccctgaggcaaagcttggtgttatacttgtgaagaacatggaaaactcggacgacagcccaagagaagttagaaagatgctagttgaggcgaacgaagaggctgagaagtaccttgttgctggacagcttagcgagaacaaagaggtagctgtttggagagaggcatacaagaaatttaagactaaaaagggtgcaagatgctccatcgaggcactactaaagagactttctaagggtaaccttgtgggctctatcaacactttggttgacatatacaacgctgcatcgcttaggtttgcacttccatgtggcgctgaagactctgataagttcgtaggcgaccttagactaactatcacagaaggtggcgacgagttccaagccataggagaagatccatccgaaacatacgagggtgaactttgctacaaagacgacaaaggcgctatctgcagatgttttaactggcgcgatggcatcagaaccatgatcacagaggatactaagaacgccttcatgattatggagctagttgaccctgatagatacgacgcacttgaaggagcacttgagttcttaaaagaaaaccttacaaagtacttgaacgcagaagtgactgtgcatatactagataaggacaatccttcagttgatttataaaaattaatatttgcataagaaggggcatatggtctagaccatatgccctctttgtttatcattgtgaattaactaatcagtgtaaaccttaaagcccttcgacaaaggattcttcgagtagtctatagtaaagcactcgatgttgtctaagttcttgttcacacaaattttaaaaccttgagcatccataatgatgtcgttttcatttgacttatccaaagtcacgccgtaaacggcaccacatcaggagtagttcaaaacccttatgcgtagagccttgtccttatcatcctttacatttaattcatttaagcgttcgatcgctttatcttttaaaataattttcaatatcatcacccactcatatatacccaatctcattaataatacttatactttagactatttgcataaattttatgaatatagtcctcgccacatactacttaagtatgatgtttcaaaaaactattgacataatcgatttaccgtgatacaatataaccaagatagatggatcacatctattgaaaagaaaattagctccatcccttgacttaatatagatacgaagctaaatattttagcaaggaatgaaaggcttaacttttactatttgagagccataggtggatcaaaggtaaataaagtctaattagatgaacctttggtggcaatagctgctgaagtgcttgtttaatcatattctcttaattcttatataagaagaataagatatttattagtggaggtaatttagaaataaaatttaatatttatgacgatggtagatgacatgtgtaaaaaagtcacgactatgaaaagacattcatttatctctgtaaaaggagaattatttatcttttcaaggtgaaaattaaacaatgaagggcatatggatgaatctacaaagtaagatcgctaagaaaggatgtataagatgtccttttgaagcacacggacgaaaggaagttgttagagtgattgaacctaaatcaaatcgtcaagggatgggaagctaatatttttttaaatattagcttttttttgcgttcaaatgcgcccttgagctcgttccctcctcggcaatgctcaggtataactatacattccgcttgcctcgtcagtccacttcgctcaatcatcgcatttgctccgcaaaatagtttgatcaggttcattgacattataatttattaactttttatacgttcaaacgccaatctcagcatagcgcaaaggttctcgtccaaaaggacgaggttcttctttttcctaagaaattatagttagtaagaggctatcttttaaaattttagcttttttgcttgacaaaatttacaaaattaattacaataaatatatactaaatacatgggaatgaagttctcccacgaaatgaaaccgctattaagctgatgacttctgtttttacaggggtatcagctttttttgttgatttagaagattataatataaaaacaaaacataaatataaatataattttgcggagcaaatgcgatgattggacgatgtggactgacgaagcaaacgcaacgtactaaggtgagtattgcacatcgaaaagtgtattctctcgcttgctcgtctacgaaaactgataatttctaagctcgttcacctgcaagcccatattcgttcgctttgctcaactagatggtcttgcgggcggctcacttcgcaaagaaattaagacagttttctccgaatgctgcgctcgtgaagaacacttttctcactattgtgatcttatagatggaacgagctcaagggcgcatttgaacgcaaaaaatttcgcagagcgatgaagaaccttgttctaacgtacaagaacctttacgctatgctggataaggcgcagcataacgagcgacagactgaggtgtacgaatgagtactccgcagggaggaagcgaagcgcgcgagccttaggcgcaaatcgaatgcgaaagaaaaaggaggaatttatgatacaatcattagcactcatcttcctactcggcctcatcatggctgaagtatcaaaacgtttgaaattgccacgcattgttggcatgctatttacaggggtgctcttaggacccttcgttctaaacctgctcgacgacaaaatcctcggcatctcggcggagctaaggcaaattgccctactcatcatactgatcaaggcaggtctatctcttgacctaagtgaccttaaaaaagcaagcagacccgcgcttctactaagttttctgcctgcaagctttgaaattctgggctatgcagtctttgcacccatacttttaaaaatccgggccattgacgctttgctaatgggtgcggttctaggtgcagtctctcctgctgttgttgtgccgcgcatgtcctctcttatggatgaaggctacggtacgaagaaggccatacctcaaatgatcatggctggcgcatccatggacgacatctacgtcatcgttctattcacaagctttttaggcatggcaatgggtaagggtgtcgatatgagtaagttcgcctccatccccattagcatagttctaggcatagccttgggtgcggtctttggcatcattgcaagctttgtcttcgaaaggtcctttgcgaaaaagcatctgattcgtaacagcatgaaggctctgatcatcatggcgctaagcttcctactcgttgcgattgagggcgcgcttaagggaaggctcgcaatctcttctctgattgctgtcgtgactatggcgatgactatcaagataaaaagtgtcagcagtgtctcgcaaaggctctcagctaagtttgcgaagttttggattgcggcagagctcatgctcttcgtccttgtaggcgctgaggtcgacatacgctacacgcttgacgctgggctcatggctgtcgtgatgatattcgtagcacttgcctttagaacggtcggcgtcatgatagcgctcctaggcacagggcttaacaagaaggaaaagctgttcacagtctttagctacttaccgaaggcgacagtgcaagcggcaataggctccgtgccactagctatgggacttgaaagtggaaagataatactctccgttgctgcacttgcgatactgatcactgcgccactgggagcggcgtgtatggatgtgacgtataaaaaattccttgagaaataatttcactcctgtgtgaagcactaaggttctcgtatctttagtacgaggttcttcaaatttcgcctaaggctcgcgcgcttcgcttcctccctcaacgtaccccttagtacgatgtcggtcggtcgcttgttatgctgcgccttatgcataaattttcatagtgaaatttgtgattttttgttcaattggcgcctgaaactcgttcgcttctcggcaatgctcgagtatggactatacactccgcttgcctcaaagctccacttcgtctcatccatccaattgctccaaaaaatctagtattgtggcagttcattgacaagataagaaatttgtaaaaattatatattttgcaaaaaacaaaggatagagaaaattaaaatctctatcctttgttttttatctgtgttaatgttttatttattaatatgatttgttctttgtattaacaatcatccaatttaattgaagaacttaggactatacgtcctaaaacctttgcgttatgctggaaaaagaagaacctctcactaaagtgtgagaaccttggtgcttcgtactaacgcgaaattttgtctaatatgccattaagatatgcaatagtaatcccatagttcgtcatcgcgactcccatctccctcgcctttgcgactctactcatcacgtgggctctattaaacatgcaagcgccgcaatgtataatcatgtcgtagccttcgataccttcgaagtcgtcggctctagtaaaagtaaatttcaagccatctccgaagcgcttcttcagcatggctgggatcttgactgtgcctatgtcttcattaatgggtgggtgtgtgcaagcctcggctataagtattttttcgtcgcctttgaagctatcaaatttcttcgcggactctatgaagtaggctatgtcgcctttcattttggagaacaatactgagaacgatgtcacttttgctctctcatgaaagacgtcgtagactctcttaaagactctcgagtcgcagattacaaggtcaatctctgtaaatctatctctcactccttcaaggtcttcatctcccacgactatgcttgtcatacccttgtcgagtgcctctctaagcgtttcgacttgtgccttgatgagccttccctttggcgctgctgcgtcttgcggcataaccatgatgatggtcgctttgccatctacaaggccatctaataatgactcttcttttgtatctaaaacttttttaagtgctgaaaaaatttcttcgcgtgagctatcatctctataaatgatagcatcgccatgcgcatgggcgtctctatctatcgccatgatgactttgatgatcggcttcttatgcttttgaagctctttaagcacgctctcatcatcaccattaagaatgtatatgaaggcgtctgccttgtcaaactcggcgcgtgtcttctttaatctctcgtctgatagggcggtctcgtcgccaaagcctgctgtgtctatgaagactactgggccaaggcctggcacctcgatggacttacgaactgcatctgtcgttgtgcctttcacttctgagactatggctgccttagaacccatgatggagttgaagagtgtggacttacctgcattaactgcgcctactatgacgacatgcttttgtagtgaacgcgccatcatagtctgaagtctctctcgcctacttcgatcttcttaaggttctctctaactatgttcttaactttttccttgccgatgttttctatctctctttcgataagcgcttcgcccttttttcttgtctctggcgatgcgtaatccattaagtactccttaagtgtcataagtgcgtttggttgacagatgttaccgatttgtcctgccttaactagactcatgaacctgtcgcctgttctgcctgctctgtagcatgctgtgcagaatgatggtatatgatttgtgtccatcagccatgaaactacctcgtcaagtgttctttgatctgatgtgaagaactgctctgtatctgctgaggactcttcttcttcgtgtgcgtagccgccaactgatgtctttgatccgccgcttatttggctaatgccgaagtctatgatattggctctagtcgctactgactctcttgtcgatatgatcatacctgtgtatggcactgaaactctgatgcaggcaacaatcttcttaaatatatcgtcactgatcgcattctcaaagttttctggatctatgtcatctgccggtctgattcttggcacgcttatggtatgaggtccaactccaaagcgcgcttcaaggtgttctgcgtgcataagtagacctatgaagtcgtactcgtagttgttaagtccaaagagtactccgcatccgacgtcgtctatgccgccgagttgcgctctgtccatggcctctgtgtgatatgcgtagtcatgttttggtcctgttgggtgcagtgcctcgtagttctttctatggtatgtctcttggaatagtatgtaggttcctatgccgacatcttttaatttcttgtagttttcaacagttgtcgcagcgatattgacattgacccttcttatatcgcctgccttgtgatgaactgagtagatggtcttgatagactctagtatgtactcgattgggttatgaactgggtcttcgcctgtttcaagcgcaagtcttttgtgacccatgtcttgaagtgcgataacttcgtttctgatctcctcttgtgtaagctttcttctgcgtatagttttgttctttaagtgatatggacagtagacgcagccattgacacagtagttggataagtaaagtggcgcaaaaagaactattctgttgccataaaacttacgcttgatatcgtttgcaagcttgtacacttcttcattcaaatcttcttcttcggatgataaaagaaggaaggcttctctgtgagaaaggccctttacttccttcgccttctctatcgcagccttgattagctctctgttgtgcttgtttttccttccatactcaagcgaggcgagtatctcctcatgattgataaattcatccgctttttctgaattaacatcatatttaaacattgtaatctcctctcgaaaattctatctcgtagccaaattcttttaaataatcatttagcgcgcgcactccttctatggcttcaaggcctgatgccttcttgccgtcataaagattatagctctcgcgtgcaaattttggtgatacgttgggcatgattacattcgcccctgataatatacccaattttctaccattatcatcaatagtatttaaggcagtcgtcgatggtattagtgccttggggtgctcaagccttagaactgcgagtaatttgcgtgtcatctcgaccgtgccgtgtggataagattcaaagcgtgtgcccttcgatggtatgaaaggacccatgcctatcatcgctggatcgatgtctctgattaattttacgtccttgatataagagtcaacacttgtatatggcgctccgaccatgaagccggtgccgacttggtagccaagctcctttaagtcgtagatggcccttagtctcctctcaaggctttgctcagctgggtgcagctttttaaatatctcagcgtccgccgtctcgtgtcttagtaaaaatctgtctgcccctgcgtccttgaacatcttgtaggcttctttactcctcacacctaaggataaggtgatggctgcatcataagtctcatgcaaatggcttatgatacgcgcaaaggcctcgtcagtaaagtgcatgtcctcgccgccttgcaagacgaaggttctaaagcctgcctcatatgcagactctaccgctgagtagatctcttcctcttttaagcgaaacctcttaacactcgtcttcgtcctgttgatgccgcagtagtagcagccttctttgcaatagttagaaaactctatcaaggctcttatgtagatcttgttcgaaaaagtagccttggccgcctcgcgtgccctactgtatagctcttctaaaaaaacattatcctcagtaagaagtatctctcttagctccatatccgtaaatatcattatacgccctccaaatcaaagtttggcgtgtagttcttgccgtcttgcttgtcttgaacaaaggccttcgatatgccaaggttcactgcatagtcgacgaagctgtcgtactcaagatcgcttactgtcctgttaatcttcttatactcctttgccttgaacataggttggtactgattcattagtgagaatatcacgctgtcgccatacttaccatatagaaggcgaagcactttctttgcatcgaagtatagattaggaagcaaaagtagacgtatgatgacgcccttcttcattaagccgtctcggactactacctcagggacttgcctgtgcatctcgtctatggcatcaagcgcgtactgtctatagtgcggcgcgtgtgagaactcattggcgtagctgtcagagaagtatttgaagtcggctaggtagacatctatgagcccttcgagactggctatggcctctttgagctcgtagctgtttgtgttgtaaacgaagggtaggtcgaagcctttctccttcgccataacgatggcgtctttgataagatgagaaaagtgcataggagagactaggtttatgttgtgaacgccccttgctttaagctcgaagaagatctctacgagcctttctttgcttatgtacttaaatggagcgtctttgttttgcgagatctcgtagttttggcagaagacacatgagaggttgcatcctgcgaagaagatggtacccgaaccacgtgtgcctgatataacaggctcttcaaatatatgcacgctcgcctttgaaacggcaagctcgtttttcattctgcacacaccaagtttttcgtctctatctatgccgcacttacgcggacacaaattacatatatacatcatatcaccaagtttattatataactaataaaggattattgtcaataatatgtattgacatagctcttattgaaagatataatataattagaaagtaagaaattctaactaaggaggtaaggctatgttagttgaattaaaagctaagtcgcaagtgactatacctaaggaaatagtgagcttgatgaatttgaatcaaggagataagtttgaaattgttgaggaagatggtaggatagttttgatcccactagaagtctacccaaagaatgtgatagatgaactaaaggcctcagttgaagatataaagacatcgatagacaaaggcgaaaggccagtctttgattcgatagatgccttgttcgaagagcttgagaagtaatgtattaaaaaatgctagagacatctctagcattcttttatttcatcaagctccttatcaagcttcattattaaattttctatacttgttctaaagctcctcacctcgtcaagcttctctctaatctcttttgcaactctcacatcggtaaagatattatcaaagtatatgtctgcaatattatctcccaaagtgtcgcttatctcttcaggtagcctcatgccaatgtcgccgagctccttattaagactctttaggtatatcgcggcttcctttatactaaggttcgcttcttgtatatgctttctcttaattacactgaagaaggctccaccaaacatgtccaccatgctcatctttgacgcaccatcaagagacttcaccgcctcgtcaagccttagcaagacctctacagcagcggcctttgcttctttaatttccattaacttatccatagcacacctcttatatggttttatctgataattttttaatatcttctataataatcttgtttctttcgactgttatgatgccttcgtcttggaactgactaagctttctggatatggtctcgcgcgtaagacctgtgaaggaacccatctcctcgcggttgatcttaaggtcgactgcgaccttgccgtctgtgattgagcctgagatcttgataagattgatgagagccttggcaagcttcatgtccgcgtttatcactgagagcctgtcgataagctcctcagactttctgattctaaagtaggcttcctccaaaacttttaggacgaagtctttgttctttagcatgatgttttcgaagtcatacttacttatgacaatgatcttcgcatttgttgttgcagatgcgttgtaaacatacttgtcttgatagagtatgttaaagccgccaacgaagtcgtgtttcttgtagatgtagaggatctgctctctgccatctgaaaggtacatcgatatcttcataaagccttcgtagactataaacatcctgtctgcgctgtcgcctgatgagaatatggcgtcgccgcgcttgaatgtttcgagcttaagaccacgtctgatctcgcgaagctcctcatccgtaaaagatgcaaaaagcggtatcttctttaaatcaatgctatctggtaatctttcttccatcttattctttgtttacaagcacaacaaggctttcagagtcttccaaagccagtgcgctgatggtattgaccccatcaaagtttaatacttcccccgccacaactttgtgcttttcgctctcagctatagtaatctcgaaggcgcccttcataactgcaaagactatctccttaccaggatgattgtgcttatcgattacttcgcccttcttcaataccttatgaacgaaattaacaccgtttatgctctttaataagccttcctcttttaaaatttttgctaacatagtatcactctcctaatatagttctgattttttctttgtaaacttcgacccccggttgaccataaggctccacatcatccatgcaggcgttgtatacgcaagaagccatgtagaatatcgcaagctctgataaagtttcttcgtctatagtactaagcctaattacagagcttggcacgcctcccatgtgatgcgccttaacagttgccttgaaggcgatctcgttaatcctctctaagttctgtagcccttcgttagattccctgcaagcctttgcaaatatatgcgtctctatgatgtttcttctgccctcttgcaagagctgtcccatagagtgcaggtcctgagtatacttaaggttcgaaactatgagtcccttctcatccttagcaagcgactcacacagtagctgctttatccactcagtaaatgaagcaagtctttcctcgtagatgcttataaactcaagtgcataagctttagctgccttatgtctatagtaggcgtagtcaagtgcaagattagcttcacttctttcgtagtaagcacatttcgccttgcgtatggattttatggctgagtctatgtcaagacctgccaccgccattggcaaaagaccaactgcagtaaagacactgtagcgtccgccaatatcctcaggtatatcaaagaattgtgtcttgttttcaactgcgaacttatgtaattcactcgattcagagctagtgacaactacgctatgcataaggtcaaagcccttcttcttcatatcatcaagtaaaatttcgaagacaagcttggtctccatagtcgtgccagacttactaatcacgtttactgcgtagcgctttccttcaagctcatcaaagagcttattaatgcatgcgctgtcaaggttgttacctacaaagtatacaggaaactcacttgataaagcgtcgataaaggccttagcacctatgaaggagccgcctataccggcaatgactaaggcatcgaagttctctttgagcctttctgcgcattctttaattttatgtataaagtcatcacttaggtagtcaagagctatccaatcagacgcatacttagtatgaaatttttcaaaagccgccttttttatatcatccgcactcgcatcgaaaacgattggctcattatatatatcaagctgcataaactcacctcgcttataagtacctatattataacacgaaagagcataaattgccacaaattaatatccctttgtgatataatgttagtggtgatgtatatggagctagataatgtattagaagatttaaaagacttagagcttgctaagagaagactcgccttgatgagaaagaataaagagagactcattagcatggaagagtttgaaaaagaattcaatattgactttgataagattgaagcacttgatgatgaagagcttgagtagctttgtcaagtacttataagttatcacgcataaaatagctgggcacatattcgtgtccagctatatttatatcaatattctatttacttgtcaaacttattaagatagtttacagcgcatatagcaaagattgctgttccatacttaagtgcgtcttcgttgaagattacctttggattgtggtgagcagcatcgcagccctttgtcttcatgttaagcattaagtatgttgtcttaactttttctgcaacgcaagccatgtcttctgatgccatgatcttgctgtccttaatcgccttaaggtccatgttctccttgattgtatctgcgaagaactctgtaagagatgggtcggagtatagacttggcacgccgctgaagtagtctacgtcgatcttagtttgtgtaagaacttctacagccttaactgcgtctgccatcctagctttagtgtactctctgacttctggctgataagttcttagtgttccttgcattacgcactcgttcggtatgatgtttgagttgctgcctgctgtgaattgaccaaatgttagtgttgcaaccttgtttggatctttctctcttgcgataagctccataaagtgtgtatataaaagcactcctgcgtatatagggtcgtgcgctgtatgtggataagcgccgtgtgagcccttgcctactatggtaatcttgaagttgtcgcatgatgtagtcatgtatccaagattgtagccgaaggagcccggttcttcgtcaagtgaagtgtgcatagcaagtgcagcatcaacctttgggttctcaagtatgccatgctcgatcataaagcgtgagcccttgaagatctcctcagcagattggaacataagcttaaccttgcccttgaattgatccttgttgtcatttagtatctttgcagcgctcataagcatggctgcgtgagtgtcgtggccgcaagtgtgtgcacagccgttagtagccttaaatggcaagtcgttgtcttcgctcattggcaaagcgtccatgtctgctcttagtagtaaacactttccatctttacccgagtcgatgattgcggatataccactgttaccatatctaactggctcaaggcctatctctttaagctttccttcaatgtagtcgcaagtcttctctacttcaagacctatctcagggatttgatgtagatcccttctcatcttgatggtttcgtcttgcattttttcagctaattcataaaatttattcataatccctctccttattgattaatttgtaaaccctttttctttgcaagcatctttacaagcataggtgtgattacagaagtaagtacaacgcctaaggctatctgcgatgcggctgtacctgcaatcgatgcaaggtagtcagagttttgcgaaagtattagtggcacagatacagtaagacctgccatagatgacatacctagcgcgcttacgccattacctttaagaaccttaacttcaaataaatagataggtagagctataagcacgtagaagatcactactaaaactaggccttgtaaacctgatttgaatgactcgataaggttgatacctgtaccgaagctccatcccataaatggagtaagcatagttgtcgaacctttgaatatacttgcgaagtccttgtcaaagttagcaatcaagatacctaagattaaaggtattagtgtagaaattatcggcgaaaagtcgatagcttgcgattgcgcaacagagtatattatgataggaaatacaggtaagcatagaagtccaagtagaccaaaggcgctctcatcagtctttgttgcatagtccttagtcaaagctatatatagcgatgggtttagagatgccaaaacgcatacaaagcttagtaagctgataccccatacacctgtttcaccgaaaaatttgaaaaataaaagtgaaaatgccatacataaaatgattttaactaaaagcattagtccttgcttcttcaaaaccttggcaagtgatttgaagtcaagagatgttgccgagcaaaatgttataagtgctacaatgtagttgatacccttcttagtaaataaggcttcagtaagtcctccaatgtaaaaaagattagggcaaaatgttgcaaacacagcactaatcagcattggaatcagaagcaagcctcctggaattttcttcataaatttgtacataattcatcctcccctatgctaatattttaccccgaaacaactttttgcaaacaaaaaaaacgtccggccaatgaacgttttttgggtggtgtaaattatgtgtctaaaaaattattcttacaatttatatataatatagtccataatactagatatgtcaatcgtttttaggaaattactcgcctatataagaacttacaatataaggccctcttagtatagataaaatttatatgtatgattgaaaaatatactttgcacagcgcgcaatagatgatatactagtaaaagtataaggagtgatacgtttgaacacaattttcggaattataattgtattaatagtcacatgcgtgagcgaatttttgtcaaagcacatacccataacgatgcctgcaagcatatacggcatcatcatactgtttttgctcttagagctaagaatcgtgaagaaggagaaggtcgaaggcgtgtgcaaggcgctgattaagattatgcctctaacattcatcccgagcgccgtctcactaatcgacagcttcctagaccttaaggcgatgctagtgccagtcatcgcagccatagttgtctcgacagtcttcgttatggcaacgacaggcaagttctgcgagagcctactaaagctaaggagggataagtaatgaaagccataattatgctaatcttaacagtagcaccctactttttctttgtatacataaaaaagaaacttaagtggtccttcgtcaatcccttgctctttgcaatcgcagtcgacatggccatcttgttgagctttaatatagacaccaaaacttatcagtcaggcgcaaagtatgtgagcgtgctactaacaccagcaaccatagccctagcctttccattatacgaagagcttaagaccatagaaaaggacatagtacccatagccctaagcatagtcttcggagtcttctcgtccctactgacagtctttgtaatctacaagatcttcctacttgagaaggtgcacttcataacacttatgccaaagtccatcaccacagcgataggtatagacgtctcgaggtccatgggcggcatagtctcgataacagtctttacgattatattcacaggcatattcggcgccatggtcagtgatgcagtctttaaacttatgaagataaagtcagacatagcaaagggagtcgcactcggaagcgcatcccacgcgataggcacagccaaggcaaataatatgaatgagctgtgtggagcggcaagttcgatgagtttggtgattagtggcatattaagtgtaataatccttcctttctttgtataattttttgttcaagcgcgcccttgaattcgttccatctataatatcttaatagtgagaaaattgttattcacgagcgcagcattcggagaaaactgttttaatttcttggcgcaacgagccggccgtgggctcatctagctgagcgaagcgaacggatatgagaccacaggtgagtaagcttagaaattatcagttttcgtagaccagcaagcgaaggaaagccgtaagtttaatcaaatcgacgttcacttcgttccgtctctttgtaaactctggcataaggcatgcatagccaatcgaacatcgctaacactcgttctcttggtgcatggacttaacgctttttgatgtgcaatgctcgagtacgtttagtacactgcgcttgcctcgtcgatccacatcgcccaatcatcacgcttgctcatcatagcgcaaaggttctcgaatgctttagcatgcgaggttcttcaaaatttgtttcatcaggttcattggcaagggtaaaattgcatcgccttatccatccgctttctctgcaaaatcaatcatactgagttaatttattgcgccaaaaaattaaaatgtacaaaaagggacagattcgctctgtcccttctaatatcttatacaagtatttagctagttaaattttttcactgcgcatatatgaactgtgcctggacctgtatgagcgcctatgcataccgcaaatggatttagttctataagcttatcgggatacttttctacaagcgcatcccttaccttagtcgcaagctcaatgcaatctgcgtggcaaaccatgatcctgtcatcataaagctcgtgtccgacctcttcctcaaatatgtctactgttttttctatagctctcttagtgcctctacccttgtcttttgtataaattacgccgtccgcatgcacatcaagaattaccttcatattgattaaattgccgatagtcgccttaagcttcgagactctgccgcctctttgcaagtactcaagcgaatcgacgaagaaaacatatctcgtgttcttcacaaaattatccgcataaatcttaagctcatcaaagctcatgccccccttcgcaagcttcgcaagatttatagccatcataccttggcccatggatgcgccgcgcgagtcaactagtaaaagcctgtcatcacctatgcccaaagagttcttcgcaagaactgcgttgttaaaagttgacgacataccagtagaaagcgatacgtatatcgccttatcatatttatttaaaacttcctcaaatttcacttcgtattcgtgcggagcgattgctccagtcttgtaaacagcgccatttctcatatcatcgtagatctctttgccgctgatgtcgacgccatctaggtaagttttgtcatctttcataatggcgattggcataatgtctatagaaaagtccttagctaagtctttacctatatctgaagccgaatctgttataatcttaatactcatgatttcctcctcatatatacttattatataataaatttactattttttaaagtccagaattatttttttcactatgctcatggcagagcggatctcgtcctcagccatagccccgtaaccaagtagtagtgcgtccttcgcaataggctcttcacttaggtaatagtctttaagttttgacgcttttacgcttttctttttaagcgccttgacaatggcctcataatcgtcaataccatcgacataaacttttagatgcatgccggccatggagtcgatggcgtgaacacccgggatgtcctcgagctcatcaagtaacacgaggcgcttcttattgtaaatgcccttcattctgttgagctgcctttcaaagtgaccgcccttcataaagtctttgacaagtatctgaactatgtttgacacggtcgagttaatctgcggcttgacctcgtagtacctcttaagtagctcgttcggcagaaccatgtagctcagtcttaataaggggctaatggattttgaaaaattcgcaatgtagatgactttatccatctcgtcgaggctctttaagggtgagagtgctctcgatgagtacctaaactcgctgtcgtagtcatcttctatgatgtagcggccgcttgcaccataagcccagttcaaaaactcgaaacgcctcttaatcggcatgacggtcgccgttggaaattgatttgacggggtaagtagcgcagctgtaaggtttgcacgcttaaagcgctcgaagttcatcccgctatgatccaggctgatgggctcgtagtcaatattattgagcttcaaaagcgttttgagctccttgtagcctgggttttcaaggccaaggcgaagctttttatccaaaatgatgaagactatagtcaaaagctgctcaagacccgaactgatgatgatattatcctcgctagtcttgatgccgcgcgccttgaagaggtaattcttgatctcgtggcgcaggccataaaggccttgatagtccctctcataaaattcctcgtcgtaaattacctcttgcgtgaaaatctttttaaatttgtctattgggtaactttctttatccccttcgctgatggcaaaggagtatttgtagctctccttctctggtctagccgcgtttatgggctccgccttaaaattatacaaggagccgatctcgctaacgaagtagccgcgcttctcgacgctctctatgtagccttcgcagctaagggcgtcgtatgccgctctaacagtattcgtagcgacagacatctccttagcaagagtcctcttagatggcagcctctcgccttttttgaagcgtccttcaagtattgcatccttaaaatattcatatatctcttcataaataggcctatcgcctttcaaatctatttgcatagctcctcctatctggtaccatcaaaataatcataattggtacttttaattataccataatccaagtataatagctataaaagaggaggaatattatgaataaaaaatttttagactttacaaatacacttaagggcggcgtcatcatggacgttactaatcctgaggaagcgaagattgccgaaagtgctggagcatgcgctgtcatggcgcttgagagggtacctgcggacatcagacgcgaaggcggcgttgctagaatgagcgatccacaaatgattcttgagataaaaaaagctgttaaaatccctgttatggcgaagtgcagaatcggtcactttgttgaagcaggggttttggaagccttaggcattgactacgtcgatgaatcagaagttttgtcaaaggctgataacgacaatcacatagacaaataccaattcgacgtgccatttgtttgcggtgcaagagatcttggcgaagcacttagaaggatcgaagaaggtgcatcgatgattagaagcaagggtgaagcaggtacaggcgacgttgtacaagctgtaagccacttaagacaaatacttggcggtatctctctacttgtttcaaaaagagaagacgagctctatacttttgcaaaagaatatagagttagctacgatatagtaaaatacgttcacgacaacaaaagactacctgtactaaacttctcagctggcggtgtcgcaacacctcaagacgcagcactaatgagaagacttggtgctgaaggtgtcttcgttggaagcggtatatttaagagcgaagacccagaaagaagagctaaggcaatagttaaggcagtgaaaaattatgaagataacaagattatagctgaggtggcgactggactgggtaaggctatgtttgggataaacgaggatgaacttcaaataaaaatggctgatagatagggattttttgttcaattggcgcctgaaactcgttcgtttgtcagcaatgctcgacttatttcgcattaagttgagcccttttgctagtttcgaattttttgtcactgcgacgtattaatcatacgactcgctccaaaaaattctgtacaacgcaaaatcatctcaacttctccgcgaactaagtggttgagcgacttggtacaatcatcttcgtctcatccagcctagcgtaaaggttcctgtccgtctatggacggggttcttcattgctccaaaaaatcttgtatagtgacggttcattgacaagggtaagaagtttgatcagaattattttatttaccttagctaaataataagaaaattgattttcgcgagcgcagcattcggaataaattggattaatttcttaatgaagatgtctgcccgcgaattcatctagctgagcgcagcgaacgaatatgaattcgcaagacatcgagtttagaaattaacaatttatgtagaccagcaagcgaaagaaaataattttcgatgtgcaatgacttactttgttcagtttattgcgcaaataatactttttaaaaattatatatttagtcaaaaacaaaggacagagaaaaataaaatctctatcctttcttaatttataaacttatttgtgatatgcctcaccatttataattttgaagcagcggaaaatttgctccatcaaaaccactctcatcagcttatgattcatggtcattctgccgaagcttagctttaaatctgctttatctgagactttcttattaaagccgtttgagcctcctataatcaaggtgattttggagtagccactgactgctacctctttaactttttctgcgaattcttcgcttgttagcagctttcccgctatctcgagtgtgatgatgtagcttgtctcatccactcttgcaagtatctcttctgactcttcatctataatcttttctagctcggcgtctgagagtttatcgggtttgtctctgtctttgagctctataatattgagtgttgtgaagcgtgagagtctcttcttatactcgtctatggcctcgtttaaatatttttccttgatcctacctaggactatcatatcgattttcagcatttaatccacctcgtatagcagtgttctttttaatctatgtgtgactcttagtctaaagtcttctgcttttctgcccgagctaagtagctctctatagactgtgacgtaggctagcttttctgtgttgttctcgtgtgagagatgcgctaggaagactagctcgtttttgtctttgagtgaatctttaatcagatctgctgcctgcatgttggagaggtgtccttcgtttgaacgcactctattctttaggtagtagctgtatggacctctctcgagcatctctgtgtcgtgattgctttcgatgtagtagatgtctgagtcttttatggcgtcttttatctcatcatcgacaaggcctgtgtctgtaagtatgctgacttttttactgcctgtgtatatggcgaggccaactgggtcgtaggcgtcgtgatatatcttaaatggctttatgcctatgtctttaatttcgaagtctccatcaaaaacatgaaccatgctctctttaactgagcctatgcgcggtagtgatgcgaggtaggtcttctcgtttgcgtatatctttaggccgtactttctcgatagtatgcctgcgccttgcacgtggtctctgtgctcgtgtgttagtacgactccatctatgtccttgatgtcgacaccaatctcttttagtgcattctctgttgtaactccgttgagtcctgcatcgactagtagcttggtatctttgtactcgatgtagcttacgttgccgcagctgccggagctcaatgagcaaaattttactgtatctttcatatctgtcccttcgttaaagtatcatcttgtagccgtctttgaaggttatcctccagtgcggtactgctctaagccttgtgatcttaagctcgcttgcttggtctagtgtcacttggtcgataaagtagcacatgtctactctgtctatgctcttgcctttgacttcgggcttatcgatgatggaaagtatcttgtctttcaccgcgtcaagtgtaaagtcttcgtcctctgtgttgatgtactctaggcacatcgcgtcgactcttctgactcctcttttgtctatggtgaagttgataaaggagttctctaggtacttaccctcatactttattgcaaagtgcacttggtagctgtcctcgtccttgtaggcgccatcaaaggtagtgccgcgcacaagtagctccttctctttcataaagtcgtttgcaagttttactgccttctctaggttcatatccggatacttctctatctcggatgcgtccatgtagctaaaaagtgttccttgcgatagcgagacgcttttctcgtcctttatgagtagtttaagatcgtatctgtcgtcaagctctgcctcgccattaaaaaagttcttgtttatcttatcaaggtcgaagtcgtagtacttaagtatgtagcctttgtactcgccgccttccttgagttctttctcgtccactttgatgccttgtccctctagtatctctaccacatctgctttgtccatggatagatccttcgtgctctcctttgtctttttcacatacatagtaagaagcaccaagtctatgagcataaagcatattaggagtatggatttagctttgttccagttcataatctctctcctttatcagctcaaatgtcttcgcatcgaagatgtagtacgccttatttgtgtctatcctaatcataggtactagtacgctctcttctcttcttaccaggtagactatgcttatcttgtttatggccttgagtgggttctcatcaggcgcaagatggaaaacgcttgccttcttttctataagatcaagtatgttctttgtatagaaggcctcggcggagtacttgttgaagcttgccttattaactgtagcaaagcgcacttcgtccatgaagacatctactgatgcgtagtaatcggagtccttctcgtagcagaccttcataccatctaggtagtagtcgaagctgattctgtagccaagtttgtcctcgcttgtaatctcttctatcttggatagcttaagtgcgtgctcttccatgatgtcgttttgcaagaaggctatcgcggtctctatcgacttaagaaggtttctctccttgtgcatcttcttaagcgggtcgaagtactctatggagccgtcgtacttaagcttgactacctctgagccgtagctgtatatcttggagaaatccttctcctcaatctcctttagatacttaaactccttgtcaaaaaatctttgcgcaaagctcctagcattgtcacgctcgagtatatcgaagtcgtgtgcctctgtgtactcgtcgaagatgtagcttgcgaactcatcttgatacggaatgtataaggggctcttctcgccaagtagggtcgatgcgttgtagtagtaggcaaggtttggcttaagttcaagatttgatactatggagtttgcaagtgaaagagacgtgttaagacctgtaagcttgtatatggatgtgtcggtcttgaatatggctgtgccgctgtataaaagcactgcgacctcttttatgtttttatcgttatctataaagttgttcttttcaatgatgttgaaggttctggcaataagccttagcgggaaattatcgataaaggtgaagacaacacatcttgagctagtgatcaagctttcgtactcattttggctgataagtgagaccttgtagtcgttcttcgtaaagacatcagaaaaaagccctttgaaactatggaagagtccttgctccccagggttgtctaaaacggtttttttgtcttttgcaaagctgactatagcagtctcagcactgatgtagtcctttagctctaccttctctttctcctttgcctcaatggagtctttcctctcacttgaaaagtcgagccatagcttcgaacttaagaatatggcaaaaataatcaagaaaaaaagaagggctgtcttgattctttctctcaatctagctcctcctatctcaaattttttattagatcgatggtcttcataaaagttatactctcacttagcttatccgcgtcagttaagtatatgtagaaaaccttttgcatcttgtccttgtcacttactacgatcttgttaagacccttcataagagtaagcttcttggagaatatgcctagtgatccaacacttatacttgtttttgatagctcttcatatccatcgtctttgatcttttcttcctcgaagtgcttagtaaagtcgtcaagcttaggatacttgtccttgtagctttcgaattccttgtagcttaagtcctttagcgagtgcttaatctcgacctctgtgtttctcggtgcactgccgttgataagtaatacttcgtcaatagtcgaatatatatcatgatcgggcgcttttaccctaaatacatatgcatcttttgcaaaagaaattgatccacttgtgaatatgaaaaggcataaaataaagattaagactcttttcataccttccctccttatctatatcaattataacatagaaaggttggaagtaatattacagttgtattaaataaatgttacacttttgtttctttgtattcgctgattaaaaatgtgaatgtcgagccgataccaaacttcgatgtgaagactatgtctgccttgtatgcgttcgccatctccttagcgatggatagaccaagacctgttccacccatcttcctcgagcgtcccttctcaactctgtagaagcgttcgaagattctcttttgatccttctcaggtatacctatgccgttatcaatgacatcaaggtgtgccttgccaagtactgaatatagttttacttctatagtgccaccttcgttggtatacttgatcgcgtttgatataaggttagtgatgatctgttcaagcgcgtctagatcgattaaagccatgataggctcagaggcgattgtgtagataagcttttgcttcttctcgtcagctagtatcttaagcttatctatggcgtccttcaccttctcattcatgcacacagcctttacgtcctcgcccttcttgtagtcgatattcgatagcaagagtaggtcaagaactaatctgttcatcctgtctgcttccttctcgataacgcctaagaacttactttgcaactcctcaggcactccgccttcaagcagcgtctctgagtaggaccttatcgccgtgataggtgtctttagttcgtgcgaaacattggcaacgaactccttacgcatattgtcaagtctgtgctccttagttatatcttggaacataatgatgatgccgccaagactatagtcctcgttttcgaatggagcgtaggtcatcttgtagacaccgcccttaagctctatctcttcctcgccttcaagagtgtatggattgtcgaagttgatcgacgatagacccaccttgtcgaggttgaagtacctttgcgcgtccctcttgatatctatgtcaataagtttttgtgcaacagagttcgcatgtataagctcgccttgactgtttagcgcgatgatggcctcagtcatgtttgtaaatatggtttcgagcttcttttgctccaagtccttctcgctaatggtcttgttcagttctccagttagagtgttaaacatggacgcaagcttacctatctcgtcattgctccttacctcaaccctttgtgtaaagtcgccctctgcaagtctctttgccttctgagttaagctactgataggcgaaactatggacgcggcaagtagatatgcgataagtatagtcacaaagatggctgcgatactgattacagtaagtagctgccttgccttctttactgtcgcctcgaccatcttggtagagctgattacgtagacaacgcccttgacctgacctctgtctgttacaacggggtagcttaggtggacgtctaggtctatgccatcgcctatggtgttctctgcaaggttaccctttagtgcctcaagtagcattgcttggtttatcgagtccacgtcgtaggcgttctttccgactatgaacctcgtcttctcatcattacctgcaattacagcagggtagctgtcgttacttataacgtagactagctcatcggcattgaatctgttctcattaataacggtttgtatgtgctctatggtgtcctcgtcggaccagttctccttcgtgaagtatctcgaggttgatgtcatcgtctcaacctgctttttgatgtcgtcctttaggcccttcatcagttcgttctcaagtcctgtaactatgaacgcagcaacgctcactagcacgaagagtactagtgatgcgtaaatgatgacaaacctgaactttatcgaattaaacttcatttgagatgtagtaacccatagttcttcttgtcttgatgtacttgtagtcgtcgtctaccttttcgtcgatcttctcacgcacacgtctgatagttacgtcgacagttcttacatcgccaacatagtcgtagccccaaacatctttaagcagctgtgctctcgagaatacttcgtttggatgctgcattaaatactttaagacttcgaactcgcgtagagttaattcaactggcttatcgtacttgtatgcttgtaatatggtaaggtcgagcctgatgtcaccaagctcaatggatgtcacagcaggctttgactttggtacgcgtctaaggttcgcctcgactctcgctataagctcacgaatgccaaatggctttgtgatgtagtcgtccgcacctagctcaagaccccttaccttgtcagactcctcttccttcgcagtcagcataaggatcgggaacttgtacttttgccttaagagttcaagcgtcttaaaaccgtccatctcaggcatcatcacgtctaaaagcataaggtcgggttccttctcactaacagaaagcagcgcttccttgccgtcgtgaaccgactttacttcaaaaccttccttttgtaaattaaactcgataatgtcagttatcgttgtttcgtcgtcaactattagtatatagctcataatctacctcactatctactccttatattcttcattagtatcgtcaatattttctgtcttgctagcctcgtcatcttttgttttttcttctgtgttaataggctcgtcactattagtatcttcttctgtgttaataggctcatcgctattagtattttcttctgtgctaataggctcctcgctatcagaattttcttcagcttctttagcatcactctcgttaaagatcttcataaactcttctccactgatggtttccttctcgataaggaattttgaaatgctatcaagcttagttctgttctcacgaagtatctccttcgccttttcgtaagcgtccgcaatgagttttttaactatgctatcaaccttagcaaaagtctcctcactcgcagtaagctcgccccttcctccaaggtagcggctgccctcgctcataaggctcatcatagggaaatcgtcgctcataccgtagcgcataaccatgttccttgcgatgtttgtgatctgctctatgtcgttacttgcacctgtagtgatctcgccaaagactatctcttcagcggctctaccacctgatgctgtaaccatcatattgaatagctcttccttgtccataaggaacttctcttctgtatcggattgcagtgtgtagccaagtgcgcctgaagtcctcggtatgattgtgatcttctcaactggggcgctcttcttttgcaccgcagcaactatcgcgtgaccaacttcgtggtagctgatcatctcgcgctccttcttcgatataatcatagtctttctttggtagccgactatgactacttctacagactcttggaggtcttcttgtattacataatctcttttgtttctaaccgctctaagtgccgcctcgttcacaatattagcaaggtcggctcctgatgcgccagcagtaagtagacctatcttcttaaaatctacatcgtcggccatcttaatgttcttagagtgcaccttcaaaacggcgattctgccgttaaggtccggtagctctactggtatacgcctgtcaaatcggcctggacgaagtagtgcaggatctagtacttctggtctgtttgtcgctgctaagattactatacccttcttagagtcgaagccgtccatctcagtaagtagttggttaagtgcttgctctctctcgtcatttgaagagaaacttgcttcacgcgacttacctatggcgtcgatctcgtctatgaatatgatgcaaggcgccttctcttgtgcttccttgaataagtctctgaccctcttggctgcaagtcctacgaacatctctacgaaggacgaacctgatatagagatgaaaggcacatcagcctcgcccgcaactgcttgtgcaagtagcgtcttacctgttcctggaggtcctacaagtagcgcgcctttaggaaggttcgcgcctatcttggcgtacctttcagggtagtgcaggaagtcgactatctcaaggagcatctccttcgcttcctcttgacctgcgacatcttcgaaggtcttcttttgcttgcctttaacatataccttggcacccgatttgccgaagccgaacttatctagtccgcctcccatatccttgaaaagtatcttggataatatcagagccatgatgatgaaggttactataggtaataagaagccaagtatgctcataaatatcgatggcttctcgatgatttcactaccgaagtggactcccttcgcctcaagcttctcagtaagacctgcatagtcccactcgccagtgatgaatacccttacaggctcctcttgcggcctaagtgcattttcaagcttgtccttattagtctcgtttgttttatccttagctttgtttttagtttcaagtttttcaaacttatacttgccgctcttctcatcgtgcacggcgatgtaatccggcttaagctgaaagacgatgttgcctcccatcttttgcaccttgtcaacaacgcctacgtcaatcgctttaaggaaggcatcgtatgtaaccttcttaacaggtggtttcgccaccatgtcccttataaagaatgtgttgattaagtatgcgatgatgagtatggctatatagtaaaagatcaaggacttcttcggtcccttacccttgttattctttctattgttattcaatgtattcactcctttataagtatatacccaataaagatatatacttagctagtttaattttaacacaaaaaagcaatttttacaatgaaagacgcacaaaaaaagaactgctctcacacagttcttttttttatatattactttgtatatgctctaagccatattaataatttgcaagcatgtagctactactatcagggttgaaagtaaattgcacgtagcctctcttcacaaggtctgccttcgacttgatagacttgttgaagaccttgatgtaccttacgccgtcaagtatcttaagtgatgcttcgttagagccagatacaacgtagacgttcttacccatctcggagagctctttgaacttttggtgcaatagccttgcttctttcttgtcagtaaagccacccttgccgaagattggactagtcgtagtcactacaacgttgttttgcgtgatattggcaaggctctctttgatgtagttccactgtttagcgtccgacagccttagcgatctcttctttgtattaaggttcaagatgaaggcatttgtcgttgcgcttgtcgagaatgtgtccgcgttcttaagaaggtttttgtttatggccttcttgaaagcagcgtcatagtttgacaaaactaccgcagagtcaactctgttaagcttatttatgatggcagccttcgcaccttggaagtttttatcttgagctgcgtcgtagccactaactacaaggtactctccacctacagtcttaggtataaagcccttttgctcatcttccaagacagaggagttatcgattgcgttttcaaatacgtgctcatatagtaggtcgatcgagtcgataatgactttagacttgaccatggcagagttgttggagctgcccacgtatatattaagaagcgagtatggatatgcctcgttgtcaggaatttctgcctcaagatatctgtagtccttgaagttaattttttcagtaaagctgatttgctcaataaagtcttcgctgtccttgatagtcgccttaagcatagcacccttggcgtcgcccttaacccatataccaagtctctttggcttaccttctaaaacaagaggctttgcaaagctcatgtaagcggctctcgagtcgtcaagcttcgagaagtcgtatcttagttcaaccgcggcctttccactctttgcgtcctttgataaggcaaggctagccttaaccttgtcagctggatagcttgatgccctaagattgttaaggttttcaaggtccacaagcggctttgagttaaagcctatagtcacagggatgttcttgtaagtagtccccaagcccatggtaatatagccgaagccagtattagatgaggcagtgaagacatttttattcatcgcaccaatcttgccccagatggagaaagtgatgctagatggtgcaatctttgcgctgcgtccaagtctatcaagacctataatctcacctatagtatacttgtcgccaggttttgcgtttatgctctcgatcgagcttcttagctcaacaggctctgacaaaacttccatagtcttagtggcagctatgccttggtagctaacagtcacttcagctagtccttcagctgtgccgatcacagagttatttgtgcaagtagcattcgtagcagatgccataatgccattagcatcgacctttacaggattgttccttgcatcgtacgctttaatgctatagttaactggtatgccaggaaaggccttatccgagtcaagctcaagctcgatcctttgaacagcgcctgcggtatccttagaaaatacaccaactcccgatacaacagatcttggagtgccgcccgaaggcttgtttataatcttagctccatccatcgccttagtattcttgaccatggtagtcgaaccgccgccatcaaggttaagcgcgttgtagcagccaaaactcttgaaaagctcgccgaattccttttggctaagacccgcatagccgtttctaccatcagctgtgatgatgactatcttggagtagtcttgtgaaacacctataccagttctaggatgtcttcctttattaacaatattagttgcagtcgctacaccatcttgtaagatgatagagccgccgcccatagcaaattttagtcccttgtggtctatactcgaagaaacttgcaattcaagaggagtgccaagagtaagaccagcaagtggagagtcattttggctaagaacgtagccgtcagctggtatgtcaaatggctcaccgttagtccttacatccgcaacaacaccattcacaacaagaacctcagtcatattactagacttagcaccgaaactcttagtgttccaatccctagttagaaggctcatgtacttgtagccttggaaagccttattcacaccagttatgtgatacttctccccgcttagagggtttataacatcaacagattgagtgataaaaccaacatgcgcatctccagcacttccttggtagaagacaggcaagttgttcgcaccctcttgagtggtacttataagcttgccgtcattgacaataagacccaaagtcgacggaagcggttgatagttaaagtagtcaccattgaccccagcaacagcaccgtgcaccgagaccatgtccttgacattagttctgtggataagaccgtcagtgttgaagatcgccttgatctcattcatctgattagacgtatcgatggtcaagacattgaagttttgccagccctcagatgtgaacctttcgatgtgcgacctttgtacaccactagccaagtactcgtcctttctctcttcgttaattatatacgcaaaagaactttgacttaagattgataaagcaagcgtagcactaagtgcgatacttgcaaagcgttttaatttcattgtatccttcctttcatatcgtacctctattatataccaaaagagatgcactttgttaaaaaagacgaaattgtaaccaagttgaaacaaacgcagcatatattaggaaaaaataaataatgtaaaaatcgaagataatagaagaaaaacaacaataattaaagatatatcacgcaaaaaagatataacggcgcttgcaagaatttatatcaaaaggtataataggtaggtaatattcggcggggtgtagcgcagtttggtagcgcacgtggtttgggaccatggggccgggagttcgaaccttctcaccccgaccaaagaaattagagagagcatttagctctctctttttttctttcgcattcgatttgcgcctaaggctcgcgcgctcacttactccttgcggagtacccttagtacacctcagtcgttcgttcgttatgctgcgccttatccagcatagcgtaaaggttcttgtgcgttaggacaaggttcttcatcgctctgcgaaatacgcggagtattaattgcatctaattctaaatacataaattgattgtaaaaacaaacgcaatccatcatagcgcaaagaacctcgttagcattgacgaggttcttcttttcatcacaaaaacgttttcttccattgtaaaaaagtattaatattgtttatgttgttaatataattgacactatacttattttgatcaaattacatattttatatctaataaatatttatacaccagaaaattattgcgttcaaacgcttgtcaaaaaatctaattatagcaatccatcgtagtgcaaagaacctcgttagcattgacgaggttcttcttttcatcgcaaaattattcagtgatatcaaatttgttgatttaattgtttttcttagctggatcaaaatactatcacctatctcatctatatacatatacgcgggattttgcaaagcaatttgatgcataggacgaagtggaacgagcgaccgaccgacatcgtactaaggggtacgttgagggaggaagcgagcgaacaagttctatgcgcaaattgaatgcgaaatcctaagtaaaaaggtccagcgtttgctggacctttgtttacttatgtagtgcacccgacttcgaaaatcacctataagcgttaccacaacagacagctcccgaacggcaccctcgcggcacacacagatacatatttatcgctgcttccgccaggacctgacgaggttcatatgatctatgttgcgcaagaacccttcgttcaacacctcttattgtgggcagaccctacaggagacgccctctggtcgggaattcattccatatatagcggatttatggttacaggatgccgctaccttcccaactagcacgtggcggagagaaggggattcgaacccctgatacgcttaatcacgtatacccgctttccaggcgagcgccttcaaccaactcaaccatctctccacgctgattgttcacaaagtttcttaacttgacttaactattatagtataaagcggccagcttgtcaagttctttataggcaaaaaaagatccgtgagtatagcccacggaccttgtatatctttcttatatattattgattaatggctcttgtaagtgttacttgtttagtagctgcgtcccatactatgcctttgccatcttctaggccaagggctcttgcgatgtttgcaactgctagcatagttctgccattaacgatttctggcttaacgtcgcttgtagtttctatgccattaacgatgatcttgtttgtgtcaacagggatctcaaccttgtattgactgtcttgaactatggctgttcttgtctctcctacccactcaacgcttaagccaagagcttctgcaacgaatcttagtggaagcatagttctaccgtttttaatgtaggctgctgcgtccatctcagttttgttttctcctgcaagactcaccttgttaatagccttggagcctatagtgataacggctctaagttcattatctgcaagtggcgcaagctctactttttctactggcttttcttcagtcttttctacttgcttatctaaagctaagtcctttacatagtcttccgctaaaaaagtgtagtgtatagacttatttccgaacatctctttaagaccagcttgaataccatcatagacaaagtctgcccactttgatggtttatctgatgtatcatatgaaaacatcttaccctttggaaaatcataaccagccttagggataagctctattgagaacctatattccccgcctgcattaaatacctcaccatgatatggtggtttaagtacctttccttcacctgtccaacattcaaatttaacatcaacttctccttcaagaaccttcacatcgacaggcttaatctccttacctatgccataaacatctttaaagttagtttctataactaccttatcaatctccttagtcttagccacaagcgtattgtccttcattggcacaagacccactaataataccaaagccatggcgatggctaaaatatttcttatctttttcatactacttcctccttaatgtagctttattgaagttagacttctgtcatcattatacttcattagcacatttattgcaacagaaaaaaagatccgtgagtatagcccacggaccttgtatatctttcttatatattattgattaatggctcttgtaagtgttacttgtttagtagctgcgtcccatactatgcctttgccatcttctaggccaagggctcttgcgatgtttgcaactgctagcatagttctgccattaacgatttctggcttaacgtcgcttgtagtttctatgccattaacgatgatcttgtttgtgtcaacagggatctcaaccttgtattgactgtcttgaactatggctgttcttgtctctcctacccactcaacgcttaagccaagagcttctgcaacgaatcttagtggaagcatagttctaccgtttttaatgtatgctgctgcgtccatctcagttttgttttctcctgcaagactcaccttgttaatagccttggagcctatagtgataacggctctaagttcattatctgcaagtggcgcaagctctactttttctactggcttttcttcagtcttttctacttgcttatctaaagctaagtcctttacatagtcttccgctaaaaaagtgtagtgtatagacttatttccgaacatctctttaagaccagcttgaataccatcatagacaaagtctgcccactttgatggtttatctgatgtatcatatgaaaacatcttaccctttggaaaatcataaccagccttagggataagctctattgagaacctatattccccgcctgcattaaatacctcaccatgatatggtggtttaagtacctttccttcacctgtccaacattcaaatttaacatcaacttctccttcaagaaccttcacatcgacaggcttaatctccttacctatgccataaacatctttaaagttagtttctataactaccttatcaatctccttagtcttagccacaagcgtattgtccttcattggcacaagacccactaataataccaaagccatggcgatggctaaaatatttcttatctttttcatactacttcctccttaacgtagctttattgaagttacacttctgtcatcattatacttcattagcatatttaatgcaatagaaaagatccgccaggcgaacccagcggaccctttaggacttttaaattatttagagtaaatttttcttacgaaagttacttgttgctttccagcatcccaagtaatgtcttgaccatcttgaaggcctaacattctagcaatgtttgcaacagcaagcatagttcttccgttcttcatttcaggtttaacatcgttaatatatggtacagagttgacgatcatcttgttagtgtcaacagggatttcaattctgtttataccgtcccaaataagaacagttctagtttccttaacccaagaaacttgtaagccaagagcctcagcaacatatcttattggaagcatagttctgccgtccttaacataagcagcaacgtccatagccatgatggattggccactcatgtcagccttgttaaggatagttgagccgatagtgataaccgcccttgattcagattttagaacaggagccttcttttcttcctcagccttgtcattttcttcctcatcagctttagcttgtctttcgtagtagttagactttttgtttctgcgatatctgtaataataatagtcgtcatcatcgtagtaacgtctgtaagttccagttctgctgtcgtagtaatatccgtcacgccagtaaggagcacttgtaaatgttactgtaactgttacattgctctctggcattgtaaagtcagccttgtcatagtaagtgtaactacgatcataacgccaattataataatcatcatcgtcatatctgtcataccagtagatgaaatcatcataatcatcctcatctacagtgtaattatttaacctacaccaatatttgtagttactaaagctacgtacagtgctgttagtgtcgtagcaccaacgtctgtagtcgtagaagttgtatctgtaagagtacttgtagccatatcttccgtaccagtatggatattcattgtagtagtttttgtattcgaaatttcttaaatcaagaacatgtccagatgcatctgttactacaatactgtcaacaacatagccactgtttggataagcctttacagttactgtttgaccaacaacagctggattaacatttacttctgcatatccaaatgatgaatcttttataattatattctttcttgttgctgcatctctattgtttgcagataatctattagtatctgcaactactctatctaatacagccttatcttgagcgccttcgattgcagcagttgctacacgtttttcttctgctgataaatatgggtcgttagaaacctttgtcttagccgcttcttttgctgttgtttctgcttttttatctttagtttctgcttcgctagctgcattttttgcctcatctacagtttgagcatctctaattgttcctagtgcacgattcttatcttctgttgataaataagttaaagaatcaacttttgtcttagcttcttctttagcctttgctacagggtcaactgctggtggttgttgtggtgttcctgtattagtttgtgctggagtttgagttcctgtctccccagcaaatacattcacaggagcgaagcctataagcattacaaagactaatgctatcgataaaatatttcttatctttttcatactactacctcctaattgtagatataatttagaaagtcctataccgttccttcttaacactattatacccctttatcaagagatttacaagagctaattactctatcttgttaaaatttttaattttttcatagatacaccactaagtctagttgtatacatataaaaaggcccactgacaaggcagcggaccttcaatataaatattaactatttaacttcaatgtttcttgtgatgcttgcgctcttagtgatagggttccagaatatgtccttaccatcttcaaggccaagcgcccttccaatgttcgcaatcggtagcatagttctgttatttctcatctcaggcttaacatcacttagagtagcaagtccattaacaataatcttgttagtgtcaacaggtatctcgactctgttttccttatccttaatgataacagttctgcttgcgtggttccactctacattaaagcctaaagcttctgatacatatctaacgctaagcatagttctaccgttcttaatatatggcgcgatattcatcttgacaacgttcttgatgtcgccaatgtattgaacaaggtcgctagagccttcagttaatatagccttcaaagcaacgaattttttactttccttctttacttcctttgcttcagcttttctctcaacttttctttcttctctttgaggtctatataccctctcgtcgtctctgtagcttggtctgtatgagtaaatgtctctaaatgtaacatcgatacttacgtagctgtcaggcattacgaaagtttcactgtctatagagatgattctttgtcttgcatccctaaccactatgctataaacttcgtagccagggtctggtcttgtgaatatacgaacccactcgccctcctcagctgttcttgttaatgtccatgcgtcaccgttgtatagtctgtcgaagaagatgcggtatcccttttctgttggtcttggtgttggtgggttgataggtgtgtccgcgttcttagtccacttagcatatagtgttatagctctagttataggtgtattaaaatcaaacttatttgtcaaagttgactcagtgaaccatccgccaaaagtgtatcctgcagcacttggatcttgtggcttaaatgcttttgcgttttcttttacagtttgagctggtacttgattgcctctacccatcatattaaagcttacagtaattggatttgggtttggatttggagttggagttggatgttctgggtctgggtttggatctgggtcttgatgtcctgggtctggatcattgccatggtcttcatcgttatcgccatggtcttcatcgccactaccagtattaccatgatcatcttctgattcattaggctttaattcccacttagcatatagtgttatcggctctgttatatttccaataaacttatttgtgcattggctatcagtataccagccaacaaaatcatattttgtgtcattcatgccatcgattcctggaacctcagagttctttgctacatattgcactacagtcgatggactagctccgtgaccattcttaacaaatgtcactttaacagtttctacctcatcttctgtatctgtttcgacttgtacaaattcaatctcaatccttacgtcacatggaggcattttgaattttccgtcaataacacttatagaatatttttctctatcgtcttcattctcaggacttaaagttaaggtattaactttgtaacctcttggtatatcgtactttagtgtaacctcatcatctactgttgccttttgtgatttaatagtttggttgtcttctttatttatatactttacttcatatattatctttttgaaacttgctgttactgttacgtcacatgctggcattaaaaatgaagagtcgcctgttaaagatacattttctccattgctagctttaacagttattttatctatttcatatcctggctttgcatttacttttacagaaacgccactgtaatatgttgctgttttttggctctcttcaaaagttccaaattctgattctgtatatttaattttaaaatttttagccttagataaaaatcttactgttacgtcgcatgctggcattatgaattcatcatttactaagtcgaaagtttcatttttctcattaaatacaattattttatctaactcgctagtgtcatataacttgtatgatactttaactttagtgcctggtgttatttttttatcttttccgtctgctgttttgcatttaaaccacttaaatccgccgtttgagtttgcaaatgtgtcaaattctgtccttggtatttctggttctggattagctactaatttccatatagctgttagaacaagatgttgatctgttgttcttatttcatctccttcttttgcgtatagagtttgttctccaagtttgtaactccacttatcaaactctttattctttggagccttaaatttacaaggtggtgctttaaaagttgagttcttaggggcagagctatcatacataattccagatccttcgccagatctaaatccaacattaatagtttctggagttatttctacaggacatcttctaactttcaaataataagtatatccttcgtcaccctctgctgcttttacttttataataaattttttagtaatatattcaccaatagagctagtaaatgattttccaccttcaacatctttaacttctagtttttcatttccgcatgtaacttctatgttttgatttgaatctggacattccattaatacaacaacatctgcagaattattaactagcgtcacttcataactattttctaaagttgaaaattttggtatatagtcataataatcccaattaataccacttgactctttacttcctactttaatatcttttaaataaggattagttttatcagtcatataagttgctgtagcttttacatccgtgtctttaattgtaattgttttctttgcatctctacttgattttatgtctccaagaccttcaaatttccacttgaaaaattgttctcctctagccgaacgatcttctggtgttaggtgaacaccttcgccttcaaaaactctttttaaactagtagtaccatctactactgtaacagtatgagccttgttaggatctcctcttgttacttttattgtgtagttttctttatatcttttatctgctgatgtaacttcaattacaaatacgtttacacctgcatttaaataatacttccaggaagtgtatccaggtctgtataaatcctctccatcaacaagcaatcttaagctttgatctatatcagccttttctgtctcaataacaatatatcttctgtcttggtctagttgcaactcataatttcttgtatctgagttgaaacttggtgttaagcttactacttttgtttcgctttggtaaccgttttgcgatttaactacaatacttccaagctttgtacttgacttaaatgcacccccccagcagctatatttgtcggcatcaagcctactagcatcataagtgctaataccatcgaaaagatctttctaatctttttcataatattcctccttcttcttatatgattttatcacactaaaatcttcttattaatattatacttctttataagaacttttgcaagcaatataagatatatcttatgtaattttgttattttcgtactatgataaagtggatagtcacatcccgcctctcctatgcatagcagtctcctatataacacctcgcttcatatatattagctcgcctctcatatagtacctcgcttcttatatagtacctcgcctctcatatattagcccctttactataccattcgccaagatatacgaaaacgattgccataatcaagaattagtgatataataccctttgggtgataatatggatttaaaaagcactattagggtaatcgaaggcttcccaaaggaaggtatttcttttaaggacataacaactcttttgaaggacaaggacgctttcagatgcgctatcgatgaattagaaaaaaatatagagggacttggcgctgagtacatcgtgggtcctgaggcgaggggctttatgcttggctgcgctcttagctacaagatgggtcttggcttcattcctgttagaaagaagggcaagcttcctgctgagactgagtctttctcgtatgaaaaggaatatggtactgacactatcgagattcacaaggatgcgattaagccgggaactaaggttgttgtaattgatgaccttctagcaactggtggcactgttgaggctgtgaagaaccttcttgtgaagatgggtgccgagattgttgcgtttgaatttttgattgaacttactgatcttaagggccgcgacaagcttcatggttacaaggtcgactctctaatcacatataatgtatagcattgacaaaaaagggattgagcgcttcatcatcaagagctaccgcaaggagttgtggaagaagtttcttaaggcgataaacgactttaatctcatcgaagaaggcgacaaggttttggtcgctatcagtggcggcaaggactcgatcctacttgcgaagatgtttgaggagctaaagaagcactcgatcattaactttgacgtgtgctacgtgagcatggaccccggctttactaaggagaacagggacaagctagaggagctttgtaagtttttaggcatagacttagaagtttttgagacggacatatttgaggtggcggagaagcttgcgggtgactacccgtgttacatgtgcgctcgtatgcgccgcggtgctttgtatagcaaggccaaggagcttggatgtaacaaggtggctttgggtcaccatatgaatgatgtggttgaaacgactcttatgaatatgctctacgctggcactttcaagaccatgcgccctatacttgacagccaaaacttcgaaggtctaaagctaattaggcctatgtactacataagggaggatgacataagacgctggctcaaaaggagcgaccttaaggctttggactgcgcctgctctgttacgaagaagagaagtggcaatattcgctacgagatcaaggaccttgtagctgagcttatggcgaagaacgacatggcggagagaaacattttgaacagcgcgatgaatattaatcttgactcttgcgttgcgtgggagaaagatgggaagaagtatttacttggcgaagaaatagatgaataatatataagaaaatggtcggattgctccgaccattttcttgtttatattatttctccttgttttaccatagctcattaccctttgtttcgccccaatcaatttcttcactcttgtaattacctttgtatccatcaaaaagctctactatgcttttttcttttattatgcttttgtatgataatcttgtctttgtccttgcttattgaaagctcgtcgttttcactccaaccaagttcatctagtaaaactttaggaagtcttataccttgactgttgccccacttttgtaaagtaatcatagaatacacctccatatatatttttttattcactttgtcaatatttaatctttttactctggaagatagtcaaagcatgggacttcgcacatcgaaaagatagttccaccagagcttagttcaccaaattgacaattgcacatcgaaaagatagttccaccagagcttagttcaccaaattgacaattgcacatcgaaaagatagttccaccagagcttagttcaccaaattgacaattgcacatcgaaaattgttttccttcgcttgctggtctacgaaaactgataatttctaagcttacacatcaaaaagatagttccacgcagcttagttcaccaaattgacaattgctaagcttgtccgactataaatccatattcgttccgctacgctccactagatggatttatggccgtcgtcctacgcaaagcaattgaagcaatttgtctcaatgcgctgcttttggaacatatcttttctcactaaaacagttttctccgaatgctgcgctcgtgaataacaattttctcactaaaatgcttcgtatttatattgattaagaaaggcgctgcttttggaacatatcttttctcactattgagatattataaaagcgaacaagcgtaaggcgcaatttgaagaacctcgacctaacggtcgagaaccttggtgcttagcacgaacgcgatggctataactatttatcaattacaatgctcttatctagcaccctaatattattttcatttaaaacacctaaagcaacgcttctcatcactctctccactctccactgctcaccaggtatagtcttggcagcgcaagtaatcactataccactagatgcaaagtcggtgatgccccacacgctcacatcctcgatcacggcgtggtcgtcgttaactggctttagcgcctcggtcaaaagatctactgccttcttcgcgtctgcatcgtaggctatcggcacgttgatcagcgctctttgtatgttcttgttcctgttagtaacgactctgatctcgccattaggcacaacgtgcaactcgccgttgtagtcgcgtatagtcgttgtgcgcaggcttatcctctcaactatacctgttttgcccgcaactgtgatgtcgtcgccaatcacgaagctatcttcaagcataagaaagatgccgctgattatgtcctcaacaagactcttggccccgaaggagattgcgataccgcctatcccagctgttgtgatgatggctgaggtgttgactccgaatatccttaaagctgacagaaaccaggtaaatattataatgatcgtaacgaagctcttcataacgctaaggactgtcttaactctcttcgcgtcgatggctctgagcttgtcgtacttctttcttgcaagccttgcgatgattatacctataacctttatcacgactatggcgatgactaggtacaaggctgctagcgctactctgccaagtgtgttaaggcctcctgcttcattcattagatgcaattttaatttatcaaacatgctatccctcccaatatacctttattataccacaaagatgaaaaaaagtggacatctcgcccacttctcttagatatctatctatctttcaaaaaattacacataatttcaagagccttgatgttcataagtatgcccatgtgtgtgcccttcattaccttgaacctctttcttgtgtcagcatccatctcctcaagccttagccccatgcatgcagagtaaagtggcacttgtccgtcgccttccttagtaagcatcgcctttaatacaagacttccgtcttcgtcctttctgtagcagcctgaaacttgcgttgtgatgccttcccccactatgaacatggacttgtcgcgcttaagtaagtttacatgacccgagaagcttttgtaccttctgtagctctttgcattttttgtaaagcggtcaaagcgtgtcttgccgaggtagtccttcatgcgagactctacatctttcacgctgacatttgccgacgcagcctttctgtgcagcgcctcaagcatatcatcgtagcttttgtacttcttcgaagccaaatcgtcaaaggccttctcgtctgtaatccattggtatgggtaggccttcagcatcttatccgttggatatagctccacaagtccctcgtagtcctcaacaacctcttggtctatgccaaagagcttctccaagacgatgtccgcaacgccgcctaaaatattgccactgctcatctcgttgtaggcatgcggcgctccctcatacggcgtacaaaaagatatatacttttcgactctgtgcgagtgttcgtgcatatagtgggcgctcacaaggcctcccatgctgtgcgcaactatatcgaccttgcccctcgctcctgcaacgctcttgatgaactccgcaagcttctcgctagtaactgtgtttgacttacgccaatcgtaggagaaaaggtagatgggtcttttcggaaaattaattataagcgcgttaaaaagcatcgcatacgacgcgccaggtcctgtgtgcctatcgaagatcttcgcatacctaaggtcgccctcttgcagaccataagcctcgtttttgatgttaaggtccctgtttagctcttctttgtcatagtttaagggtagccacagcctctttgcctgagcctccttctcgcgcgcaatcatgccgaccttgcgctcttcttcgccaactagagcctcgtctatactaaagagctcactaccaatgatgcctggtatgaagatgatgggtctaccacagtcttcacttgcagcgtcctctccttgcaccatgttatcgacggcgtgctttgccttttctatagtcttaataatgtcttttatctttttcataatacacctcttatgtaagataattataacacatatgcttatggttttgctaaaataattattgtcacaaatggacaattattaagtagttccacttctttttgggtacaatattaatacaaaataaaaaggagtgatactatgccaataataacaattattcttatagtgcttgcacttgtggcactattcttcatttcagagcaaagaaaattcgttttcctaagcgaaaacattgacaacgctcttgcaaacatcgaggtaaaccttaactcgcgttgggacgcattaaaggcacttgctagtgcagttaagtcctactcagagcacgagttcgagacactttcagccatcattgataagcgcagcgcgagcgcaaaatcagccgcaggcgtgagtgaaggcgaagcgctactaggaagcgcactatcaaggattaatgccgttgcagagagctaccctgagcttaaggcatcagagctttacactaggaccatggactcgattaacgactacgaaggcaaagttagagtcagccgcatggtatacaacgacagcgttacaaagcttaacagagctgtgaagatgttcccttcatccatagttgcaggcgttttaggcattaacgcgaaagactacttagttgtcgatgacaacaagaaagacatgccaaacttggagttcagataatgagaaggctcttggcatgcatcgccgcagccatcatcataattttctcttttaatagctacgcatcctcagacgagatccactcgatagacatcaaggccagacttatggacgacggctcgctcatggtagaagagacgtggaaggcaagggccggttcaggcaccgagtttttcataccgaagagccacatgcgtgacatagtcatcatggacttcaaagtctcagatgaagatggcgcttacgagacagtcagcaattggaacgtcgactggaccttagctgagaaggcgcgcaagtgcggtctacatggcacagcggacggagtcgagctatgctttggtaaaacagagctaaacaaggacaagacctacacacttagctacaagatgtacagagcggcgcaaagcttttccgacatggacggcttcaacatacgctttgtcaatgatatgatggatcctgcgccagagaaggtctccttcgagctaagccttgatggtggcgagatcacaaaggataacgcacgcgtatggggcttcggttcagacgcgcccatagtctttgaaggtggcaaagtcgtcgtgaacgagatagcagacttcagttccgagagtcacctaacagttctcttcggtcttgaaaaaggcatcatacaccccattagtgagggtagcggcagctttgaagagcttaagaatgctgccttagaaggctcggactatggtagtcgtgatgatgatatagaaacagaagttcctgcagaagttcctgctgataatgacgactattattatccaaactatggcagatctaatttcttcacgagattcattggcactgctaatccagtcgttttacccatcatcttcataatctttatgtccatcgtctcatcgattatgggcataattacaaagactaggtgcagatcagaaaaccgcttgccaagcgatattggctactaccgcgacttgccgctggatggcgatatacttttaaactcagccatatacacagtaaggagcgactttactatcgataatgttgttgcggcatacttcctaaagtggatcaaagacggcaacatcgagctagttaaggagaagttcattaaagggctgatattcaaaaaagacgttttagaagactgcttcaagatagtcaaggcacccgtgacagacgatgtcatggaagattggctgtataagatgattacgagcgcctcaggtgacgacctcgtgctaagaaacgatgagcttgttagagccttcgagcgcggaagcgtcgccgaaaagttcgtaaagagctacaaagagaatgcacttagtgctgctacaagggaagatcttatatataggaagtcaggctttatgctttcaagctacaatgtatacacagagcgcggccgcgaagacgcgattaagcagctgggcttcatcaagtttttaaaagacttcacactgattaatgaaagagagctagtcgaagcctacttgtgggatgactacctagtccttgcaacactctttggactgggagataaagtcttggagaagttcaagagcataaacccaagctacacatacgcaggctatagaggactagacccagtgattatgtaccacgttgtgaataacgtaggttcatccgtaaaccacgcctaccatagcaatagatccagcgcctcacatggcggaggaggagggatgtcgcatggtggcggcggaggattctcatccggtggtagtggaggaggaggaagatagccttcgtaggatttttcgttcgatttgcccacgaaactcgttcgctgcgcgccctccctcaacgtacgcgtttgtacgatgtcggtcggtcgctacgttccacttcgtcccgtgaatcaaatcgctccaaaaaatctgtatgcggcggttcatttgaagaaaatatgtgtatagcgcaaaatccatcatagcgtaaaggttcacgtctacagacggggttcttctttatttcaagaacttacggttgtggatggattatttttaaatatttaattcacttcgccttatccatcatagcgcaaaggttctcgtacgataagtacgaggttcttcatcgctccaaaaaatctgtttgtggcggttcgattgaagaaatatatctgtggcggaagatattgagaaaagtgattttaacgagcgcagtcattgggaggaattaaattttgtcttctctatcaaataagagaaaagtgttattaacgaagtgacgcatctgaacaaattgtgaaatttattagcgaagagagctgcccaagtgtcttgcaccaaggttctcgttctttagaacgaggttcttccaaaaccatctagctgagcgtagcgaacgaatatggttttgcaagtgagtgagcttttagaaatttccaatttgagaagcctaagtcacgagtaatacacttttcgattaacaagacaaacttcatacacaagcaagcgagagatgcacttttcgatgtatgactcccatgttcaaaataaaaattcaagatatagcaaagcaagtacatattgtgcttgcttttttctttgcttgcgtactatatagtgggaggctaggtgcatattgagaaaaatatttcacgagcgcagcattcggagaaaactgtctttagtgagaaaagatatgttccaaaagcagcgcctttcttaatcaatataaatacgaagcattttagtgagaaaattgttattcacgagcgcagcattcggagaaaactgttttaatttcttggcgcaacgaaccgcccaagtgtcttgcaccaaggttctcgttcttaagaacgaggttcttctgggctcatctagctgagcgcagcgaacggatatgagaccacaggtgagtaagcttagaaattatcagttttcgtagaccagcaagcgaaggaaagccgtaagtttaatcaaatcgacgttcactaacgttccgtctctttgtaaactctggcataaggcatgcatagccaatcaaacttcgtttcactcgttctcttggtgcatggacttaacaatttttgatgtgcaaaattcgctaaattttacatattttacaaactctttacaattcaaacacacactcttaacactcccccattataatcaacttgtaaaaatcatttaaaggagtgttatttaaaatgacaaaaaaattaatttcattaatgctagtacttgtattagctctatcactagtagcttgctctaagggcgaggataaaccagaggaaacagctactgaaacaaaaacagaagaaaaaactgaagaaaaagcacctgaagcttctaacgaacctatcactgtaatatcaagagaagacggttctggtactagaggagccttcatcgaaatcactggcatagaagaaaaagacggcgaccaaaaggttgacaaaacaactattgacgctgttgttcaaaaatctactaacgctgtgctaatgactgttaacggcgacaaaaatgccatcggctacatctctttaggctctttaaacgatagcgttaaggctgtcaaggttgaaggcgtagaagcaagcgctgaaaacgttctaaacgcttcatataagattgcaagaccattcaacattgtttacaaaggcgagctaaacggacttaagaaggacttccttgactttatgatgtctaaggaaggtcaagaaatggttcttgaaaacaaatacgtgcaagttgacactgcagcagctgaatacaaacaaaattctcaaagtggtaagcttgttataggcggctcaacttctgttactcctcttatggaaaagtttgctgaaaaatacatggagatgtacccagaagttaagattgaaatacaagcaactggctcatctgctggtatacaagctgctatacaaggcgcagctgacctaggtatggcttcaagagacctatctgacgaggaaaaagcagaattaacaaatgtagttatcgcaaaagatggtatcgctgttatagttcataatgacaacgcagtagaagacttgacacttgatcaaatcaaagccatcttcgtaggagatatcaaaacttggggcgacattaaataattaaaataaattagtactacacgaggagggccctagcgccctccataattatataaggagtaattatgaataaaaactttaaagagactttcatgaagtatttcttcttcatcatctctcttatctcagtctttgctctttttttgatatgctacttcattttttcaagaggcataccttttgtaaaagagtacggacttaaagcatttttatttggcaaaacttgggcgcctagaaacgttcctgcctcttatggcatagtgtccatggtcgtaggatctgtatatacaacacttggcgcgataattataggtctacctataggccttttaacagccatttacatggcattttacgccaataaaaatatatacaaaatacttgaacccgctgttcagctcatggcaggcataccttcaattgtatatggtttcttcgctctagtagttatggtgccacttataagaagtgcatttggcggcgacggcatgaatataataacggcttccctacttttaggaataatgatacttccaacgataatatcgatttgcgattcatcattaagagccgtccccaaatccttctatcaaggttcggtagctttaggcgcaagcaaggaaatcagcatatttaaagtagtggtgcccgctgcaaagagcggcatcatctcatctttcatcttaggtataggtagagccatcggcgagactatggcagtttacttagttgcaggcaatcagccaagaataccaacccatcttacacaaggcgttagaaccttaacaacaaacatcgttatagagatggcatacgcgacgccaaagcatttgcaagcgcttatcgcgacagccatggttctatttatctttattttgataattaatactattttctactttataaaaggaagtgagaagaattatgagtaaatttttaaaaatcttgattaagaccgctgcctactttacattaggggtgcttatcttcataatcctctacatttctatcaatggcataccaaacttaaggctgtcactttttgcgtttaagtacacaacagaaaacgtatcaatgctgccaagcctcatcactacgctaatggtagtcgttttgactcttgtggccgccgtgcccataggagtcgcgagcgccatctacctaagtgaatacgcgaataaaggctctaaagtcgttagactaattaggcttggaacagagtcactagcagggataccctccatcatctacggactttttggcctgatccttttcgtttatcaactacaaatgcaatacagtgtggctgcttgcgtgttaaccgccatcattatggttttgccaattataatcagaacatctgaagaggcgcttcttagtgtgcctgactcgtttagaaaggcatcttatggtttaggcgcaggaaagctctcgaccatatttaaagtagttttgcctccagccatgaacggaattttggctgggataatacttgcgataggaaggatagtcggcgaaacagccgcatttatctacactctaggtaacactactggcctaccgactgccttaaatcaatccggcaggacactggccctccacatgtactctttgagcgaagaaggttttcacgttgaagaaagttttgcgactgccttcatattactgatagtggtcgtcatcattaacatgctatcaacaaaattatcaagaaaggttatgagtaaataatgaataaaattgaagttaaaaacgttgacctcttttatggtgattttcaggctttaaaagacgtgtcaataacaatgcccgagaacaagataacggccttcattggtccatctggctgcggtaagtcaactatgctaaagagtttaaatcgcatgaacgaccttgtagatggcgttaagattactggcgagatcactttagatggcgaagacatctacgcgccaaaggtagatgtgaacgagcttcgcaagaggatcggcatggtttttcagcagccaaaccccttcagcatgtctatctatgataacattgcttatggtcctcgtgtgcacgggataaaaaagaaaaaagaccttgacatcatcgtagagaggtcgctacgtggcgctgctctttgggacgaagtaaaggataaattaaagagaaatgcgcttcaaatatctggagggcagcaacaaagactatgtatagcaagggcgctagctgttgagccagaagttttacttatggacgagccaacatcggcccttgacccaatatctacatctaagattgaagaattatgcgactcacttaaggaccattacaccatagtcatagtgacacacaacatgcagcaagctgctcgtatatcggacttttgctctttcttttttgaaggagaaataatcgaatcggatcaaacgagcaccattttccaaaatccaaaaaataaaaaaactgaagactacattactggtcgtttcggttaaaaaaggggtataatcatggtaagaacaagatacattaacgagttagaaaatttaaaaaacgaaatcattttatatagtgctacagttgaaaaaatgctgatggatatgaaggtcatcatcgaagaggcgccagatagctctgatttagcggataagctaagtgtgctcgaagcaaaagatgaagaaatacgcggctttagtagagatatcgaaacgctttgccttaagattatgtcgacgcagcaacccgttgcaaaggatttaaggtttgtctcgtcaactttgaatatcattagaaatattgaaaagattggcggccacgtgattgaggtcgctggccttttaaaattcacaaatgcactcgaagacttcactgaagagattttggatatgtgcctatcaactaagaaaatgcttaagagcgcgattgatgcctttatcactggcgacttggaagagagctacaaggtcatcgcctctgatgacaagattgacgacttgttcagtcacattatgaatgaagtcgccactaagattagcgagaaaaaagagggcgctctaaggctcatagacataattcaagtagcgaagtacttcgaaaggattggcgacaacgcagaggctatcgcggactggagcgttttttcaatcacagcaaagcactatgagtaggaggaactatgatttatatagttgaagacgacagaagcattagagaattagttctatatgctctgcacaatgaaaattacaaggctgaaggctttgagaatagcgatgaattatttctcgcgcttaaaaaagagacgccaacacttataatgctcgacatcatgctgcctggtatgagcggccttgaaatacttgataaaatgaaaaaagatgctgcactaaagaatatccctgtgataatgctaacagcaaaaacaagtgagtttgataagattacaggccttgatagaggtgccgatgactacatcacaaagccatttagcgtcttggagctcttggcaagagttagagccctacttagacgcagcaaagtaagtgaaggcgaggtccttgagtacgcaggcataactcttgactacgaaaaaagaatcgcaaaagtcgatggacgcgaaatttctctaacatataaagaattcgagctactctactttttactatcaaacccaaacatcgttttgactagagatagacttatagaaaagatttggggctacgattttgaaggagaaacaagaaccgttgacgttcacatcgcctcaattagatccaagattgagccatatcaaggcataatcaagactatcagaagccttggctacaaagttggtgatgctaaatgaagaaaaaattaaatatcacctacgccatctgcttttttctagcgatattaataagcgtttcattcacagtttttttaatctacaaaaatactagcgcaaacgagctaagagatttgcaagatgaattgaaatttgcctcgagcatagatttggacgcacttgaaaatattggcacatttaaaaataatatccgtgtgacagtagtggaccctgatggaagggtcatctatgacaattttacagatccaaaaaatatggagagccatgcgggtagaaaagagattaaagaagcacttgctggcaaagttggcaaggacgtaaggctatcaaatacgcttggtaaagacacttactactacgcacagcttatgcaagatggaaacgtagtaagaatttcaaagcaaacagagtccatactctcgcagtttatgaagacagtgccactaattctacttatgtcaatcatcttgattatggtcttagtcatagtaaataaaaaacttgtcgataaactacttaagcccatcgactatgcgtcagagcaccttcatagagatgattttagtacccaaaagcttgatgtttacgacgagctaagtccattcataagaactatagagagaaaaaataaagatatcaaagactatatcgaaaggcttgaaactaaggaagcaacagtaagtgagatacttcgtaacatgaacgaagggctagttttaattgatccagagctaaaagttcttcagttaaacgaggcggcgaagaggctatttaaggccaatatgcaaagtaattacatcgatatggatgtcgtgagacttacaagaagtcaagaagtttcggataaattaaatactttaagagaaacgcataaagcttcaagcttcgagcttatgtccgatgaagacagcctaaaaatttacctttcgcctattgagagcggtagcacacttacaggtatcatcatgcttgtacttgatgtgaatgacgagaagaaggcagaaaggcttagacgcgaattttctgcgaacgtttcacacgagctaaagagtccactcacatcgatatcgggctacgcagagctaattaagaatggcatggtgaaggacgaagacatcaaaaaattctccggcatcatctttgacgaagcaggtcaaatgctaaggcttattgaaaacatcatattgatatcgaagcttgacgaaaaaccacagctcaaatgcgaagaagaagtttcgattaaagagtgcatagatggcatactaaagctgtataaaggaaaaattgatgcgaaaaatttatcgctcgagtgccatattgaagaaggacttacgaaaaaagtgccgcttggcatgctttcagagctttacaggaatttgatatcaaacgcaatcaagtacaataaagatggcggcaaaatcaccataacagtagaaagacgcgccgataatatcataagcaaaattacagacaccggcataggcatcgcgcaagaagaagttcctcgtatattcgaacgcttctacatggttgacaaaggaagaaacagaaacacaaactcaacaggtttgggactcgccatagttaagcatatagttgaagatatgggtgggactatagatgtggctagcgaaatgggaaaaggaactactatgaaggtgatctttagtaaatagtgtaaatttgctctgcgaacttagttttgagacgactcaggtgaataaacgttttacaaataaatacgtatatatacacaaaagacgcatatcatttaggtatgcgtctttctatcttgatattctattattttaattatctaataacattgtactgaaacttcttttgttgaattcttaaataatcagtaacgatattaaatgtaagattatccattacaacagtattcgccttataatatctattatctgtaagcaatgtgttgcttgcgcatagtatgtcttcatatagaggcatgcttggattgatatccttgtaagttaatagtgtgtttacgcttctctttagatataccttatcaagcactcttctgaaggctctattagatacataagcaacttcttgtcttgtgataggcttgtcagcatcaaacttcgctgtaccatcttggtaaacgcctagccagccagcttcataagccgcttcgacttcagctgttgcccagtgaccatttcttagcatcatagtattgccacttgcctctttaatgtcttggaaccttctaagtgttgcaacccactcagctctagtgatcttaccttctggtttaaaagtaccatcgctatatccttggaatacacccgcttgagttacgactctgattgcgtctgtgtaccaaacgtttccaacgtcactgtagcttagagcgtagtttgcatcgtatctgtagccgtcagcctttagagcgttggctaagatttgtgccgcttcgcatcttcttaagccatcgtatggtctgaacttgccgttaaagccttgcatgtatctgatttctttttgcatttcatcattttcgccaactttgacaatcttttcaacaatcttttctttttcgacaattttgtctctgtagataacttctggatatggtctgtatcctggttcaccgcctggcttaccaggtgaagaaacttgtttaactttagcagttactacgatatcgcgattgtttataacaattgcatctgctgtatcccaagtatcaaatgcatatcctgcagctgcattaacatttggtttttttaatgctgcaagtgttaaatctaatccgcttgtattttttgcgcccttcttaataaagaaagccttagactttgctagttttaatccagcttccgcctcgaatctaactaagacgtaaccctctggtctagcagttggatcgtttggatcgtattcgataatatcttcagcgccagtataatttgctttgataattgtttcttctttaaattgatgtctttttgctaatgtatatggaacatcaatatcatgtccattagcatcttttcctggaatagtccaattaataaatctgtatccattaattgctgttggatctgatccaggtattacaacttgtgcatcaggatttacatagaagtaagttttttgtgggtctttagcctttgtagtaggatctactgttacttttttgtatccgtctggcacataaataggcttgccttctttagtttttgcttcgtaaatgtttttaactaccttgataggtatgtctacatcttgaacttcaccgtttgcaaatgttactttagccttaattttttctattctagatacttcagtttcatctttttcttttagcttatcataaagttctgttgctaaatctgcataagcgtttccatttgcatctttgcctaaaataaatgctactgtagcatcagttggcacattttgttcatttccactagcatccttaactttgattgcttttttcaaagtaacttcacttggaataaagttatttatccaagtgttgccatctttaaatgattcagcaactgtcaatccttcagtcgaaacattaccttgatctattgtaactttttcatattgtgcagttatagttgtttctacagggaatttatcttctataccatcagctaccacattttcactccaagttcttggaccattttcattcgatttccatttagtgaatttccatgaatactctttaggattgcttgcatcaactggaacatctttacctgctggtttagtaactggtagcttaacttttttattaggatttacatagaaaatttgttcttctttttctgctggatttgtagaaagtttagccttatcagtctttttagtagttacttttacatagtcatctggtgtttccgctggtttatttccacttgcatctgctgtaagcacgtcatctacataagttgctgtgataattgttccattgatatcagtgaatttcttaggagtgcttgacttgtagacatcgcttcctagcttccactccttaaacgtcttagtgcctgcgcctactggatctgcaatttggaatgtaacttccttagttggattaacccaatagattttatctgtcgtgtcagtagcctcgtttgttggcttgaatgtaaccttaacaaagttacttggaactgtattcggcttattgtttggatcagtttgctcgattacatctgtagtgtactcagctgttattgttgtttctacattaaattgatatctttcattatcagtttgagctaatttatattctgtattgccattagcccacttaacgaaggtatttgtgcccactcctactggattgtctttagtaataagaacgtttgccgctggatttacatagtagtaagtcttttgtgggtctttagcgtttgttgttgggtctaggattacttttacataatctgttggtacgtagtaaggcttttctgataaagtttttgcttcgtagatgtttttaataactttgataggtatttctactgtttgttcttcagctcctggcattgtgactttagctttaagtttttctgttctagatggtttattgccatcatctttttcttttagcttatcatatagataattctttaattgatctccgcttatggcagcatcattattatctaaaaacttaatcgtagtacctgtaggtaagtcttttagttgaccattgtcatctgtcactttaagtgctttttttagaacgtcttcacttgcttcgtcaataaatttattaacccactcagttgcattctttttaagtgactcgtgaactgtaatttcatttgccacaaccgttcctttgtctattataacttttttatactctgcgtttatttctgtatctatcttgaatatagctgtgatacctgtgtcaatatttgtatcccaagttcttgtagctgtttcagtagaaatccactttgtgaattgccacttatatgccttttcagttccagcagcagctacttctttacctactggcttagcaattggaattgttacttcaacacttggtttaacccagaatattttatctacattttctgcagctttgtctgtcggtttaaatgttaccttaacaaaatcgtttggtacattggcaggtttatcaattcctgtttgaggaattacattttttccttgatatttatattgagcaacgtgagttgtattttgtgaatatgctgtagcaatctctggtgaccaagcatctttgcctcccttttgttcaaagcctttagctatgtcaggagttactgttggagcagtaagtgttacttcagtattctttagtacccagtacactgcttgaccagttatagtgccgtgatcgcctttagtaaattctacttttacataatttatagtatcacttggatcagatgttaaaacatcttttagatatttagctgtaacttcttttgcttccttaataactgtatcttcagctaaatcccagccaacatgtttccaatgatcatctgctgttacttttggatgtcttatatcagaaagttttttattcgcatctggatttacccaataaactgtagtgccgtcaagtgtaccattagtaccctctttaaactcaaccttaacatatccaggttttttaactgttagaatatcatcaagcttattgtactcggctttgattgttgtttttttcttaaatgtagctgtaagatatttatcccatgcgttaaagtctggtttttgttcgtagccttgatttgctgttacgcttggtgctgttaatgttacttctttatttggattaacccagtatttaaccgtttgatttgcatctattgttccatcgtttcctgcaacaaattcaacaagtacaaaattagctggtactgtagcaggtttagatccatctgaatttggagctataacatcatcaccattgtaatagtattgagcaacgtgttctgtatttgcagaatattttgtagcttgttttggtgaccaagcctcgtcgcctgttatttgtgcgtagcctgtcgctggtgttactcttggtgctgttaatgatacttcagcattctttagtacccagtactttgctgtatctccagctttgattttaccgtgagcgcctttagtaaattcaactgttacatatttatcagcatcaactgttggcgctgtttttaaaacattttctaaatacttagcagtaactactaatggatttgctgtttgctcgttaattgctgtagtatcagcaacgtcccaaccattgtggctccaacctgtacttggacttacatttggatgagttacatccttaagagttttattctttagtggatttacccaataagtttgtgttccgtcaagatggccattattaccagccttaaactctacctttacatagccaggtttttcttctgttaatatatcgccaagctctttgtactgagctgtaatttttgttgcttctgtaaatgtttttgttaaaggtttgtcccaagcgttaagtcttaactgttgcctataacctatgttaggttttatttctggagcagtaagagttacctctttattaggattaacccaatacataatagtttgattttgagcgaactcaccatggtcgcccttatcaaatgttacaagtacatagccctgtggcacagttggtttaacattaggatctgtttgtggaattacatcttcaccattgaatttatattgagctgtgtgaactgtgtcttcgtagtagtacttagcaacttttggtgaccaggcatcattgcctgttttttgtgcgtagccagtatttgctgtaacatttggttcagttaaattaacttcttcttgttttagaacccaatattgagttttttcagtattcgcaatagttccgtgcttgccttgattgaactcaacttttacatatttatctttattttctgttggctctttcgttaaaactttttctaaatactgagctgttacttctgttttttctgtaatagctgtgctcttatctttatcccagccattttccttccatccatcatttgcttttatagttggatgaatgatatcagaaagtgttatccctgcgtttggtttaacccaatactttgttgtcccatcaagtgtaccgtttgttccaaccttaaattcaaccagtacaaagttatccggtacatttggtttagcatttcctgtttgagtgacaatatttgaaacatattgcgcttcaattgtagttttattagcagtaaattgatgtcttggtttctttgcaagctcatatacatctgtcccaatagtccatttctcaaaagtattattagcatttcctgttggatctgctcctggaataacaactttagcagccggatttacatagtaataagttttttgagggtcagtagcctttgtagtaggatctacgattacttttacataatcacttggtacgtagtaaggcttttcagttaaagtttttgcttcgtaaatgtttttaactaccttgataggtatatctactgtttttgttttattattggcaaatgtaatttttgccgtaactttttctgttcttgttggttcgtctttagtattatctttttcttgtaactttccataaagataattctttaatgcatcgccatcagctgtatattcatttgctccatccactattgcaaaggtgtcactatttgctagtggttttaggtctccatttgcatctttaatctttacttgtccctttaattggtcaagtgtcggaataaagtcattaacccaattatctccatctttaaatgattcttttacttcaagctcttcttcttgtatatcgttattgtcccaaatagcgtagaaagtctttgcttctgtgatgtttttaaaagcatcatcagtgactggagtaattgttccttgattatcttttttgccccagcccttaaaagtttctagatcttttttaggctcttcagccttgtcagttaaagtgccatcatattcaacttcttttacaatttttatttcagtatcaggagctgtaaaattagcgaatttaccaccattcgcatcaaatgtcactgggataatctcagtcatagtaagctttccgccgtttatgacgtcgtatttgaagtcgtatttgaacttatggtctcctgatgtaacagtcttatttgtagtatcaaaagttaaacctgttgtatcagcttttactttaatatctgtaggcttattatataaaaagcttacaaaaatcttatctggttttctaccttctcttaaactgttagttcttagtataacagatttagtatcattctttggcaaatcaaagattgcagtttttgtattactaccactagaacctgtcatagttccttgtagttgtggtctttcgccctctactactgctgtgcgccactctgatacaaattttgatgaagcaacttgttgtagtcctatctctaaagttaagtgatatttaattctgccctctgcatccggtttttcaaatgtgggtgaaccagcatttcctgttgtagttaaccttgcagtaagcagtttaaccttgtcagaaacttcctcatctagttttacttcataagttagaggctctagtttattattaaataaaggtagttctgctggattcccctctccatcagtccaagtatatgtgcctgcttgatttacatttaaaacacgctctacacctgtctcaacaccagtctcgtcattcatttgtataaatcttaagtgtacctcttcagtaccgaagatttcattccactggaatggatttccaccaagacctgtaactttaagatcggccttaacttcaccgtggtactttagcttgtccccgttctttggctcttggccttcttcgaagtagccgaacaggcttgcacctgggtctgcggatcttctcactctattttttgctgtcaatctgtttaactctaacataagctttgcgtcgtagctgtcgccattgatcacgcctacagttactaagccgtcctcaggagctttcacctcctcttttgcaaatattgcttgtggtgcaatgatttgtaaaaacattgctatcgctagtatcaaagaagctaatcttttagtcatttactttcacctttcctctacttttatttgcgctctcttctttatagagcaaaaccttagtttcatttcttcttattttattgcctaaattattaggctcgttcatatcccttaaaatatctttacgcatatagcttaaatatatatgctctttctcacaatgtcctcttgcttttatcttaatgccgttttctgccgtgagcacaaatctcgaaagcagtgtcattaagagcgtcactgcgaggactaaaagcacagtccctttaattgtaatctccttcatatatatcccctcgatttaattatatacatagcgcattttgcatgcacttctcttcatattattataccacaaaatgccgtcattttaaataatttatgtaaatttaacacgttggtaacaatattttacaaaagttatcattttatataaatattttttaaaaaataataaaaaaatattattgcacacaaaaaagatgccaagcatatagcttagcatctctaaaatcttttgtattaaattatttaattctgtactctcttgtatcggatcttactccattcaattctgcgtatactttaattctgtctctgttcttaagtttgccacctaattcatccggtattataaagtagtacatcttgtaatcagaatcatatattgctttaattgttgtagtcttatttgatctactaacttcaagatatcctattgcaccctcagtcatagattcaacactaacatctggatctccagcacttggaagtattatggtgattgttggttttactttagctccatcgccgatatctgtatcatcactaaatttccactcattgttaagctctgttaagtcccaacctctaaatacatagtcattttttacaccattgccaagttctagtctacgaacaagtggcgtaggaatgttaaccacttcatctttctttacatagaacttagtatcgcctagcataaaggctttattaggatcaactttaaatgttactagcaccatgtcatctggtttttcgttttgaatttgtgtttcgtctgttacgctaggatctactggaataacatctgcttttggttcgtattgagctgtgaatgtgatatcattgccgcctagttctagtgcttgatcccagccattattagcatcttttgccttgtagtattttgctggaactatttctggtactattagaccttttgcttgattaaggcttaaacctttggcaactttataaattactttttcaattccatcagtttgtccttctttaagtgttccgtggtcaccttttaagaaagttactctgatgaatttttctgtatcaataaggtcgtcttcgttaatctcttgtactgcgtttgtccactgagcaaatagaactaagtctttaattatagatttgtttttaaaatcaaataatggatctgtttcacttgcgtttttcgtttctttccatccagtgaatacgaaattatctttcttaggatcagtggcaggttttgttgctgtctttccgtgttcaactaattgtgtatctggtgcttttgatccaccgtttgtgtcaaactctactttgtgtgtattagccttccactgagctgttgcttttttgtccttgtcaagcgttatttctgctcccgcttggtagattgtttcgtcgttatcaagtttccagccagcgaatgtagcattttcttttgttagtccatctgcgttagctaatctaacttttgtgccaacttttacttttgttgcttctggtacatcgcctgtaacatctgttccgcctttttcgtaagttaattttacttttccgtcttcgaagatggctacgtgtgttctatcgcttgtgattggagttgcctcgtcgataggctcttgccaaacgttattaaatgtgtagtttgcatttactacaacttttggaactgcaagttgtttatctgttgctgtttcgtttttgcctaaaacttttaaagtaatttctgcatttggatctacatagtagattttttctgtaacattgccttcaagtttacccttgttttcatcttctgttctgaatgttacttttacgtagccttttggaataacttggtttggatcgttggttttttctactatattagcattctttgtgaaattaaaagtaaattctgtatctgttttaaatgtatcttttaatttcttagtttcgctagtatcccaattaccaccaatatatccaacatctggagttttttcaatgccattagcatatgatgttaaatcaagttctacttctggtgaaacatagtaaacaaattcatttgtaagtgtgtttttgaattttccgcctgtgccaggtttgaaagttatttttacataattttccatagctttttcaggtttttctccatttggtccagctgggatgattggttcgtgtacttcaactggtattacgattggatgttcatttgagccttctgttgaaccgtctttgtatttaacgataacttttgctgatgtatcgccaactgtattgccatctggttttgaaataacttctattgattcaatttctttgcctgctggtggtgtgatcttgccttttaagtccttaggagtaatttctttaccctttggtgtatctaatttacttatagtgctcttgtctattagtggagtagaatcaatttcttcctcataaatagcctcaactactgatactttagctgagtacttgttctttgctaggtcgatagtttcttttggatcaagatctgttaaactattatcatcttcgccagtttttactatttgccatcctttatatatatagttaacttttctcttgcctaaagagcttccttcgccatctgttaattcaatttcttgatttactttacctgttggatttgttacttctatagtaacttccttagtagggttaacccagaatgttttttcaaacttagtttcatctgtagccttatctgttgtcttaactacaaccttgacataagtctttggtacatctggtttattgtttggatctgtttgttcaactgcatcttttgcgtcaactggtttgatgacagtatcttctgtaaacatatgacgtttagcgaaatcaaatttgccattttctttaccatcttcattttgactttttttgtcagctgtccaattaataaatgttgatgaaccttcggacttaacttctggtatttctacccaagcttttggattgacataataaaccttattatttttagccttcatatcgccagatggtgatactgttacttttacataggcttttgtagctgtatcttttagaatatctttcaatccaccatcttttgcgtctttcgcttctgcatcggatagatatttaggtttttgccactctctattaagtgcttcgtagcggttcttgtaaactgtgattggtatattaagttcttgcttagcacttgcaatatcgccttttttgctagtaatcttagcttcttgttcttgaatcttatctttatcttgtgggtttgcagttttaagtgtttttagttcagcctcaagaacctttaattcttcttcaagattctttatttctgcttctgtcttgaataaagccttagcaatgatatttacagtacgaactgtttctgtagcatcgtctttacccatttctttaacaagttcgaatatatcttcatcttttgttatttctgtttcagtaccatcagcatttttgttaaagaatttaatttttacattagctggaattggtttaactacctctttttttgttccattttcttcaacaatttctttccatactaattgtgcttttaagtcgtcaatagttggagcaaatttattggaccaatcctttgttccatctgccttaggatctttaaaggcttctgttcttactaggccttctgccttagcacttagtcctgaccaatcaaagtaggctgtgaatgtgtagtttttgttaatttctgtttcagcgttcaaccacttttcattgtcccacttaataaatttcttgccttggtctggtgtgatatagtatctgttttcttcttttgctaatggtttaccttcagaatccttcttaccttcttcccaaataactggatgtggtagcttatctgacttaagtcccttgattacatcgtaatgtaattctgtaacttctttgccgtccttgtccttaaatacgccgcctttatgcttgtcgtcaatcttaaatgttactcttacataaccttctggtgtcttaccatcttttggaacttcgattactcttgcgtctttataatagaagtaaatttcatcagagcctgtgccgttgatgccaaggaactcgtttgtatcctcgtttacatcgtagaatagttgttgttgcggagcgctaacaagcttccagccaggtatatgtctgtagtttcttgcgtcgtagtgacggcatgcgcttgtaacttcttccttgtcaataaccttgtacttatctagaatttcttctaattttgctctattagcttcaaattttgctttgtttgctttatttgcttctagtaagatagcttcttttcctttattgtctgctttattatattcttcgctagccataagtgcatcaatgtctgttagatccaagcccttgaagaacgcatctacttccgcctttcctctttcatctatatagttaactttgtagttacgtgttctgaatggtctgtaatagaatctgaatacgttttcagggtttggttcataaacaggattatcttcagtgcctacgttaatattgtcttgaactctgaaagtttggaagtatgtgttatttagtttaacgcggttgttgtaagcttcgtattctggttttaattcaacatcagtaccattttccttataagtgccagaaagtttttccataagctcatcgttattagccaatatccagtgttcgtcttgcttttctcctgttgctggaacatagtcgtctacacgcttgtaagatagactgttaggttctgggtttggatacttctcatcatctaggacgaaattgttatttgaatccctctttaggtagtagtggtaaacttttacctctgctctcttgttttcaacccaaattgcctttagatagattggagcaactacatctgttccgaaggaataaagctctggaaccttatatctagtacggtagcctgtatcttgcttgtcagtataattattattttgatctttttcgtaataaattacttcccagcccaaaaagtcataaccgtagcgagtaggaggtgttttaggtactttaagcttttgtccatgagcaacggtaaagacttgaaggttcttagctttttctgcgtcagatattattttattgtcttcaggtgatttttctagatcataatatccttttacagggtattcattttcttcttctttaccaatgtcgccttcttttatttttttcttctcagttgtaagatcatttagttcaatatcatcaagtttgccgccatttggatcaaatgtaacctttcttcttttatctggaatgtcccatatagcataaaggtttgttgggtggaaaggcatggtttcttttggattcttccaaaccatctttttcccagcagggtctagtgcccagcccttaaataccttgtcacttgcaagaccttctggtctctttaccacatagttgttctttgagtctttggcaaattcattaggattagttttatctctttgtagtaagtcatataggcctagtttgtataaattatttgggttatctaaaaagttttctggcttatctttaaaatactctctgtcgtctctctctaagtcatcttgaactaagtctggacttagaacctttagtgggaattcgtagaaagtttctagtgcattggccttcttgttttgctcttctgttcctcctttaacaggatacttaaactcactatcgcccttaatctttgttgggtcgtagttaaatcttagtgggtacttattacgtttgtaatggaattgtagatatccgttttctccaaatgattgaccaccttcttttacatctccatattcatcggaatcgctaaaaaagactgatataaagtctagctgaccgataggtaatttgagcccaaagttgttatagtatgtcccacaattgttagtggtgatttcatcacgttcgtcgtttagttccccaattctatcttcgttcacgcggccatcttcctgctgatcctctctgattaccggccatgcaactccaggtttatagtccctaggtgtaaagcctgtaactgtcgggtatttgtggccatagcccgggtcacctgtatctgccttggttctaacaaggtcgtaacgtatgatggtttcgccgtccttaaagccgtccatccaaaagtccatgtggtgagggatagatggatgatcctgctttataccgaaggaaagggttgtaaaatcgaatctatctaaatccttggttgtgccgtcgcccttgtctatatgtttaacatagccgccccagctagtatagttcgccatgtcaaggaactgatcagcatcaagtctataaggtggagtgtctaaatgcactggccagttaggtgtttcatagtttggtccccagccaaaagattgatagcccggtgtaaagccttttgtttgcttggcatcgtttggccacttatacatcatctcattaaatctagccttgtagtggtagagattgccaggaccacctagcattaccgcctttcccttttgcgggtcatagccccaaatttctgggtataaagtatttttttcaggttgtacattggacttagtaaagtataggtcgtagacttgtctgtcgtagtagatgttgtagacagtcttgcctgtggctgaaactgccttggtcatcgttggtttgttagggtctttgttttgctctttagttaagtctttattataaacaaagaatttgtttagataaagattatggccacgattgaatttttcgcctttccaaatcttttgtagacgagttttatctaggtctgggaatgggagacctggtaaagtttttttgactccattttcttgaacctctaccggtcctacgctctccttatctaattctggtcttttgcctgtaagctcttgagggtaaacacgagtgctcatatactcgtatttttcaaaaatagtagcattatcggcatggtcagccttttctgtccagaattggatggcgtagtctgccttgtccttgtccttccaaacagctgtgaaagttagcttttctcttggtatttccttgccattgccaagtttaagagcaggcatcataagttttatttcttcttgaagttcttcttttacaggatcgtcattttttttaacgaggttaccgtttccatcttttttataataaattttgcctaagtcaactatggcattacctttggcatctttaatgatttcgccttttttatattttgttccatcatccccatacaagtcatgagatggcttccagccttggaattcacatccttcctttgtagggatgctgttttcatctatcttaggaatctcttgatcgtagtaataagttctagctggtagaggagtgccgtcttgagtgtcaaaaacaacatcgtagtgagcacggttgtagcgatactcaatcttgaaatcagtagtgtcctctggcacttgagtttttagtttctcaacttgtggcacaaagcccggtctttcattttcttgtagagcttgaacctccaaagtagaaccagtgttacctgttaaaattttcagattctcatgatcacgtacaaactcttgatattttgccttttgatcaggatcctttaaatcatattttgtttcgtgtccctctttatctataactgttccgtcattctttgtgatggtaccgtctttgttagtaaacttgttgaaatcttccatatcttggaaaacgtgtttaacagtgatattgctagttgtagctgcgtatctaaattctctaagttcaagatatttatcaccattgtcagattttttttgaccattctttgctgcttttacaatggcatcataagagttcttaaaaacttgtattgtcttagaatcctcggttatttcttcttctcccttaggagtcttataacccgccatgtctggaagtttgattttcttattaaccttggcttgttcatctggtgtcgcatttgcgccaacacttgcaacgtatggctgatagttaacgctgtatttttcgcccttttcagccttgaagtcagtacgcaaagtgtatatagctggcaaatctggttcctctaagtatttctttgcagttgtgccatcttccggcctaactatcaaggttggcgttagattgttgacatagttcgccttatcgcttgcgatgtcattgtgatcaaccctcaccgtcctttctttttccgccaataagtttataggcatagctgtcgtgatcatcataacagctagtactaatgtaagtagtcttttaaatcttatgttcttcatacttaatccccctctatgtatgatatatatattattcgattatatgcatagataatcactgtcattataccacaaaattgcgcgttttacaaaaaatttaacaaaaaaattgcatttttagcaaaattttacaaattttcttgtctaagtagaactgaaagagcatagttattagacatatacttactactttgctaggtagtaggtcgttgggtatatagtaggccgttgggtatatagtagctcgtttgctatgtgctagttcgttgggtgtgtagttggtcatgaggtatgtagtgagaaaagtgcttttcacgagcgtagccttcggaataaattgcattaatttcttagcgaagcgaactgaccgtgggctcatctagctgagcgtagcgaacggatatgagaccacaagtgaacaagcttagaaattaacaatttatgtagacgcagcaagcgagagaatgcacttttcgagttctaatataatttatctagacaagaagcaaagtaaaacactttttgatgtgcaagttctaatataaaaaaagactatatgaattttaactcatatagtctttatctttgctttatttgtttttatttataatttctaggtatttcttggagcaaagtgatatacaacttctttcttagataaaatgagatgattacgcgaagtggaccgacgaggcaagcggagtgtacaaatgtactcgagcattgccgagaagggaacgagcgtaagggcgcgttttatcaagaaagtctatttttcgaccatgtcagccgccttatacgaactcctaacaaatggtcccgcagctatcttcttaatgcctatgctcttggcgtagtcttcgtattcaaagaactcatctgggtggacgtatctcttgacttcatagtgtttcaaacttggtcttaaatattgtcctatggttatataatcacagcctgcttcgtaaagttctttgattaaatctaaaacttcttcttttgtctctcctagtcctaccatgaagccactctttgtctttagtcccttttcttttgcgtacttaatgacttcgatggagtttttaaagtttccttctttacgcactactgggaatagtctctctatggtctctatgttgtggtttagtatgtctggcttctcgtccataactatgtctagtaagtctttcttcgcgtgcatttcggggatcagtacttcgactgttgtatcggggtttaattttctcacccatctgatgacgtctctaaactgagttgcgccctcgtcttctaggtcgtctctcgttactgaggtaataactgcatgccttagtccaagtatcttcactgccttcgccaaattttctggctcatgcgggtcgacctcttctggcctcttagtagtaacgttgcaatacctacagttacgcgtgcagttctcgccaagtatcataaatgtcgctgttctcgacttgtagcactccatcttgtttgggcagttcgcctctttacaaacggtgttgagctttaaatcctttagcatgtgctcgatctcgtcgttgttcttattgcctgtaacttttatccttagccaatccggctttcttatataatttctctcttgcatttaatcacctgatttcgtctttaatatattcaaggctaattcttccttcgtaagtccttcgatgtactcactcatatttatggacttcatggcatccataagcgcatccttgtcaaggctcttgcctatgaagaggctctctagctcctctttcgccttctcgccgaagtagtcgccatctagtctaatgtcttcgatgagattatccttttctttcaaatatatatccatcacgcaagattcgttcataaatgagtgcaccttatcaaacttgccgtagcgagcgtatgtccactcgtcatttgcgtatttattttttcttatctcttcgacttttttaagctcttcttcacttaaaacatattcttcgtctatgtgataatattttctgatgtaggctttaagctcttctatgaagctagctatgtccatattcatcattgacttaaggctagtgatacggcttttaacgcttgttaaggacttcttcgcaagctttagcttcgcaggtgttagtaaccttcctatgtccgtggagctgtcttggtatatgatgcttccgtggtgtatcatgagctctctgtccttgtactgtgcgttgcctgagattttcctgccatcaactatgatgtcgttacgacctgtaaactctgccttaacgcctttttcatttaggtagcgaacgactggctctgtaaattttcttaaggagtcctcttctttcttcgtgatgattgtgtactgcacgatgtttttatctgtatagatgcagccgccacctgagggtcttcttacaagctttgccccaatctcattcatatagtcccagttaacttccttgtatggattttggtttctgcctaagagtactgtgttgtcgttttgccatatcatgaatagctcttttttcacattttttattaaatactcttcaagagcgtggttgtacgcgccgtctgtcgatttattgtctatgaatatcaatagaagtcctccctcttcgcgtgttttttaatctctttaagtgccttcttctctatacgcgagacgctcatctgtgacaggccaagctcgcctgcgatctcaagctgtgtcttttgctcgaaaaatctctttctgactatctctttttcggttttggataggttcttcatcagtgcctcaagctgctcacggttctcaaagtctttgaagttttggtcgtcgtcgcctatgatgtcggatagtgccgtcttcttgtcatcagtaccaatctcgtagtctatggactgaggtgtatataccttacctgcatccatagcgatgagaacctcgtctgagtcgatgcctaagtagtccgcgatctccttaacggtaggcacctcaccattaaccatacttaaatggtgatacgcatccttgaccttcttcgtgttctcttgcactctgcgcggcaccttgatagtccagcccttgtctctgaagtagcgtttgatctcgccaagtattgtaggcgtagcaaagctagagaacttaaagccgcggctcggttcgtacctatccactgcaagtataagtcccaaggaagctatctgaaagatgtcgtcgtagtcgatacctttgccgacaaatttctttgcaagtatctcggctatatacaagttcttctcgataagttcgtctctaagcttttgatccttagtcttggcgtactcttcgaagagctcctgcatattgtccttcttctttgcctttgtcatggtcttgtccttatgatttcaatcctatcgtcctgtttaagcatagcttctgaaagagcgtttatgatgtcaaagttcatctcgaaggcttcatcatctgggaagcgctctaggtagatggtgatgatcatcgacttctccttaagcttgatatccatcttaagtctgtctttgttaatggcgtgcgcgatcagagccatctcaccaacggctgccttagtgtcttctatgtcgtcaaacttgtagttctcctctgccataaccttcattactagcatcctaaacatagataggtagttttctttgttttctatctcaagtgtaaataacattattcgtcacctagattaaatagtttgtcaaggtctgtgatcttgaagaccttcttgatgttcttcttaagattttttactgtgatagttttgtcctcatctcttgttagcttaagaagacttataaagcttcctagacctgttgagtcgatgtactcaagctttgagcagtcaacaactaagtccttgtcaagctcttcatatatatcagcaagtttttctttgaattttttgttattatatatgtcgaggtcacctattaattcaataaggtagtgatccccttcatcgattaagtttaaatcaaacatgtggccctcctattcttcaactgaggagacaaactttgatgcactcgcaaccttgtcgtccgcttgcttcataagtataactccttgtgtatttcttcctaactcgtttatgctgtcagagtcgatcctgattataacgccctttagtgagatgatcatgatctcgtcttcttcttcaacagattttgcgacaactatcggtccagtcttactagttaccttgtagcagatcatgcccttgccgtttcttgcttgtaccttaaattcgtcaaagcttgtcttcttgccgtaaccattctcagtgatcataagtaggcttgtgccctttcttgccacttcgatggatacgatgatgtcgtctttgttaagcttcatcgccttaacacccatcgctatccttgatgatggtcttgttgtcttctcatcaaacattaaaaacttaccttgctttgttacgcaaacgatgttttcctcgcctgatgttcttctaacgccaactaccttgtcttcatctctaaggttgattgccttaaggcctctctttctgatgtttttgaactcatcaaggctcactctcttgtatataccttcttgtgtaagcatagataagaagccgccttcttcatccttctttagtgggatgatggctgagatcttctcgtctttttcaagctgaacaaggtttactatagcaagtcctcttgcttgacgcgagctctctggtatctcataggctttgattgagtagattctacccttgtctgtgaagaataataagtcgtcatgtgtcgagactacatatatgtcttcaacaaagtcttcgtcacgtctttgcatgccttggactcccttgccgcctctcttttgcatcttgtatgcgccctctggcatacgcttgatgtagccaaagtgtgttagagtgataacaacgtcttcgtcctctatcatgtcaatggtatcaatctcgcctgggtctggcatgattcttgttcttcttaggtcttgatacttttcttttatatctataagctcgtctttgatgatgccgtagataagtctttctgagccaagtatctccttgtattgattaattaatttaattagttcaaggtattcttcttcaagcttgtctctttcaagacctgttagtctcttaagtctcatctccatgatggcatttgcttggatttctgatagcttgaacctagtcatcatttcattaacagcagtcttgtcatcctttgagcctctgattatctttatgatctcatcgatatggtcaagtgcagtgcgaagtccttcaactatatgcgctctcgcctcagccttagcaaggtcgaagcgtgttctacgagtgatgatctcgtattggtgcatgatgtagtactcgataagctccttaagtgtaagaacctttggctcgccacccacaagtgcaaggttgatgataccgaaggtattttgcatttgtgtgttcttatataaattgtttaggacaatgttggcgctttgatcacgctttatgtctataacaacacgtaaaccatctctgtcggactcgtctctgatgtctgagatgccttcgatctttttatctcttacaagctcggctatcttttgtataagttttgctttgtttacttggtatggaagctccttgattatgatcttctctctaccttttttctcttcgatttcgcaaagtgctctttgaactatgcggcctctaccagttctgtatgcttccttgatgccgtctttacccataatcagagctcctgtagggaagtccggtcccttgatgtacttcataagaccatcgacatctatgtctttgttatcaatgtaggcaacgcaagcgtcgattacttcctttaggttgtgtggcgccatgttagtcgccataccaacagcgatacccgatgaaccattaacaagaaggttaggaaagcgtgatggaagaactaccggctctttagttgtctcgtcgaagtttagcatgtagtcaacagtgtctttgttaatgtccctaagcatctccatggcaatctttgtcatctttacttcagtgtaacgcatcgcagcagcgccgtcaccatcgacactgccgaagttaccgtggccatcaactagtaagtatcttgtgttgaagtcttgcgcaagtctaaccatggcatcatatacagctgtatcgccgtgtgggtggtacttaccaagtacgtcaccgactactctggcagactttctgtactgaccttgcggtgtgatgccaagctcgttcatcgagtaaagtatccttctgtgaacaggttttaaaccgtctcttacatcaggaagcgctcttgaaactataacgctcatcgcgtagctcaagtagctattcttcatctcgtgctcgacattgacatccttaaattgtttatcttttaaaattacttcatctgtcatcttattacctcattatatatctaagttcgacgcgtattttgcgttcttttctataaattctcttctcggttcgaccttgtcccccattagcatggagaatatctcatcagcattaacagcgtcgtcaacattgactcttaaaagtattctgtgttctgggtccatagttgtctcccaaagctgttcagggttcatctcaccaagacctttgtaacgctgtattgtgtagttgtctctgcctatctctttaagtaaaacttctagctcgtcatcgtcgtatacatagtactcttttctgttcttgctaaccatgtatagtggtggctgtgctatataaatgtgtccatcgtcaacaagctctctcatgtgtctaaagaagaatgttagtagaagtgtcctaatgtgagcgccgtcgacgtcggcatcggtcatgatgatgatcttgccgtatctaagcttttctatgttaaactcagtgtctatacctgtaccaaaagctgtgatcatcgccttgatttcttcataagcaagtatcctatcaagccttgccttctcaacgttaagtatcttacctctaagtggaagtatggcttggaactttctgtcacggccttgctttgcagaaccgccggctgagtccccttcgactatgaagatctctgtctcagtgttatcgttcgattgacagtcagcaagcttaccaggtagtgttgtgttatccaagacacttcttttgcctcttgataagtcacgcgcctttctagccgcctcacgcgctctttgcgccgagattgccttctctatgatcttctttccttcttgcggatgaagctcaaagtaatcagtaagctcagtatatgcaacagagtttactataccttgcacctcgctattaccaagcttagacttagtttgtccttcaaattgtggctccttaagcttaactgagactatggctgttagaccctctctcgcgtcatcgcctgataagttttcttccttttcctttataatgttggcttttctaccataatcattaagcactcttgttaaagcatttctaaaacctgtcaaatggtagccgccttctgtagtgtgtatattgttcgcaaatgttagtacattttcagagtaaccgtcagtgtattgcatagctatctcaagctcgcagtcctccatggacttgtcgaagtagatgatgtcttcactgatagggttcttgctgcggttgatgtattcaacgaatgacttgataccgccttcgtagtggaaaacttcctcctgtggatcttcttctctctcgtcgattaaagtgatgcgcactcctttattaaggaaggcaacctctctaaacttagtgactaagacttccttcgaaaattcagttgtatcaaaaatttcactatctggcatgaattgtatagtagtacctgactcctttgtgtcgccaactacctttatgtcgccttgcgccttacctcttgcaaagtgctgttcatatatatggccgcccctcttaacagttgctataagccactcgctaagagcgttaacgcatgaaacaccaacaccgtgaagaccgccagataccttgtatgcgtcgttgttgaacttaccacctgcatgaagcacagtaagtacagtctccaaagtcgacttgccagtcttagggtgcacttcaaccggtatacccgagccattatcctctatagatatactgccgtccttgtagatcacaaccttgacagtgtcagctctgcccgccaaaacttcgtctatggagttgtccataacctccataacacagtggtgcagaccctttgtgccagtcgagcctatatacatgcccggtctttttctaacgggttcaagtccttcaagaacctgaatactacccgcattataattcttatcttccatttcttcctccgtaaatcatttcattcgtttctaactttataagtaaatagtcatcgtctatcaaatctttaatatcatccatatcctgcagcgtaaatattacctgcatatcagagactgcatcaagtaagtacttcttcctcgacttgtcaagctcagaaaaaacatcgtcaagtaagagcgttacatccttttgaaagctccttatcatcttgagctcactaagcttcatagagagcatcacagtccttaattggccttgcgaggcaaactttttcgcctcattctcagctatcgttataagatagtcatccctatgtggacccaaggcagtcgactttctatcgatgtccttgtcaatgtttgctgtgaaagcttcttcataagtctttttaatgtccgcttttatgtcaatgttagtcttgtactcgatacttaagtcttctccaccacttaagtcattgtgtatagccttgcaaatggcgttaaagttctcagtaaaggtctttctcttttctataagagccgctccaagcgtaattagctgcgcgtcatacgactttagtactgcctttaaagagtttttgtctctatacatcttaagcgccttgttcctattcataagaaccttgttgtagctaagaagttcatcgcgatacgagggcgatatcctcgttatgatgctgtcgatgtactttcttctaagagccggcgcgccttttaatatatttaggtcgaagggttcaaaaagaaccgcctcaaacttttgcgtgtagtccttcacattcttaagcatcttttcattttgcttaacaagcttacctttaggctctatactgatctctaatctgtttagtatatcagagtagaggtactcaaaagaggcataactcgatgagcagccaaactttattagctcatggttcctttcagtcctgaagctctttaagaaactaagcatgtatatagcctcaatcacattcgatttgcccttggcattgcttgcaagtattatgttcttttttggatgaaacttcaaatataactttgaaaagcttctaaagtttacaagctttaaactctttaacatatctctatactttcatcaaataatgtaacaacgtcacccactctgatcttcttacctctgcgagtttctacctcgccgttgaccttaacaagaccatcttgaatgatgttttttgccatggcgccgctatctacaagagcgcaaacctttaaaacattttgcagctgaatgtattcatcttctagcttaaacttcataattctcacctaatcatctattataatatatatcacttacgcttgcatctttacaggtaaaacaaggtagcgatactcttcattttcagtaatcttcataggcctaatgctttcagaaagccttaatgtaagcttatccgagctcatagccttgagaccttcaaggacgtagcggccgttgaagccaatcttgatattgtcaccagttttttctaccatgatgtcgtcacttgcatttcccatctcgttcgaagcagtgatctttaagttgttatcctcaaaatccataactataagactaactctgtcctcaaagcctattaatgatactctctcgatggcattgattaaatccatcctagatatctctacagtagtgtagtcctcacttgcaaagacttcctcgtagttaaagaagtcgccttcgataagccttgtatatagtagtgctctgtctatcttgaagactgccttgtctcttgcatatgatatctcaacaatgtcatcagtatcttcaagcatcttttgcacttcagataaagttctgtatggaactatgaaggatgtttcttcttcactgtccaccttgaactttaaggaactaattctataaccatcaagacttgcagcgtctaagtagcccttgctaaatttgaagtaaacgccacacaaagtaggtcttgcttggtcttgactagtcgagaaaagtgtcttcttgataatcttgttaagatccttcatcgatagcttcacgctcttgtcagttgcaacacgagtgtcgatctctgggtagtcatcgtgaggcatgctctttaagttaaactttgagaacttcgccttgatctcaacatcgtcaccttcacaagtgaaactgatctcacctgaagctagctttcttactatgtcacttaaaagcttgttcgagaagcagcaagtgccctcttcaagaacttggcactcaacttcggatatgatggtaagctcagtgtcagttgaaacaagccttattctgttatttgcagcagtaattttgattgcttcaagaatttcaagaggacttctttgagagatagccctttgagcaatcgtaatgtgttttaaaaattggtctttgtcgataataaatttcatctaatcacctcttatttcttgtttgtagaacaaatattaatactttttttgatactatcaaataattccgtagtatttattttttcttaataaaaattttttaattaaactataattatatattttgttcttttctaatttatattttttcttctatcatataatatatataataattttctaatagcaaatattttattcagaacgaattttttttttagatatcaaatatggaaatatttgatatcgcaagaaaatttaatttttgaattttcttttaataataagaacctcaccctaccacaaaactttattttatcaaaactatttctttataataataattaaaagaacctcacccttccacgatgcttcgcatcgggtgggtacccgagaaccttgcattattattaacgcttgcgctttaataataattataataaagagtaatagtagtaggctctgtataattgtggataacttatcctaattaggctttttagctaatacttatccacaggtcttcttgataaaatgttcactaaatggaacttatccacagatgatcttttccaaagcgtcaactgcttctctaatttccttatttgccttcttcgccctgagtattttttcataggcatatatcacggtagagtggtcgcgtccaccaaaagattcaccaatctttggatacgataaatccgtgtgtacacgagcaaaatacatagctatctgccttggtatagctatgtcagaagactttttcttcgagtgaatgtcatcaacacttatattgaaatacttcgaaacagcctccttaatcgagtctatggtgatctctttttcctcagtttgactcataaagtcaagcgcactcttcgcaagaggcacagtaatttcaagcttagtaccgccttcctgttcagaagccgccttaacacccataagcgcaccttcaagctgacgaatattctgcttagcacgctttgcgatgtactcaagcacatcgtcactaacattaaggtgctcctcgtccgccttcgccctcaatatagcgatacgcgtctccaatggaggctgcttaacctctatagttagaccactttcaaagcggctgataatcctgtcttgaatatttttaatatcactaggcgacctatccgatgcgataattatctgcttattcatagtgtagagcgcattaaaagtgtggaaaaactcctcttgcgtttgatccttgtacgacaaaaactgaatatcgtcaataatcaagcagtccaaagagcgatacttttccttaaattcgcgcatctttctgttttgtaagcagctaataagctcatttgtaaagtcttcactagtaatatataaaagcctaaaatccttatgatcctttagcatcttattgcctatcgcattgataagatgagtcttacctagaccagtcttaccaaataagaagaatggattgtaaagaagacctggattttccgctatcctcttagaattttcgaagacataaaggtttgcctcaccaggaataaacctgttaaaagtaaagtaaggattcaaattaggaattatatccccagttttttgagaagtctcctcaacactttgatgatagtcataaccttcagtcggttccaaaatcttaagatccacaacacccatatccaaggcaataagctttctcttgataaggtccttgtagttaaactggactatgctcttgatgaataggtttggagccaaaagcatcaagatgccgtcttcaaaggcaacaggttccaaaacactgatccaaaggtccatgttgttaagagcaatgtcttccttaagcgactccatacaagatgcaaatatcgactttgcgttgttcatatttattacctccgtcctatgtggatactttatccacagacatctgtcattatatgtattttcacgagaatgtacttgttcatagaaaatactatgttttctgtggataagtttatatttttactaacatatccacagtttttccacaagttattaacagtttacacaagatatactgctctattttctaagtcttttatattatatcaacaaataaaaaaattatcaacatttatttttgtggtctgtggatagactgtgtatagaacttaaaaaggttctcaatatatgggacacttcttatatataaggacgcctcttatatagttagtcgcttactatatataagtacgatagctatatacttgcaaggttagaaagatttttaagtaaactttgctttgtatatcgattgccttaaagctagactaagacaatcccttttaaaatcctcttgaacaattggcgcttttgtggtaaaattaagaaaaataattggcgggtttgtgacaaaagtacaaaaaataattggcgggtttgtgacaaaagtacaaaaaataattggcgggtttgtgacaaaagtacaaaaaataattggcgggtttgaggtgaaactatgtttaaaagaaaaatttatgctaagatgcttgagtggaaaagaaggtctaaaggcagcactgcactacttattgaaggtgcaagacgtataggtaagtcaactatagtagaagaatttgcaaagaatgaatatgaaagctatatccttatagatttttcacgagctggtaaagatttaaaaagtttatttgatgacttaagtagtactgattatttatttatgcagctacaactattgttcaatactaagcttgttgagagaaagtctttgattatatttgacgaagtgcagttttgtccaaaggctagacaagctattaagttattagttgaggacggtaaatacgattacatcgagacaggttcgcttatatcaatcaggaagaatgttgaaaacatcctaataccgagcgaggaagaaaaattaagcatgtatcctatggactttgaggaatttctttgggctacaggcgatacggctagtaacgatatattaagagagtgctttttgaaaggtgcatctctaggcgaagcggtaagccgcaagatgcttctaaagtttaggctttatatgcttgttggcggtatgcctcaagctgttcttaaatacattgagagcaataatcttgaagaagttgatatggtaaagagaaatataattacattgtacctagatgatttttataaacttgacatgaggggctttacatctgatttatataggaacattccttcagaattgtctaggcacacaagcgcatataaaatttcatcagttttaaaaaatgaaaggccaagcacggttcaagatgagattagagagcttatcgagtcaaaaacagtactcgcttcatacaacagcacagatccaggcgcctcgcttgccttgactaaagatataaacaagttcaaactgtatctttctgacactggcctctttgttacgttaatgtttatggataagccatttacaaagaatgaaatatataaaaaattgttatctaataagtcagaggtaaatcttggtatgctctacgaaaatgcagttgcaacatcacttaggtctctaggctacgacctttacttcaacacctcttacgacgaagatataaaaaagacatatgaacttgactttcttatttcaagtggcaataaaatctaccctatagaagtgaagtcatcaggatacaaagcgcataaatccttagatgtatttatcgataaatacaagtcaaggataggaaagagttttgttatatatacaaaagattatatgaaagaaggagatattgaatatttgccggtgtattatactcagtttttggatgaaatataaaaatttgcattgaatcaagccctttcgctagtttcgaattattttgtctttgcggagtgcatttagcacacctcactccaaaaaattctgcacaacgcgaaatcatcttgattcctctgcaaattttgaaattaactattatcacttaaagccctttcgctagtttcgaattattatattacgagcatttagtaaaacagctttaacttaaaatatttacctcttagctctagcaaaactatttactaaaatagactaaatacattgagcaaataaaagaaaagtgcttttacagagcgaaccttcggagaaaaatgtcttagtgagaaaattgattttcaagagcgcagccttcggaataaattgcattaatttcttaacgaagatgtctgcccgaaaattcatctagtggagcagagcgtaacgaatatgaattttcaagcgaacgagcttttagaaatttccaatttgagaagcctaagtcacgagtaatacacttttcgattacttgtcacaaaataaatcacttttctttataagaagaaaattttaaacaatttaacagacactgtctgtcatttttaatttaagaatattaaataaaagattcacctaagcataatcctctttaaaattcttgaacaattggcgggtttgtggtaaaagtgcaaaaaagaattggcgggtttgtgcttagatataaaatattccagtcactgtctggaatttttaatttaaatagattaacaaaacacgcccaactataatcccttttaaaatcatcttgtactacgccccctgctgtgttataataaagttataatcaagggaggtttatcatggacaataagaaaattacgttttttgagtacactatacttaagttaatcattgcagggctattcttactattgtattttaatccaagtgtcttttgcatttttgaaaatacaatgcctgacgcgatcatctattgcaaggcggcttctttattttttgcaatactaactatatctaagctttttgatgccatttacaaggcatctttgaataagtaacttatatataaggtctcttaggaggccttttttatttgtaattactactaatactactaagtatactatagtaatggtcgctttagtactcgtttattaagaatttattaattttctcttgacaaagcgtatctaattaattataattactataggagtttatgtactataggaggtgtagataaatgaagagaacttatcaacctaagaagagacaaagaaaagttgaacacggctttagaaaaagaatgtcaactaagtctggtagaaatgtcttaagaagaagaagattaaaaggaagaaagaaattatctgcataattactatgcaaagatctttaagtttaagaaaaaaagtagagattaacagggttttcttggcgaagaagaaggcctttaatgagtcttttacgatatattaccgctatacgaacctggatcaccctaggttttgttttgctataagtaagaagtacggcaaggcgaataagaggaatttattaaaaagaaggctcaaggccatcatcgaggcgaatgcttctgactttgacaagtcttatgatatggttatctctgtcaagcccactgttattgactacgatttctacaagattagaaagaggtttctttctttattaagaaaaataaatgttttaaaggttaaagcttatgagtaggattatgatttgcattgtgaagggctacaggtttgtggcgcacaaggttttacataaaaggccgagctgtattttcactccaacttgctctgagtatgcgatagaagcttttgagaaatatggttttttcaaaggcttgtatttgtctgtaaaaagagtgctaagatgcaatccattctctaagggtggttatgatccgcttgtatagtttaccttttttacttttattgtttaggaggaatttagatgttaggtaaaattctaggttacctgtttaatttcatatatgaccagcttgcaagtatgggctctgagccagcgaacttctcatttttggcaatgactatcataatctcgactgttgttgtgaaattattggtactgccactacagatatcttctactaagaagatgaagaagactgcggacttgcagcctaaggttaaggagattcaagaaaagtacggctacgatcaacagattgcctctcaaaaggttatggagctttatagaaaagagggcgcgtcaattactggcggctgtcttccactacttattcagttcccaatcttgattgcctttttccaagtgtgtcaaaatcctgcaatcaacgcgtttggtgcagaaaagtatgctgctatgcaaaagacattcttctggattaaggacttatcagttgctgacccgtattggtatggtcttccactaatcgcaacagctgtaacattcttaatgagtgtgactactccaaaggttggcatcactgacgagaatcaagctaagtcgatgaacataatgcagtattttatgccgatgatgacttttttctttacaattaagtatcctgctggactagctctttattggggtgtgtcaagcttatttgctgcaattcaacaatttgtgcaaaacaggattattaagaaagaggaggtaattgtaagtgaaaaagagatttgaagctaagactgtagaagaagccatcgttcaagcggaattggaccttggcatgcatagggacgaatttactgttgatgtaataaatgaagatactaagggtttcttaggtatcggcgcgaagaatgctgtgatcgaggttgactatactataaacgtagaagaacattgcagctgcggctgtgaaggtcaccaccatgacaatgacaatgacaatgataacgacaatgataacgacaatgacaatgacaattgtggagatcatataaaagtattaaagaacttcctaaatgagttctttagactatttgaagtaaaggcttcgtacaagattgacgaggcggatgatataatcacggtactaatcaagggcgagacttctgaagatacatcgaagcttatcggtaagaagggtgcggttttggactcgatgaacactatagcgcaaattcagctaaacagaaacttagacgagttcaagagattattcatcgacatcggtgattacagaaagaaaagacaagaaaaagttagagagcttgctatacaaggttgtgaaagggctagaaagtatggtactaaggtttcattagagtacatgactagctatgacagacgtatcgttcacgaaaccttagcaggtattgaaggcgtaaaaacattttctgagggcaacgagcctcacagaagagtttgtatcatagcgaagtaattaggaggcttttatagcctctttttttattatgtgaatggagattgattatgagaactatatgtgcaatatcaactgcaatgcagccgggcgccatcgccatcatcaggatgagcggcagggagagctttgctattgcgaagaagatatttcgctcatcgagcggcaaaagtgatttcaaaagtaaatatatgtacttcggtagaatttacgacggggacgacttcgtagatgaggttttgatcacctttatgaaggcgccaaatacctacactaccgaggatatggttgagatttattcgcacggtagcgtgataagtcaaagaaggatacttaatctccttctgaagcatggcgcagaacttgctgagcgcggtgaatttacgaagaaggcctttattggcggcaggatcgacatcacgcaggctgaagctgtcgctgacatgattaacgcaaagaccgacatgagctacaatctatccttaaaagcctttgatggctcagttcgtgactttattaatggtcttgcggatagtcttaagatgcttattgcgaacatcgaggtcgctatcgactaccctgaagaggacatcgaagagatcagctacgagcgcatcactgctacacttacggatgtgaaggaaaagctttcaagccatatgaagcgcgcctctacatcgtcacttatcaaagacggcatcaagacgtccatcgtcggtgtgccaaacgtaggcaagtcatccttactaaacacattcacacgcgaggaaacggccatagtctcgaacatcgaaggcactacgcgtgacatgattactgagtacgtcgaccttgagggcatcagccttaagcttatggacacggcaggcatacgcgaggcctcggacgagatcgagcgtatgggtgtcgcgatatcgaagaaggcgatcaaggacgcagaccttgtgcttgcagtctttgactactccaagcctatgagtgatggcgacaaggatatcatagaactggttcaggacaaaaagcacatatatatattaaataaggtagacgaaggagaaaatggtgactaccttgaccactttgagcaaggcgcgaagtttatcctaacgagcctaaagacgggcgaaggcttcgacgcgcttaaggatatgattaaggagatgttcttaggcggcgagatatcgcaagatgacctagtttatgcgaacattagggagatggacctcttaaataaggcgcactcagccataagcgaggcacttggcgatgctgaaagtaggcaggtctacgacttactcatagtcaacataagaagcgctcttgatagccttcttgaagtgcttggcgagaagcttgacagcgagatacttgacaagatattccaaaacttttgcattggcaaatagacaaaggaagtgaaattatgcaaagaagagaaataaaatacattagaggcacttttgatgctgtcgtagtcggtgctggacatgcgggctgcgaggcagctcttgcactagcgcgccttggcaaaaaaactgcggtcgtaactatcagcttagatgcgatcgctgctatgagctgcaacccaaacattggcggcactggcaagggtcacctcgttcgtgaggtcgacgctcttggtggcgagatggcgaagaacattgacaagacctacatacagtcgcgtatgctcaacacgtccaagggacctgcagtccactcacttagagtgcaagccgacaagcaggcctaccaccgcgagatgaagaagacacttgaaaaggagcctaatttaaccattatccaaggcgaggtagatgaagtcctttttgacgagagtggcaaagcgtctggcgtcaaactatgcacaggagctgtacttgaggcgaaggcagtcatcttggcgacaggcacctaccttaaaggaaggatattcgaaggcgagctaaactacgagtccggccccgatggccgcttccctgctaagtacctatccagctcacttattgagcatggcatagatttgcgtagaatgaagacaggtacaccagcgagagtccaccgtcgcagcatcgacacttcgaagatggctgtgcaagagggcgacaagactatcgtccccttctcattcatgaacgaggcggatgccatcatgaaagagcaagcagtttgctacctaacatacacaactaagcctatgcacgagtacatccttaagcacatggatcgctccgcaagaaccataggcgacatcacaggcgaaggaccacgctattgcccaagcattgaggacaaagttctgcgtttcaaagacaaggatcatcaccaagttttcatcgagccggaaggcacagacactgacgagatgtacatccaaggtgtttcgactgccctacccgaggagatgcaagttgagatgtataggatgatagaaggccttgagcactccgagattatgaggagcgcctacgcgatagagtacgactcgatcgaccctacttccctaaagcttagtctcgagtcaaagacaaaggagaatttattctttgccggccagatcaatggttcatccggctacgaagaggcagccgcccaaggcatcatggcaggcatcaattgctacctaaaacttgagggcaaggagcccttcattataaagcgcagcgagggctacatcggtgttttgatcgacgaccttgtgactaaaggcacaaacgagccgtaccgtatgatgacaagccgctgtgaatatagactaagtctaaggcaggacaacgcggacatgcgccttacagagtacgcatataagataggtcttgcatccgaagagcgttacaataggatgcttgctaagaaggagcgcatcgaaggcgagcttgaaaggatgagagcgaagtccatcggcccaaaagacgagacaaacgcctaccttgaaagccttggaacagcggcacttaagaccgcagccacacttgaggagcttcttcgccgcccagagatacattacagtgaccttgctaagtttatggaactcgcactagataagaaggatgaagtgcttgagctcgagacaatcgtcaagtacgacggctacatcaagaagcaaaataaagagatcgagaacttcttaaagatggaagaacgctcactagtagattttgactatagcctagtcaagggacttaagatcgaagcgaaggaaaagctagaaaagtttagaccatcaaaccttggtcaagcatcgagaattagcggcgttacaccagctgacatcaacaacatcatcatctacatggaagtaaataaacgcaaatgatatacattattttagttttgctgctactcgccttcttcatcatgtggaagaagaagctggtagtcacagaatatacagtagcggcacccattgacatggacatactcatactctcagacctgcactcgatgaacttcggcgaaggacaaagagagctcttggaccttgtggatagccttgacttcgacatcatcaccctacccggcgacatcttcgacgacagcgtggacgacgcgaagggatacgagtttgcgcgtggcatcaaaaagtacgagtgctactacatcctcggcaacaacgaagtactctccggcaaggccgagcagcacatgaagaatatgcgctccctcggtgtacacacactagacgacgagaagcgcgtcatcacaaaggatacaaagcgcatcgccatctatggcttcacagaccgcgacgcactcagtatgaaggacctcgcaggcatagttgagaccagtcttgataaagagagcgagacttatgactatagtatagtacttgcacataaaccatttgcaagcaagtactttggaaagttcaaggcagaccttgtcatctgtggccacgcacatggtggtcagtggcgcctacctcctatcaataacggagtctttgcgccaaaccaaggaatatttcctaagtatgcaggcggtgcatatgaggcgaacggcaagtatgaagtcgtctcgagaggcctcgcacgcggactaaaactcgtgcctaggctaaacaacccgcccgagatcgttttactacacttaagaaaataatgttccacgtggaacatttgaaaggatagatatgctagaaacttatttgaatgatattaatatcgaagcgaatgataagcaaattgctgagcttgagcgcttcaaggagatgctcgttgagaagaacaaggtcatgaacctaacaggcatcacagactcagatgaggtcgacaggctccacttcaccgacagcgcctaccctcttactttgccagaacttaaaggcacgaaaagaattatagatgtcggcacaggcgcaggcttccccggcatagttcttaaagttctcgctccagacaaagagattactcttaacgatagtttgttaaagagactaaagtttcttgacgaggtcatagccgacttaggccttgaaggcataacgacagtccacgcaaggagcgaagaccttgcacacgtgagcggtcaaagagaggcctacgacgtagccacatcgagagccgttgctcgcctagcgacacttacagagtatatgctcggcttcgtaaaagtcggtggctacatgctagcgatgaagtctggtgatatagatgaggaagctatggaagccaagaaggccattatggcaatgggcggagagctagtgaatgtgcataagtacagactctttgacgagtttgacaggtcgatagtgcttataaagaaggtgaagccgacgcctaagaagtacccacgcggaaaaaatttggcaaaaactaagccgatcttgtagtttacttatttatatataagagatcatatttgatatggtctcttttttgtttggctcaataacgaaaagtgatttatttcaaatatttaacgaaaagtgtattactcgtgacttaggctttacaaattggaaatttctaaaagctcgttcgcttgaaaattcatattcgttacgctctgctccactagatgaattttcgggcagctctcttcgctaataaatttcacaatttgctcagatgcgtcacttcgttaataacacttttctgtcatttgatagtgaaaacagaattttatcttaaataaataagtcataaagaaaaatcacttttcttatattatattatatacagagaatacatatagatgcagctcatagcacttatatattgtcactaaacaaaatgttccacgtggaacattactcttaaaacttaccacagctcataggacaagattaattcacaaactaggtaggacaaagacaattcgtcggaaaaatttatgcatatgacgaagataagcctgagctcacagcgaaatagtacaagtggtacattggagctgtgacgagggtgttcgagtcctaggcgaaatttttatagaattgatttgttccaactttctattgttttttcttataatatatgctattataaacttagaggtgatttcatgtccaaaactattgtcatatttaatcaaaaaggcggcgtcggtaaaactacgactgccatcaacctaagttatgcacttgcgaagcttggccagagggtcttgtgtgtcgatatggacgcgcagtcgaacctttcaagcggtcttcttgaagactacacagaggccgcttcatcaacgtacacgcttctaacagaggctagcaaggacacaaaatcactaatcaagcgtaccaagctagataagctccacgtcatcgactcctcgaccgacatcgcaggtcttgagatcgagcttgcgcaaaagggcgagtggaaagacatcttaaggcgccgtttagacgaggtcaaaaatgattacgacttcatcttcatcgattcgccgccatcacttggcatactttccatcatgagccttgccgcagcaaactctgtcatcatcccgatacaagccgagtactacgcacttgaaggcgtttcaaaactgatcaagacagtagagctggtgaaggaaaattacaatcagtcccttacgatcgaaggcgttctaatcaccatgttcgactcgagaaataaccttcacacagaagtcttctccgaggtcaagaactttttcaagtccaagctatacgaggcagtcatctatagaaatgtcagacttgcagaggcgccaagctactcgatgagcatatttgagtatgacaaagcctccaaaggagcagaaaattacatgaatctagccgaagaatttttacaaaagcaaggaaggtgatcatatggcgaaaaaacttggcaaaggcctaggtagcctattaggcgtcgaaagcatcacagaaatcacagaaaagtccaaaaacgagcttgtggatttagatatggcacaggtagtgccaacagagggacagccgcgtcagtcatttaatgcagagagcatcaaagagctagccgagtccatcgagaagaacggtcttttacagcctatagtcgtaagacctatgaaggacggcaagtatcagatcatagccggagaaaggcgctacagagcttttaagaagcttggcaagagcgtggttccagccatagtcagagactacaaagacgaagaaatcgacaaattgcagctcgttgaaaatgtacaaagagaggacttaaacccttacgacgaggccatagcctacctaaaactcaaggaaaagtacgccctaaagcaggaagacatcgccaaagcagtcggcaagtcccgtccatacatctcgaacatgaccagactattatccttagaggatgagatactagacatgcttaagaacggcgaaatcacagtatcacacgccaaacttatattatcattagatacaaaagaagaaagaattaaacttgcacacaagataaaagacgcaggccttacagtcaaaggtaccgaagcgagaacgaagaggcccaagaaggcaaagccagaggacatctacatcaaagacattcgcgaaagactcgaagacttccttacaacgaaagtttcgatcacacacacaaagcgcggcggtacaatcaccctagactactacacagacgacgacctaacaaggcttgcagagctgattatggaggattagtatggatctacacgtatatatagttgacgcattcgcagcatgccgtttcggcggcacacccatcggcgttgtaccagacgcaaacaatatgagcaaagaagactgccaactcatcgcaaacgagcttagagtcaacctcacagcctttgtagagccagtcgacgaagacgtcttcaaaaccagatatttcacaagtaaaaacgagctagaagcctccggacaaggctcactagcactcttctacgtccttacaaaccttggctatatcaaagccattgagaatggtgtcaagctcgtctacgaagttacacgcgagtccaagaagaaagtctacatctattacaaagactacaaaatcgagaacctagagatcgagacaagtagacccgagatagtaaacaaagcgcccgaaattacaaacatgcttagcgcgatgagcctttccacagcagacataggcataactggcaaagacgccaaagccatggtcgtgaatgcagaagaaaacacactcgtggttccagttaagacgagagaagcactctacagctacacaatcgacgagttcaagttcaaagacgcggccaatagccttggagtcgagaacgtacaccttttctgcgagtccgaagacggcatctacttcgtgagaaactacacaaaagacatctccttcgaagaagatggttcatccgcttacgctaacgcggcactacaatattaccttatcaaaaacaaacttacgacaaaactcaaagccaagatgttccaaggcgagacacttaatagaccgtcaagagtacaaacacgctaccttgaggataaggattcggcgtttattacggttatgggaacagcacgcatttcattggatggaatacttaatatctagtatatatagacaaatacaaaggaggaaaattatgttaatcgaaaaatcactaagagactacctaaaagaagttagatcagactcaccagcaccaggcggtggctcagttgcagcctactcatcagccctaggtgcatcacttacaaacatggtcatggcgcttacagaaagcaagaaagccttcctagaattgccagaagacgagcaaaaaacaatgaaagactactcgaaaaagttagtagagctatgcacagaacttgaagacatcgtcgacacagactcaacagctttcaacgatgtaatcaaggcacttaagatgccaaaagaaacagaagaagaaaaaaagatcagatcacaaatgatacaagaaggctacaaaatcgcgctagaaataccattcagatgcgcagagctaggtctagaagctatgaagatgcaaaaaatcttcgctaaaaacggcaacatcaacgccatcacagacgtaggagtaggatgcttactactacaaacaggcgtagaaggcgcactactaaacgttacaatcaacctaaaatcacttaaagacgaagccttcagagatgcaacaagagataaagttgagcacatgctagcagagtcaaaacaatacaaagaagaaacacttgcgatagtatacgaaagattgactaagtgatacaaagttatataagacgcttcacacgaggcgtctttttcatgcgcacaaaaaaagcagtacacaaagtactgcctttggggatggtaatagtaacggaacggatcaggacatatgtccgtatcagaggcaaaagaaattgtttaaatgaaggagaatttcttttaacccaaacttaagcatagcccttgcttaaggtctctatataagtaaaaatttcgtgaaacgagagctgggtagcccgaaggcctacgaaggagaacctcctagatcacattccggtagttcaagtacctaagtacttactattaactacgacttcattgtaccatttaagcataagaaagtcaatagcattgtaacattcagttaaattattttttgctaatctcatatctaatgtcttctttctttattaatatttctcagatctgagtctgaatgttgcgagctgtgggtcgagcgcctttctgtatgtcagctctaaacattcagttaaattattttttgctaatctcatatctaatgtcttctttctttattaatatttcccagatctgagtctgaatgttgcgagctgtgggtcgagcgcctttctgtatgtcagctctaaacattcagttaaattattttttgctaatctcatatctaatgtcttctttctttattaatatttcccagatctgagtctgaatgttgcgagctgtgggtcgagcgcctttctgtatgtcagctctaaacattcagttaaattattttttgctaatctcatatctaatgtcttctttctttattaatatttcccagatctgagtctgaatgttgcgagctgtgggtcgagcgcctttctgtatgtcagctctaaacattcagttaaattattttttgctaatctcatatctaatgtcttctttctttattaatatttcccagatctgagtctgaatgttgcgagctgtgggtcgagcgcctttctgtatgtcagctctaaacattcagttaaattattttttgctaatctcatatctaatgtcttctttctttattaatatttctcagatctgagtctgaatgttgcgagctgtgggtcgagcgccttactgtaatgtcagctctaaaacattgaaattttcgctccattaaaaactttcttcctatatatatgcatataccctcgcagataatatatacataagagaacacattgatatatatccttcatatatatatcacgtcagatatatatgagcttcctttatatataacagccagttatggtatatgaagcctactactacatatgagccgcacaagataaacacgcgtgctatggtatatgaggcctactactacataggtaaaaaatcgtttgcgcgcagcgagacaaaaaatttagcagcaattgaagtttgtaacacactcttaacatatgtgagatatattatgtggtataatgtatttgtaaatagttaccaccgacaatatatgaagatgtatgagcttgacaagcttgaatcttacggactaataattgtactgagactaataattgttcataagagtggttatatagactcttgttcgcaattatttagagctgacattacagtaaggcgctcgacccacagctcgcaatatttgaaatgagaattccaattatttagagccgacttgctaaaagggccaggcccacagctcgcaacaatcaaaattaaaatttcaattgtttagagcggccatacagtaaggcccatctttcaagctcgcaacattcggcattcgatctaggaagtacttttaaagaaagaacatattccatataaaacaaaattcaacggagtttaaccgaatgttacaagtttgttaaattactcgaatacatcttgcaatatatcgtcgtagatggtataatacattaagagtgtaggcttttcctacacaaatacaaaaggaggtcattagacatgagtaaaaaattacttgcactattactagctatgattatggtaataggctcatttacttcagttcttgctgatactactcctaaagctgacgaaaagaaagctgaagaagtaaagacagacaagaaagacgaagctaagcctgaagaaaagaaagacgaagctaagcctgaagaaaagactgaagaaaagaaagaagaaaagaaggaagaacctgctaaggacgaagctttagacagagctatggaagttcttaaaaaagctaaagttatcgaaggtttcaaagccggcgaagaagacttcaaggctgaacaaaacatcactagagcacaatttgctgctatgatcgttagagcaaacaaccttgcaaaagctgctgaagctgcaaaggtaactcctacaggattcactgacgttccagtaactcactgggcaaacggctatatcgctatagctaaaaatcaaatgtacgttaacggttatccaagtggcaagttcatgccagaaggacaaatcacttaccaagaaatggcaaagatgttagtttgcgctcttggcaagggagaagttggagacatttggccaacaagctacatcgttaaagctcaatcattaggattattaaacggcgttacagctccagtattcactgaaaaggctactagaggcgacgtattcaagatgctttacaacatgatgaacagcaaagaattcggaaacagaaagattcttaaagctatcgttctagaaaactctagagttgaaaacctagctgatgacgaagtaactgttgaagttatcgacgttgttcaaaaagctgaatgggtagaaaaaagcagatcaaatgataagaagggtgaccaacacacttacaaacttgacaaagaccttatgttagatgctgaagacttacttggtaaagtagttgacatcacagttgaccaaaacgacaagatcgttgaagtaaaagttgataaaacttatgactacgtagaaggttctattgatggtgtaggtcctagaaaattcgttttagatgataacacttacagcgctgcatttgatgaaagatattattcaagagacgaaagaatcttcagaacatatctaaacaatgaagactacacatatgcagacttcgctaaaaagtttaaagaaaacaaatacgattttgctagagcaacagttaagaacggtaaggttatcttcatcgatgcttacaatttcaacgacatcgctccagtagtagaagttaaagacggcgcagtttactatcgtgacgatgcatgggctgcaaatgttgttaaagcttcaaaacttaacgacagagttgttttccatgacgctaagggattctcagtagctgaaagaaaagctatcgcaaaggatgacgttatccacttctacaacgattataaagatgctatcgttagaaaagacgctaaggttgaagcaaaattagacaaaactcttttaaaaagagatggcagcgaatggattgtattaggtaaggatgaatatattctaaattcagatgaaccactacaagctatttatagctatgaaggtaaaaaatatttagttcttaaagatggcgacagatcactagttgatggtatgcgtggagaaaacgttaaagtattagttgctttagacggttcagcacaacttatcgaaggaactaaagcttggaacgacggtattaacgctataacaagaatcacttcaagaggagaagttaagttcttaccttcaacaggagaagaattctgggcagaagaaacaagaaatacaagatatgttgttgataaaacatcaaataataatagattacttgatttcaatgaaaatgatatagtttacctagctagaggagaaaaagaagaaatctcttatatgggaagacttatcaaagctggcgcatatccacttcatccatatgcaaagatgaacggcagattcataatgcttgatacaaataagacaactcaaagaacttacagatatttctctaatctacatgcatatgcattagataaagatggaaacttacaccaagttggagatcttaacaagtttattgctgacaacagcgataataaagatttaaaagcttatgtaatgtctgaaaaagatcttaaggatacactagaagacaaaaatacatttgatcttaacacttataagttcttaagcgatgatgaaaatcttgctagcattgtaatatttaaggatgctgtaataacatttgacgctgattatgattatgttgaagttataaagacttggaacaacaagacagctatagatgttatggactctcacaacaatgtatttacactagaattagttaacgatgttgacgctaaatacaattttggcaatggagacatagttaaaattaaagttaataaagattctaaggatgttaaaaaaggttgtgtagttggagttgaaattccagtaggcgctaagaagtattcaattgaagaaggtaaatatccacaaacatacaagattggcgaagacacttacaagtgggatgctaaacaagttgtattctatccaaatgcatcaaagactgttcaatttactaaagataaatatggatttatcaaggtaatgagatttgttagagacggtggtacagtttacactaacattcttgatcaagctgcagtaacagcttcaggaaactatgtaattgtattgaaaaactctaagggtgagttcgttgctaactattatgtaaacgatgatacaagatttgaagatgaaacaggcagaccattaggatttggacactgggctgtagctagtttcaatgctttgtacggcgaaggaactgttaaagttataactgatggtagatacgcttcattagtaaaaggattaaagaagaaagctgcatttgatgaagacatgttaaaggctgaattaaacgaaaaagttagagatacagttgtagctcttggcaatattgagtttgattcatctaagaacactgatacagcaaaacttgatgcatttgctgcagaagttaaaaaagctttagaaaaagtattcaataagactggagagtctgttgttgcagcctcagctacaggttcaccagcatctgttaaagttactgtaactacaactggcaaaactattactttagtttcaacaatagatgctaaagagattacaacaaaaataacaggtacaatacctgctatacctgctatgcctggtacacctggtgcaccagctgttacagcaagtacagaagctaagaatgcttacaaagctaacacaacagttgatgaagataaagctgctaaaaaagctgtagaactaatggaatatgcattaaataatgctagtgatccaatagttgtaggtgcagatcctaatccaggtcctgcttacgcattagcagaagtagaaggattcattaaagcagctatgtcaaaagcagatgttaaaaactttgacttaagtaaagtaacattagtagctgctgcagattctactcacccagtagcatctttaacacatgttgctgatgataaatatactttagtattctattacacattaagttcaggtttacaacaaagtaactcagtaaatattagattagttaaataattaacctaattaaaataaagaaggagggtcttatgaccttcctttttttgtacgataatttataatagattagaataagagcctattcaaattagcaatgggctcttttattttgcgtgatattacttagtataattgataataatatgtaaaaaagtgcagttttagtaaattttatactaaaactgcactattttgtggtggcacacataattttctccttttttgaaacataaaatacttacactagtgatatgtcatattgaccattatgacttgtatacgtctatctaattacaagctaaatgatttgtttgctacggcaactgcgataaaagcacctataacatcttttagtacatcatagtattcattcatattttttcccagattagatatccaagcaacttctgttttaatcatttgcatacaagtaaatttatatacaaatataaaaccaattaatgaatatatgagttttttccaacgttcatttttcaagttttgtttgtctttgctttctttgtccatgcatcgcacctcctttactttatatttttaacctcctttccctaataatatttatacatatcactatatagtattataacacaaactttgtattttgtcaagtcttatttttctagaactcagtaattaagcgagctataggcttctatagcagcccatagttatttaatcttttgcatataatttttgctttaaagttattactgaataatttattgttgacaaattcttttaattgttatatattttatttaattaagatgtgaggtggagtgtatatatgaatgaattttttaaatctcatatgtggccagtaattacgctattaattggaggagtttttcaatttttactaactttggcaactgataaaataaaagataagaaggataaagaaaatgaaaggagaaagtgtctaaaaaagtcttatgattatattttaaagtatcttaacaagataccgattaccacaacaaaggatgttcttaatagcatgagagattccactaggtatgatggattagaaacaagtgatattatatataaaatgtattctgatttggaaaaatatgattctaacaaagagaagcatgttgatgaaatcaaagagcttgaagataatattgatctacttaaatataatgaaagaatgtatagagaagcatgcgatatagcggaagaatttaaaagcaaagagtatgaagtttttaatttatatgcttctagagaggttaaaatggcttggtcacttttaaaagttatagtggacagtggctataaaagagattctaaaggcgaatataaagcatttataattgagactgatgatataaattttgataataaatttgttgatgcttatgaaaaactgtattcagcaataaggaaagatcttgatattaaaatcgataatgatataattactaagaattagtgacgtaattaataaacccacgcttcaaaactctctctacacgttttatttataaaagaagacccgtagtactctctatcatttactgagtgctacgggccttttatatgctcttaggggtataagtttattcctgtcttatgttttatctgatttagttgcaatttgaaataaggatgccattatccatttcttatttcagaaactttagctctttaatcttgcacaaaaaaagaggacttctcgtcctcttatcttcaatattcaattttatgcgtttttcttgcgctttgctgtgaggccatcttctatgcgatcacagtctttaattctgtctctgatggttcttctcttgctttgtactctgactttgccaaggcctttcatatacacggcgttgtcttctatatcgtagatgaggtctctgtttaggtagagcatacagccatcgtttctcgaccttacttctctacacttgatgcctacgagtttggtgccatcaacgactacggcgagtccggttttcttctttgtaacggttttcgcccacgctttgtagagtctctcttcgatgagtccttctctaaatatcctcgatatcgctgtccttatggatacgccaaggttctctgctgtgatgtcgtcgtatatggcgactgttgtgttgatcccgtctttgtcgtagccgggtacgagtgctaataagttcttttctttcatatcttcttacctccatgatatctttccggtatagtctattatagtccacttgacgctctatgtcaatagctaatgtcttctttttctgaaaatatttgccattgtcttaaaaatcatactttatgcttagctgtattttttatatttgcgtctaagcttttttagtagtgctgtgacttttttgtgtgcggtgcttttggagcagtggagttctttgcctatgtcttcgaagctcatctcggtgtagtatctaaggtagataagctgggtctcctcggctgtaaggcttttaaatatattaccaaggctgtcttttctaaagagtgcctcgaagtcgtccatgcttgtttcgtcttctacgaggaaggcgtcttcgcctagggtgcactcctcggttttcttcttatacttattaagcaggtggtacttgatgcgtgaggcgatgagggcgagggcgtgtgctccgtgactctctctaaagtctagcatggcttctaatactacgactaggagctcttgcacgaggtcgtctctatcttttgcaagtgggtagtagcgcgcgatgctactaagtataagtggcatgagcctttctaaaactgtgggcgctatttccttcatctcttggtatctgattgcgactgtatcaaaatcaatgtacatatgcatctctcctttcttatcttaagtataaggatatgcatatcttctctcaaatgatgagtcgcgtgcataatatgtgagtgcgtgcatatattggtcacttaggattgatattggacacttaagtgcacgctagcactattatcatagtgggtccgcgtaggaaacgaaggcgcgttttagtatatatagggtgtaaggcttaaggctttacgagatgaaaggaggtgagatgatggttaagacttctgttaaattattcttcgacggcatgggtaaggacaacgctgtaagaaagttctctagaactgtaaactacgttgacaacactgcttcgaatgaggacctaaaggtgtttaaggatgcttttactgctcttttaggtaaggagattaacaaactacaaaagattagtgtaactgatctatagttgtaggcaaatttatggaaaggaggtgagataatgaagagattacaattaagctttaaatgtgaggacggcaagccatattctatgtctgtacaagatcctaaagagggtcttacagctgaagaggttaagaacgcactaaagactatcgttgaaaagtctttacttgtgaataagaacgactctaaggttatgttgcttgttggagcgaagaatgttgagactaagactgaagtcttattctaactatttcacattgaaattttacagggaacttgttcgcttttcggcaatgccctgggtacatttgtacagttaagtccttgcaccaagagaacgagtgaaacgaagttcgattggctatgcatgccttatgccagagtttacaaaggtatggagcgttagcgaacatagctttgattaaacttacggccaagcttgcttcaaagctccacttcgtcccctgcctaaatttcctctgcgaaatagcacgcggggtagaggtttaggagcagaaaaacaaaatagtgtaagtaattgggagaaggtagatataccttctctttttttatctgcaatatactgtaagtgcaggtatctgtggcgagtactttatgtacttgctttttttatgcctcgcctctcaccatacacctcgttcactactatatagcaagcgccccactatataccacgcgagtatatatataggaagcttctcactatatagcaagggcctattatatgcctcgcaagctgtacttcgaaattactattaccactcataatattaatacttatcttgaaaaatatctcattatcgggtataatagagggtgaaataaaataaagaaggtgaaaatatgggattattttctaagttgtttggctctacttctgatagggctataaagaaaaatctaaatcaaactgaggctgttatggctttggaggatgaatactctagattatctgacgatgaattaaagaataatactaataaattaaaggaaaggcttaagggcggtgagacgcttgacgacattttaccggaggcgtttgcaactgtaagggaggcttcgaagagggttcttggcatgatgccatacagggtgcaagtcgaaggcggtatcatcttgcatcaaggccgcatcgctgaaatgaagactggtgaaggtaagactttggttgagactatgcctgcctttcttaatgcgcttgagggcaagggtgtgcacattgttactgtgaacgactaccttgctaagcgtgacagggactggatgggtaagatctttgagtttctaggtctatctgttggctgcatcattcacgatatgtctaaggaagataggaaggttgcttacgcgtctgacatcacttacggaactaacaacgagtttggcttcgactacctaaaggacaacatggttatctacaaggatgatatggtgcaaagggagctaaactacgctatcgtggacgaagttgactctatcttgatagatgaggcgagaactcctttaataatttctggtcaaggcgacaagtcgactgacctatacgagcttgcgaagacttttgtttcgaggctatctgttaggattcaagaccctgatgagcatgtagacccgcttgacaggtttgttaagcctgaggtggaagaggtcgaaactaaggactacgtggttaatgaaaaggacagatctgtcttattaacagagcttggaactaagaaggctgaggagtttttcaaggttgagaacctctctgacattgagaatatggagatcattcaccatatcaatcaagcgatgaaggcaagaagtcttatgaagaaggacagggactatgttgtgaaggatggcgagatcatcatcgttgacgagtttactggccgtttgatgtttggtagacgctactctgatggtcttcatcaagcgattgaggcgaaggaaggccttgaggttagaagcgagtcgaagactttggcgactatcactttccaaaactactttagaatgtacaagaaactttcgggtatgactggtactgcgaagactgaagaggacgagttccaagacatctaccacatggatgttatcgagatcccaactaacaagcctgtaatcagggtggacaatcctgacgagatctacagaactgaggctgagaagtttaacgcagttattgatgatataaagaagaggcacgagagcggccaaccggttctagttggcactatcagcatagagaagtcggaagaattatctaaactattaaaaaagactggcatcaagcacgaggtcttgaatgcgaagttccacgacaaggaagcggagattgttgcgcaagctggccgtttgggtcaagttactatcgcaactaacatggcaggccgtggtaccgacatcatcttaggcggtaaccctgagttcatggctaaacaagcgatgagaaggaagggtctatctgaggaagagatggcacaggttgattctcacgaggacactaaggatactgaagttcttaagaatagaaaagaatacgaagatttcgttgaacagtacaagaacgaacttcaagaggagaagaacaaggttgtggcatctggcggcctacacatcatcggtactgaaagacacgagtcgagacgtatcgacaatcaactccgtggtcgtgccggaagacaaggcgaccccggttcatcgacattctatatatctgctgaggacgatttgatgcgtctatttggcggcgacaaatttaaaaatgccatcgacatgatgaatatggctgaaggcgactcgatcaagtcaccactattaacaaggctaattgagtcggcgcaaagaaaggtcgaaggtaacaactacggaatcagaaagcacgttcttaagtacgatgacgtaatgaacaagcaaagggaagttatatacactgaaagaaagaagctacttgaaggcgcggacttcagagataacatcgtttcgatgattaaggacgtcatagagggcttcgttaataccatgacatttgagaaggcggactcttctgagtgggacttcaagagcttatttatgcacttaaaggccatcttcgacatagacatgcaggatgtgaaggatcttaatgttaatgatgtgcacaaggacgagcttgtagacatgcttgaaagatgcgcacttgacagctacgaagcgaaggaaaaggaatttactcctgaaagattcagagaagttgaaagggttgtacttctacaagttgttgacgagaagtggatggatcacatcgacgcgatggatcagttgaagcaaggtattggacttaggtcgatggcgcaagaggaccctgcgagagcctacgctgttgaaggctttgacatgttcgaggctatgaacgaggcgattaaggaagacactctaagaattttattccacgttgaagacccaagcaaggtcaagaggagagagcaagccaagaacatcaaggaaggcttcgaaggcgacggatctgacgagaagaagaagccatatgttagaaagactaagaaggttggcaggaacgacccatgcccatgcggaagtggcaagaagtacaaaaactgttgcggaaggaatgagtaatgaagaccttacaagagtataaagaagattatgcagattttaaagagagatatataaaattaggagactatctttgacgctgatgctctaaaagagaagaagcaaaagcttgaagccaagatggtggagccgtcgttttgggacgataaagaggctgccgataaggtgatagacgagctcaaagacattacaacgcctcttaatagctatgaagagatagcctccaagctagaggatatggaagtctacatcgagctatacgaggaagaaagacctgataactacaacgctctgcacactttgagtgaagagattgacatggcgcttgaggagctaaaggtgaggaccttacttgatggcgaatatgataagaatggcgctgttgtctccatacacgcaggtactggcggcaccgacgctcaggactgggcagagatgctctaccgcatgtatacgaggtgggcatctcatcatgactacaagctggagctcatcgactacctagcggacactgaaggcggcataagaagtgtttacttcaaggtcttaggtgactacgcgtatggctttttgaaggcggagcgcggggtacacagacttgttaggatatcgcccttcgactcgcaaaagaagagacacacgagctttgcatccgttgacgtctttcctgacatcgacgagaccatagccatagatataaaggaagaggatctaaagatagactactaccgctcgcaaggtgcaggcggtcaatcggttaacacgacagactctgcggtgcgcatcacgcacataccgacaggagttgttgcgacatgccaaaacgagcgtagtcaaaggcagaacaaggaagtcgcactgcgcatactctacggcaagcttgtgcagcttaaggaagaggagcgcaagaagaccatagacgagcttacaggcgactactcgcagattgcgtggggctcgcagatacgtagctacatctttaatccgtacatgctagttaaggatcacaggacagatgtggagaactttgaggtgcaaaaggtcatcgacggcgacatcgacaagttcatctacgcctaccttgatcatgtgagggaggcttagtatgagagaagtactaaatacactctctgatacagtgcgcgccgctgaggccatagctaagaccatagacctaggcgagattgtacttttaaaaggggagatgggtgccggtaagacgaccatcactaaggcgatagttaaggcactcggttcggatgactacgtgacaagtccgactttcgcaatcatgaacgtatacaaggcgaaggaggtctctatataccacttcgacttatatagactcacaaagtccatggatatcgactccttaggtcttgatgactacctatatgatgagaaggcggtgagcctaattgagtggcctgaggcgatagagagtgagttcaaagacgcgaagaggataagccttactaaagacggcgagagtcgtattatagaaacgaattttgattattagaggttatatgaagatattaagtttagacagttcaagtagatatataagcgcggcgcttgcagtggacggcgttgtgagaggcgagttcaacgtctcatacgacaggagcgcctccgaaaagcttgccctgatggctaaggagattttggacatctttggtctaaaagtggatgaagtcgatgcctttgcagtgtcaaagggacccggttccttcacaggacttaggatagccgcggccatgattaaggccttcagctttaaggacaataagccaatttacaccgtgtcttcgctaaaggcgatgagctaccgctacaaagggctcaaatacatcatccccgcgattgatgcgagacgcgatagagcctttgcggcgctttatagctatgaagatgactttgagctgatgaaggaagagagaatctacactcttgatgagcttgtagacatggtaaatggacttagcgctactgtcattatgccgggcgatttctacggaaaatacaaggaaaagttcggtgctaatgtcatagcaggcgtttatagagagaacgaacccatagccaaggaagtcctggactatgtcatagatcacatggatgagataaaggctgaggacagatacggcgcgatacctatatacatgaagtcgtcgcaagctgaggaagacaagaagtgattagaaaagctgagcttatggatgccgaggccatatacgagattttgcaaagtacggacgatgcgtggagcatgggcgtcgtcgaaagtgagcttaaaagtgaaagctctaaggcctttgtctatgtggatgaagagggagccgtgcaaggctttgtcgacatcaaaattttgtacgatgaggcggatttgatgcacatagcggcctcgaaagatatgagagggcagggtattggcgcaaagctattagcaaaggcgcttgaggaagcggaagaaaaacccatcgcattagaagttcgcgtaagcaatttcaaggcgataagcttatatgaaaagtatgattttaaaattgaggcaaggcgcaaaaactattatcatggtgaagatgcgctgattatgtggaggagaaagtgaaacatttagctatagaaagttcgtgcgacgagacatccatcgccatcttggacgacttggaagttttgtcaaatgtcatagcaacgcagatagatacgcacagagagttcgggggcgtggtgccggagattgcgtcaaggatgcacatcgaagcgatctcgactgtacttgagaaggcgctagctgaagcgaagacggacttagaagaaattgaatttatatctgtaacgaggggaccgggactgatcggagccctacttgttggcgtgtcctttgcaaaggcactagccatgtccttggacgtgccgctagttcctgttaaccacatgaaggggcacatcgcagcaaactacataacgacagagggactgaagccgccattcgtttcgcttgttgtctcaggtggccacacctaccttgttaatatgaaggactactacgactatgacctagtcggcagaaccttggatgacgctgcgggcgaatcctttgacaaagttgccagagccttgggactaccgtaccctggtggacctgagatagaaaaactcgctatggaaggtaatcaagatgccatagacttgccacgcgttatgatgaagtcgggcgactacaactttagtttctcgggattaaagacagcggttctaaactaccttcataacgaagaacaaagaggacaagaagtcaataaggctgacgtcgcagcatcctttcaaaaggccgcagtcgatgtactcgcaaagaaggcagtcgatttgaaagacgagctcggatatgacaagatagtgcttgcgggcggcgtctcgaacaataaagccttacgcgaggcacttattaaggaagagaaggcacatggctttacactgtattacccaaaggccgtgtatactacagataatgctgcgatgatagctgcacaagggtatttggaatatgtgcatggatgttgtgggatggatctgagctttgaggttgatccgaacctaggactatagttaatttcacattcaaacgagcccttagttgcttttaattagggatttgttttcttaaaaatttatcggcatgaaggtattgacctttgtgccgatttttaaatgtcaatttttcctataaagttccaataaatccaaatggtttgcttttttaattttgtatctggaatttgttcgaattgttctacataaatcttgtctacaaatgttctaatgatttcaggatcgagttctttaatatctgtatattttcttactatctttaaaaatgactccacattaagctcttcttgctgggatattgcaatggtttctttaagttcagcaatttttgtttgaagcatattttcttcatcatcgtaagctttagccttttttttaaatcgctggtcagatattttacctgccaagttatcttcatagaggctttgaactatagagtcgatttttaaaatcctattttttgcatcttccatttcttttctttgactccttaatgtctgatttaattcactagtctttttctttaaaactaaatctacaaactcgtcctcatgttcttttgcaaaggctgtaattttccttatttctttaagtagtatttcttcgacttgtatattctttattttatgtgaagtgcatttgcctttttgctttctataagttgagcagacaaagtactctctttcatgcgaccagcctttacctcttgcttgataaagttttgctccacagtctgcacagtatagcataccagaaagagctggcatttcacctaagtcatttggaactcttcttgcttttcttatcctttttacaatatcaaaagtttcctcatcgataattgcttcgtgaacattatcaaagatcgcccactcagaccttggattgtctacacttttctttgttttatatgattttctctttgttctaaagtttacgactttgcctagatattcttctctgtctagtataattgcgactgtatcaggactccagttacctttaatcttaggagcactaacaggatagtttatacctatagttttaaagtgttcagcaggggttggtatatttctcttttttaattcgtttgcaatttgacttggaccatatcctttgacacaaaggttaaagataagtttaataacttctgctgcatcttcatcaactacccatttatttttatcttctttatcttttaaatagccataaggtggattagttgatagtggttttccactttgacctttagatttgaatatagcctgtaccttcttgctcgtgtctttagcataaaactcattgaagatattaatgaaaggtgttaaatcgttttctacttgcttacttgaatccacaccattgttaatagcaatgaatcgtatatcgttatctgggaataggacttctgtgaagaatcctacctttagataatcccttccaagtctgctcatatcttttacaatgatattttcaacttttccatcttttattaaggcacttagtttattccatgaaggtctgtcaaagtttgttcctgaatatccatcatctacaaagaattctaagtttttaaatcccatatctaaagcatatttttttagtatgtttttttgatttatgatagaattactctctccttgaagatcatcatctctcgaaagtctacagtatagtgctgtaatcttttcattatctgagaagtaagaagactgtctatttaattgttccatattttcctcccttctgacagtcttcaagtggcaattacatattaccgtacttttcagactatatcaagttaattaagcagataaactcgcttttttaaaagaatctacattgctcaatattaagtctttgataattttatctacactcttttttgcatttttactattcagagaatgaactgtaaaaagagtgccgtatgcttcaatgctgtccgatgccttaatatcattctttttaacatccagcatagtaattatccctctatagataaagtaagaactgaatttttatccataagttttgcatcaaggtattcacgtatgataaagccttggtgttgtttaagagtaaacatctccgacaatctttttattgtaggattttgtctttcaataatccagtaatttgaaaagtcaccaaaagctattggttttttacctgcatcaatatctggcataaagttagagataagaatttctttccccataaaagtgccgtcatattgattccacaggaagctaccttgactatcttttaagctttgaagataaagagctgttttatcattcattatccatttagcattttctctatattcactatctaaacagaagaatagccttttcaaatcatcaagctttacttctttcgtagctgatatgttcttaaccttatcatcgactaatattcctaaaggttctttactaccagagccagtaaggaaagctttatcttcagcctttgcaaaattatgtgcaaatgtatttagaattattttatcgatgtcagtattttgattgctcaataaatcttcgtgtattgtaattaagttagaaagtgtgttatattctagctttaagctcacatctttcatctctaagacatctgaaaacaagtcttgctctccagactttgtccaagtagccattgatttatttggaaaagttacaatggaagatgagtccacatcattattaaaaattgtagctagttttctaagtacactttttcctgcaagcttctctctaaaatattctgtactctctgtatccataaaaggtgaaccatccttgattagaccaagagattgaatatctgtatatgatgattcatttttctttcttaaataattccacaaattagttctgtaggaattacctgctaatacttcgtttctttttaaattttctttcattattatacatgtctcctttatattttatatttggggttaataccccctttgaacctaagtttttgtgcacgagagggcggcaccgttgatggtgaaaagctttctagagatttagatgccccctaggtcacaaattatttttcattaaaagtatatggggcagtgtggcagatgaaaattaaacttcctatatagaatgaaagtattaagtcttatatatttacctgccacatagccacaaagctttatagcttaaaactattttgatttaaaaactctacaagactctctgttcctttgaatggtatgactgtgtcttgattatccagtgtgtacttatatattttttccttaacaacttttataggcgtcttgtcaatcttatgaagaacgattacatcccttaacttgaaagcattatttagcatgtcttcacttacaatttcattgttcctataaaggtgcatatctttacaatatagaactaagtcttttaaatcattaagcttgacttcttgttcatctttcttaatgagatacctataatttttctctctttttaattctgtagatactccctttggggaagtaaccacgattttgtcgtttaaagtaaactttctttctaaatcttcttttgtaagcatttatatttcctccttattttattttttgcttaaagctataattacacacactcataagcatcacctccttaaatgagggcaagtgtggcaggtaaaaaagtattttatatatagatacaagatttacaaattaaatttttcatctgccacattgccacaagttttatagaaattctgaaactaacctatagcctattagaactgtggttttgtgttttccatctttaggtctctttcttagtatgctagctttagattctaaagactgcttaaaggtcttcatgctttcaaggtagtagccattttctaaagaccacgacctatatctttcgtatacttcagaagtcctaacttcataatcacttccttcttctaagcagtcttccataaagatagctatcttatctgattctttttgatattttaatgtggcatcttttactgaattaggaatggttaatccttctttttgtaaaagtttgtagccttcaataagccagttaagaattgcagaccttacctcttcttttgcaaattcagtctttaatgtcttatcttgctcatcttcagtaaaatgtctgtcaaagggaatgatgagcattcttccacttgtgaatacagttacatcattgactatgggtaagtaattggtgttgatgtagattttaaattgtggtttaaagtcaaaggagttctcgtgaagaaatctcgcattgatagtatcgttaccagttaggctttttacttgagcgacatttaagggtagtcccttaccaggctctggaatatttacaaagcgtacaccagcaagtctcgctatctcttcactgggtccagagctgttcactttgtttttaagagctagtgtctcaggtcttgatgcacaggcataagtaccaagaacttttaatatggactcacaaagagttcctttgccatttcttgtagtcattccatatagaattgccatacattcatatcttgtatcgcctgtaagtccataacctagtatcttctgtaaaaatttagctttttctttatcaccactcataatttcatcaatatagctaagccacctattgttttttaatttagagtcatagatgacatcagccatcttgcttaagtagtcagaacttctatgctcataaaattccattgtccttagatttaaagttccattcgtacagttaagaaggtaggggtctttgtcaaagtctgaaacgtttaaaggatgatgaacttctgcatcttttaaaacgctcactctgtagcctcttgcttgccacctacttgaaaatttaatgtaggcttttcttttatgctcatcgtcgatttcgagagcaagtgtgtgcataaagtttgcaagcttcatacacagcttcatagccttcaagcttcctgtatcagctatccatatccctttttcatagtaataccaggactttctttcaggaacatatcgaagagagtcttcgtaaaagtctgcaaagatttttcctgcacctatatctgtccatgagtatttagatgataatggtagtcccatttcttttaatttttcaatgccatactcgaactctagatttggatctgtcctttgaattggcatgtatgtttcttctaatgaattgatagctttttcaatagtcatttcaccataagtttttcctcctctgttttcatcccacttttctctaaatagttttgattttctaaaaagcctatctacttgctcaaaactgccacctgcataaaaagcaagaattgatgctaaggctaagtctgcttcacttgaagaagggtagtttttaatatctccactccatagatttaaaaacttctctttattactagccttagatgctttttctaaaatctgctcatcacttaagtagcttttaaaatcttgtgtactagacttgatttgtttttctcttttcagatatttttctaaaagccatagtagcccatcagattcttctacaatatctccttcttgaaaaatatttcctgtaacagttacaaagcgattagtaaagccagcaacatatacttcaacctctttagttttcatcttatatatgctattgtcataagctatagagtttggtagaaaagtaaagattctaagacctttgccacttggactaaattcaatgtatgactttggaaagtggctaactatttcttttgccagaggatttaagtcatcattaagaacacagtgatccacatcaatagctacaagattattttcaactcttattccaagtccatcatatgaattaagtttttcagctgctttttcaaatgatgagaaagttcttgaatcatcagcagatgcatatctttctgtaattggattgataggtatctttgtttccttatcctctcttatttcatacttccatagacaccagcttgtattttcttttaaatattctggtatattttctaaattcacatatctactcctttcatattttttagaagaagaaatatccctctatattccttaggacacttagaagagttttgagtacttaagacaattctttcaatgtagacctgtaaagagaaatctccatctactagtcctaagacaaatttgtatgtcttgagtaattaaatattaataaggttagttttcttccttcactagccctaagacatttttgatagtcttgttaggttttatttttccttccctatataacaggcgaagaaaacttatgaattttaaccctatagaagaaatattttttccccttcactagccctaggacaaaaatcgtggttttgattagaaaaagacggaaatatatccgtctttagaaatttataaggattaaattgtaaaatgtggtataatgttgtaagatggttacgtaaattagaaactttagttttgattgatttagagattttcatttgataaatttatgcgaaaattaatagatgaaaagatgaataaactagacttacaaaaagctataaatacaactcctcataccatagctaaaatgggatgagatgagaatgtgagtatggagatactttgtagaatttgtaagtattttaatgtgatatatcggatatattggaaattagagtgaaaataaaaaacaatttagttgactttttttaaatgttgagcaatatattaattacataataatacataattttgtggagaggagaaggttacacttaatgaataataacgatttggtaaaatcttttattaattattctaagaaatatttaatggactattttagccattattctattcattctaatttgtcattattagatgtttatcccttaaaatatcaaacaactagctctgacttggacatgagcattgattttaatattgatgcgttgcatttcttaggaaattattatgagcaatcaatacctataaaactaaaaaaagattatggtagattctttacgagtgatgaagaattaataaaagttatgattgatgaagtagatttattatccggtaagatattagaaccctcgtgtggttcaggaaattttttggcaattattattaataaaataattaaaaccttaaaaaatgatgggttagattcaaaagaaataattgagtatataataaacaatgttaatgggaatgatattgatgaaattgctattcaaatttcagagctaaatgttctcgcaagtcttatgccattaattgttgatgccactaataaggatcctacctacaaaattaataaactaggacttgaaaaatatgactttattgataaagatgaaattagaaagaaatattctgtcataattggcaaccctccttttgtaacaatgtatgggaagagaagtcgaaatatgactgaatcaaaaagattatattttaacacttttgattttgtagttaataaaaaaggaaacaataaatttaatacatctatgttttttattgagaatggattaaagtcattaattgaagatggtagattaatttatattttggatattgcttttttcgagacagcatataatgatattagaaagcatttgattcaaaattataaaatcaatagaattataaaaggaataatgtcatttgacgatgtagctagtggacaaattattttagatgtttctaattcaaaaaaacaaaattcaataacacaatatattgattttgaaagaaaaataaatgaaaaaatagatcaaagttactggaataacgaggataatgaatataaaatattagtgcctttaaataaatatgaaaagtctataacagaaaaagtaactaaatttagaaaattagattattattttcctaaaaaaggactaaggacctgctgcgcattaactggtagaacgaatgattttatagtaaaaaaagatagtgatacaaataatgaaatatttccatatttagaaggtgcaaaaggattagataagagatttggcgagttaacaaatacaaaatttattaaatatgactatgaattacaactaaaaatttctaatgatttcaaaaaagaacttcaagctaaaggtgtaaaaaacaaaaaaagaattactttaggcgacaaggaagcatatctatcccctaaagtttttataagacaaagtgcaactaaaataatagcatcatatacagaggacccatatgctgctaataatagtttatatattttgactaataaaaaaaatacagctaaagataaagaacttcttaaatacacttgtggcattttaaattcggatttaatcacatttttttgcttaatccataaaataatacgaatagaaagaggcaaaacaccccaaataaaaatttctgatttaaaaaaaatatgtataagttataattcaatgtacaaagaagacatgatttatttggttgatcaattgttagataatccaacagatacaaattttaataagagattaaataatttggtatatcaaatatataatataagcgaaattgaaattaattatattgcacaatttttaaaaaccgtctaattattataattgacggtttttaaaataagactatttttgatattgtttaagctttgatctaagttcattaaacctagaatctaattcatcccttttccttaattgttttgaaatatttctttcaattgattctttatattttatataaaacagctctagaaattcttctcttgatctatattcctctggttctttaatattaacctgaaattgaggtttagggttgattctaactgtgtgattaatgtcttttaaaaattgacatttcacatatttaccattagcaaaagatataaattttgttttatcatcgcttgtagactcatattcaaaaaatacatataataaataaaaatgaccatctaagataaaattaattatcttttctggcgttcccatatcaggattgctatcgtcataattttttttagtagctttaatatctccccagataagatcatcaaaattgaaatcttcacatttgtaattaaaacaaatatcatatggatttttggtagaacccttaggagatcctttcggatcatatattctttcatgtgaattttgttttaaaaattcaacaaaactatcttctaaataatcacttatttctgcaccactcctagatcttgcactaatatttaataaataattgtgctttttgagtatagaattgaaaatagtttcgatgtcatttttcattaacatctcaaattgcttaacatccatcattaacctccaaaataaaataataatatatatttattatatcataaatgatagttgttattcaaaaaatattctagaaaataatgtagcataatgttagtaacatttttcctaacttcttatgagatgtttttatatcaatcactaacgagaaaaggaataacagtaatattatatggcaatattgaacttgaagtttataaatttctagatagttctactatggaattgaaaatgccttaattaaatgctacaaattataaagtacttattatgcaaatactataaaaaattgctataactcaattattactaaatatatagataaaattaatggtattttatattttataaataacaaaacatttaaagttggaaacaacttcaacacaaaattaacaaatgcaaaaacactagtttatactgctgaataaaattaagtactcttgaagatataaaaatatatctatgtggagattatatgacatcagtaatgaaaatcgtgatagcgccatcataaagtttagaacatttttgaagaggtatttttatgtaatagagaaacaaattgaactccagacttgagtggtaatatacaaaaattaaatagataggttataaaattctataatatgtacgcagatacaaattttgataaaaggataaatacattactttcagtaccaagtagtatagtctttgaatatctgaaataagaaatgacagtgattttaatggggtgggttatactagaattaatattgaaaacattatatattattttttgttatttttcaaagtctattgcaaattttgcttatcaatttagtataaacaaatgtaatctatagaattatttagaactttgagtttcatgaatatgtaaaaaggctatgagagttcaaactcatagcctttcctcttgccacctaaagactttaagaactagcttttataaaatccctaattcaatgcgcccttgaactcgttccctcctcggcaatgctcaggtatgactatacattccgcttgcctcgtcagtccacatcgtccaatcatctcgtttgctttgtgaaattgtgtttgtgcgaagcaccaaggttctcgggacccattcaaagcgaagctttgtaaatgggtgaggttcttcaatttgcgccttgcgctcattcgcttctcggcaatgctcaggtatgactatacattccgcttgcctcgaagctccatttcgcgcaatccatcatagcgcaaaggttttatgaaaataaatcttgtaaacagtatatcagcataaaggaggaactcatatgtctaaggtgaaaaaagagacgattgaagcaaaaggctttgctattcaaatttatactgaagactttcaaaacgattatataagtctaacggatattgctagatataaaaataatgatgatcctagatttgttatacaaaactggatgagaaacagaaatactttggaatatataggtttatgggaagttttgaataatccagattttaaccgtgtgcaattcgacacgtttagaaatgaggcaggacttaatagattcactatgacaccacaaaaatggattgattctacaaatgctattggtataatatcgaagtctgggagatatggtggaacctatgcgcattatgatcttgcgatggaatttgcttcatggatttcaccagaatttaagctttacattattcaagattataagagacttaaatcagatgaaaattcaaaattgtcactgggttggaaccttaatcgtgaaatctctaagattaactacaaaattcatacagacgcaatcaaagaatatctcttaaaagatcttaccaacgaacagttgtcttataaatatgcaagtgaagcagacatgctaaatgttgctttatttaacaaaagagctaaacagtggcgtgaagaaaatcctgagttaaaaggtaatatgagagactatgcaagtctgaatgagttacttgtacttgccaatatggaaagctataatgcgattcttattggaaaaggtatggagcaaaaagaaagaatgatggaacttagaaaacttgctagaacacaattaatgtcacttgaaaaacttggtgatagtggcattaaaagattagaaggaaagtaataataacatttagtattttattagataaacaaattagaagttgtggaggatgataaaaatgattagatttgatgaaattacgaataaaaatatttggaaagtttgtgcattagagccatatgaagagcaaaaagattttgttgctgataacatacagagcttggcggaagcatattcaacaagaaatgaaggcaataatgcgttgccgcttgcagtatatgatgataacaccctgattggatttgttatgatcggaaaaggaaccgttggcaatgaagaagaaagtcctttaatcaaagaaaactactgcctctggagactaatgattgataggaaatatcagggacgaggtatgggaaagcagacgattgatgccgcaatcgatttgatacgtacattcccatttggtgaggcaagaaaggtatggttgtcgtatgaaccagaaaacactagagcaagagcaatatacttaaagtatggcttttccgagaatggagaaatgtgtggcaatgaaattgtagccgtgtatgatttataaattggaactttttcagcttattttaaaattgtagattcatatatagatttcgacataatgtatctagatttaagatagacaacttccagtttgtagcattaacaatccacctgaatatgcaattttcatttaggctgtgtatagcgcaaaggtttttaagtccatgcaccaagagaacgagtgctagcgatgttcgattggctatgcatgccttatgccagagtttacaaagagacggaacgaagtgaacgtcgatttgcttaaacttacggtaggacttatagtcctaagttcttcaattaattatcatctcaagagttttgactgagggtttgaagaaggaattgaatattagttagttaaggaaggtctattgaccttccttttttattcttttgcattcaaacgagcccttgaactcgttccctcctcggcaatgctcgagtacatttgtacactccgcttgcctcgtcagtccacatcgtccaatcatctcgtttgctctgcaaaactatgaagcgattctatggagtatataggaaaaatcctaaaagacaagtactatgtgcttgtctttttttatgtcatacatcaatgccgcgttcttgcttataaaagtttattgtggtataataacagttaagggaggttttactattaccactacaagcatcaagaaaaagtttttctcctatataataccgtcgctctctgccatgatcatatttagtttatactcaatggttgatggcttcttcgtgagcaagtacgtcggtgtcgaggcacttagtgcagttaatatttcaacgccatttatcaatatagtttttgcgcttggtataattgcagcggtcggctctcaaacgatgtgcggcgtctttatcggcagaaaaaactacatgaaggcaaacaagatctttagcttcaacatattaaccgtggcagtgctatcggtcttattgactcttattttttatttcaatttagataggatagcgacacttttgggtgcaactgaggacctaaagccgcttgtcctaaagtacattggctacatagtctactttgtgccattcttaatgatttcgtataacttcgaggtcttggtcaaggtcgatggttttccgcgtcttgcggtcgcaaccgttatcacttgcggactaagcaatgtcatcttggactatgtcttcgtcggactcatgggcaagggcctagagggcgcggcggtcgcaacaggtatctcgcaggtcatctcgaccgtggtctaccttatccacttcacgcttggcaagtcgaacctggagtttgtcgaggtcaagttctcatttgacactcttaagtccatattctccttgggtgttggcgacttcgtttcagaggtcggcatcgcgatgatagttttgttctacaacatattcataattcgtttccttggtgagaagtccatcgcgactttctctgtcgtaagctatgtcaataaccttgcgctcacatgctttgcaggtatcacgcagggcacgcagccacttttgagctattattatggtaagagggactacgatacactcaagaagctcttccgttacgcaagctttgcgatacttataacgggaacggtctttttgctcgcttcgcaagttttagcaagagagatcttcaatatatttttagatgtagacgaagagactatgctctactcgatactttcactaagaaagttctcggtctcatttatgatcacaggcttcaacgtcttgatagccgcagtctgcgtttcgtccttgaagccgaagtactcggttgtgatcaatgtcttgagaagcttcgtgatgatctacctcgcactctttgtcttgacaatgatcgagccaacgctaatatggtttgcttcgagcgtatcagaagcactgaccctagtctttgcatttgtattttataagaagctgagtaaagaaaatagagaacgatatgagtaatttcttgataaaatgcaaaaggctgtgagattaatctcacagcctttttatattatatgttatatttaataatctacggtttcgccacttttgtactcgtttaaaacatcacgctttaatttcttcacggcctttggcatgttctttttaactcttttaaattcattcaagagttcttcaccttcatagccattattaattagatcttccaagattaaatccgaaaagtcatcaagctcaactgcctttgacaatatgatcttgtcatcttcgacatcaagcttaagctcgtcatcaacattgatacctagagccgatagaactagctttggcagtataatgccttgggagttgccccacttttttatggtaatgttcataatatcacctcaagtatagtttatactatgtataactatttgtcaagatgtttatgtgaaattgaaataaacaaaaccagattttgatgagattggagccagacatcgaaaattgctttctctcgcatgctgcgcctacataaattgtattagtaatcgaaaagtgtattactcgtgacttaggcttctcaaattggaaatttctaaaagctcgatcgcttgcaaaaccatattcgttcgctacgctcagctagatggttttgcggccagctctcttcgctaataaatttcacaatttgttcagatgcgtcacttcgttaataacacttttctcttatttgatagagaaaacaaaatttttatcttactatagaccgtgctcgttaaaagcacttttctcgctaaagagttctaaactagtcaagagggcaaatcgaacgaaaaatcagatttcttagataaaatgcgatgattacacgaaatggagcttcaaggcaagcggagtgtacaaatgtactcgagcattgctgagaagcgaatgagtgtaagggcgcatttgaagaacctcgtccaaataaacgagaaccttgatactttagtataatcaagaaagcctatcttatatctataacttcgtcgtactcaatcccatcatccccatcaggacctataactgcaaagcttgcatcttctaatctatgcaatttatccacatacttttcttttaatacgttcaaatctgtatccaagatctctctatatgcctttaggtcgtcttcttcactcattccttgcagcattctcacgaaggcaagcttacctttttgtcccttgccatatgccttattgtacttaagtgtcgaggcaatctttcttctttcaagctcatctttatcaagctcgaagctcttcaagaagtctgcggactttctcatcacttcaaggcttcttgcaaggtttggatctctaaatgtaaactctgcaaggtaatctatgccggcatttagtccatcgccgtaggcaccgcccttggcacgtatctctgtgtgaaggtagtcgtttgagactatctgtcttagcacttcgacgtcgccactattgtcctcgtctacatctgttgctacagcgttgaagtagactttggacgacacaactagctttgtgttcttcttatccctcttatgctctgtgcacacagcagcagctgggatgctctcaagtgaggcttcaagtgcggctactgccttgtcaagctcatctatcctctcttcgtatgagtagtgagaagtgaagccttccttcctaaacatagtcttaagtagtctttggtagtcacggatctcctcatccttaagttcatcgaaattagctttgagcttctttacgtgtatgaacttttctataccatggagcttaagtgtaagcctttctttctcaagtgtttgcgccttcgccacgtccatggcaatgttggaggcgatattcaaaacgttgttgtcgaagtctgagacgctctccaaaacgttcatctttagtactttctcatcacttgggtcggagcacttgatgatctcgtctataagtttcatagcatcagctgccttgtctttagtaaactttgcgctgcattgaacgaatggcgtaagcttaccgctcttataattcttcactacgcttgaagcgaaatttatcgagccggtagttttgaatatgtctgtctcaagtttttctctagatgacttcgttgtcttgatgtctgctaagagatcaacaaggtttgcgaccttgacgtagtcttcctcggctatgtgcgagatatcgaagaataggtttaggtagcagatcttgctgtcttctttggagtagtatataaagtcttgcaccttctcaagtggcagcttttctatatcacgcggcaagtcctctagcttaagagcgggtattgacgcaatcgcttcctttgtgtcaggctcttcttgcatagccttaaggtcttcattctccttaatcagtgcatcaagctcttctggagtgagtgaagccttgtacttattaagcgcgtccctctcttcttcgtctctttccttgtagaagtccttcacagggtagaagtccagcatcttgacatccttatgagcggcatttacaaagtttataaaggcgctttcatccttcttaagctcatcaagtgtctcgttgaaggcaaaggcgctcgcaggtgacttgtcaaatagccacatagcaaccgactttagcgcaagagctatgcccttagtagcagtgtttgcgaactccttaagtgtgaagtccataaggtttagaaccgactcatatatgtccttgttgatgcggccagacttgatggcatcaatctcatcatgggcagcctttttaaactcctcaagcgtacctggctcggcatcctttagtataaggctaaggtctgtgtaattgccattaccatagccatagttggagtagctcaaaaggtcagaagctatgcccatctcttggatctttttcttaagaggggagttggagaagtagctaaggtacttactcaaaaactctgtcattatgctatcacgcgtattgtcgatagcgcctgtaatgaaggcgtaggcgtagttgtgcttgtctgagacgtcatttgggtaggcgcgctcaaagacacacttcttaggcttaactagcttcatgccaatattattcgcaatgtccttgtactcgtaggcggataaaaattcgtctaagtgcgctagctctgcgtccacatcgccatcaccataaagcacgatgtatgagttcgatgggtggtagtgccttttgtagtagtcaagaagctcatcgtatgaaagctttatgatctcatacggatcgccgcctgagttgtacgcgcagtaggagtctggatatagctcctcttgcatagcttggtagatgaactcttctgaggaagacatagctcccttcatctcgttatatacaacgccttggtacttaatttcttcatctttattaaaaatttcgcgtctagtgccttcttgaaggaagactctcttgtctgttaatagtctcggattgaagacagcatctaggtagacgtccataaggttgtagaagtccttcgcgtttcttgatgatatcgggtagacagtcatgttttggaaggtcatcgcgtttaggaaagtcgcaagtgatgacttcgcaagatccataaacggctccttcgttgtgtacttcttcgagccagatagaaccgcgtgctcaatgatgtgcatgatgcccttcgaattctcaggtatagttctaaaacctatcataaaggctttgttgtcgtcgtcgttctcaaactttatgaccttagccttagtcttcttgtgcgtaaaaattttataagcagagcttatctcgtctataaatccactctccactagggaaaatttctcgttcatttaatcacctctcatgtattatcttaattgtaacataggctactttactatgtcaatggcgctcgcatccgtaagcttcactagatcagagggacttactttgatttgcaaaccgaccttgccaccgcttacaaaaatatattccttgtccatagctgatatatcgataaaggtcttaaggcgcgtcttcatgccgatgggtgagcagccgccatgcacgtagcctgttagtggaagtagatccttttgcttaagcatgtcgaccttcttcgcctgagaggccttcgcagctttcttaaggtctagctccatagccacgggaactatgaagacgaagtgctcacctttgttcgactcggtaactagagtcttgtagaccatgctcacgtcttcattcaaagtcttggcaacgtccacgccgctaatgccgcccttggtatcgtattcaaactcttcatatttcacgcccgctgcatcgagtaggcgcatcgcatttgtttttttcataatatcacctaagatgattatacccaaaactattgccctactcatgcatttgtgctatgatttaactaagaggtgagactatgttacttgttaaaaacgcgaaggtgaatggcgaagttatcgatattttatccttagacggacgcatcactaagcttggtaagaatacccacaacgcttatgctatagacgagattgacttagaaggaaggagggtctacccaagccttatcgatggccacgtccatgtgacaggcggcggcggagagatgggtccgacatcgagagtgcctgagataaagtatggtgatataatcatgtcaggggtaacgactcttgtgggactacttggcacagacagcgtgactcgctctgtggagaaccttgtctctaaggtcaaggcactgaatgaatacaacataaggagctatgcactcacaggtgcctacgagtatccatccaaaaccataacaggctcggtgaagaaggacatcacatatatagctgagatcataggatgcaagcttgcaatctcagatcacaggtcaagctacatcactgaagatgaacttgcaaggctcgcaagtgagtgctacataggtggtctcttcgcaggcaaggtaggggagctgcatatgcatacaggaggaatgggtaaggaaggcctttcgaaagtcttccacgtccttgaaaagcacgagataccgatcaaagtctttagaccgacacattgcaagaacgtagtagaggatgcgattgagtttatgcacatgggtggatacgcagacttcaccgcaggcagcggccttgacgcaatcgactacgcgctaaagaaggcgccatttgataaaatcacgctatcatctgactcgaacggctcagtgcctatctggtcagaggataaggagctcttgggtataggcgcggcgaagataggggcactttttgagactataaaagagcttagagataagtatggttatagccttgaagacatgattaagcttgcatctaccaatgtcgcaaaggcactcgagatagataagataacaggcgagatcaaagagggactctcactcgacatcatggcacttgatgatgatgacatgattgacacagtcattagcaagggagtcgtcgagatgaaggagaagaaggtactgcgcaagactaattttagcgatttttaggaggaattatgagtataatagcaacttggaagatggcatacgaaggcactttgctcgcacgtaaggcacttttagagggcaagactttggaagaggccttgattacgcttataaaagatgtggagctaaacgagaattttcactcggtaggctactcgggactaccgaacgaggaaggcatagtcgagtgcgacgcagccatgatgaacggggacaacctgcacttcggtgccgttgctggccttagaaatataaggagcgctgtatcagttgcacgcacgcttatggatagaagctacaacaactttttagtcggcgaaggagctcttaagcacgccatcgccatgggctttaaagaggaagagatgcttacagaagaagcgaagagacgctgggttgaagagagggcgaaggatccaaaggtctacaagggtcacgacactgtatgcggccttatagctgaagaaggtagagtcattgcggggacatcgacatcgggtctctttatgaagaaggtgggacgcgtgggcgactcgccactagtgggaccgggtctatatgccgacagcgacataggagccgcagccgcaacaggcgtcggagaagacataattaaaggcacactatcttatagggtcgtctcactaatgtcagaaggactaagcgcgcaagacgccgcgataaaggcagtcatggatttagacgcaaagcttagggcgaagggcgaagagccgcgcgacttctcagtcatcgcagtagaaaagagtggcgcgtggggagccgcatcaaacatagccgagtttccattcatagtaagcgaagaaagtggcgaaacgagtatctacgtagcgagagactttggacgcacgatagaaaagattaagtagatggactttgtatatagaaaaggcgaggactaaatcctcgccttaattatatctgcattgtttttaatatccgaagctctatcaagaagctccttgtaatatctttcatcacttcttatatatatgttctccatagtattgctacttagctctgcctttactaaaatcaaaaactcgcctctctttaattttatgtcctttgcttcactaggcaaaggaactttcatatcattatcaaaaagaacattgatgcatgcattcaaaacttcacttgtgtatacaaataattcttccaaattgtccgcatcagtaaagcaagcgtcaaaatcaggaaaattagcatagtaagtttcgtcttcataccttactacacatggataaacagaaatgtttttcataagagcctccttttgtacaacttgtcaatattaatataaatattttaaaaagccactggcaaatatgctgccgccatagcaactacaagtgcgggaagcatattggcaacgctgactctcttatcaaagagtaggtttatgcctatgcacgcgattagtacagagcccacaagcgacaagtagtctatcgcaagatctgttacatatggcgcgatgagcttagaaagatacgttatgctcatctgcaagataaagacaggcacgaaagagaatgtcgctcctttacccatggacgcggccatcacgaagacaacgatgaagtccaaaacagccttcaaagcaagagtttggtagtcaccagttatgccttcttgcatagatccgactatggccatggcgccgatggaaacagtaagagatgtcgttacgaaagcagcgataaagccttgatccgagtcgcttttagtctttctcttaaggtaggcaccaaagttttcaaagccttcctcgatacctatgctctcacctataagcgcgcctatagcaagagagaccaccacaagcatggctctgccgctcttaagcgtgctacccgatatacttagcatgccttgcatagtgccagcaagtcctatgaagaagatgctcacaccagatgatagcacgagagctctctgcacctttggcttgaagaccttagctgttagccttcctagtatgcccgctactatgatggccaagcagttaattagtgtacctagacccattagtcaagtgccttctttaagacttctctaagcgcctttgcatcaggggcatagtttacgtagtacttacttggctttgcaccgaagaagacagccttcatgccacttgcaagagcaccgaagacgtccgagtcaatgttgttgccgaccatgatgcactcacttggtctaacgcctgccgccttcatcgcaccgaagaagaactttgtgtcaggcttgccataaccgaagtctcctgaagcaaagacgtagtcaacgagcttatcaaggccaagagtgtgcgcctttctgtgctgcacctcactgatgccgtcagtaatcacaccaagcttctctccagcatccttaagctcctttataagctcaagcatgccatcaattgcttcagtgtagtcgaagcgtctctttaggaaggcttgaagaaattcttccttagtagcgcctcctagtatgtccttgacgtcattatatacaccgtccttgaacagctcaagtctttcttcctcgtatggctcctccataagtaagtagtcaagagggtctatgccgatagtttcgttgtaggcaaagtccatgtgtctaatcatgcgcgagcgtagagcagttctaagcctgcccatgaactcatttggatccatgtctatgtgcaaatccatctgtgcacgttcaaatattagagtgtttatcttggcagtttctaagactgtgtcgtctaagtcaaaaaatatcatatagtagttacctccgttaaaaattattcataagttaacactttcgcattcgaatggcgcctagcgctcgttcgcttttcggcaatgctcgagtaccgtttgtacactccgcttgccgctaagctccacttcgccccatccatccattcgctctgcaaaagttgatattgcgattgctcgcctccattaaaaattatttataataattacattaattacaataatagcatatatattatagcacattctccaagttttgtagagctagattgaacgcgaaattttattctttgctccacacttgccacttcttcatctcgttcctacgcaagtccttctcactacccgcatctctatactccctaagcttctctagcatcgcctctttgccctcagggaacttcgcgagtactggcaaaggattggtcttgtgtgtcgccttgatcactgcatccatgtctatgtgctcaagtatgtagatctcttcatttaaaacttcctttatcgaaagtcttctaaacttcttctcacgcacatagtcttttagaggcgctctcttaaatataaccgtagttacaaagactacttcgaatggctttatcttgtttagtagctttgcagtttcttctctatgcacctttgtcatatccttgccaccgaggccgagcatgatgtagactgagtattttatgccgagtctctcaagcttcttgcaggctctcacactatctcgagctgtgtgacctttattgtgaaagctaagtacatcatccgagccgctctcaagtcctaagcacagcctatcgaggccaaggctcttaaggcgcagtagctcctcatcgctcttacgaagtacatcacttgcgcgcgcaaacatcgatatgtagtccacatcgaagtaccttcctatgagtttgaagacgctctcaaggtatgaagtcttcacgcacaaaggattgccctcaagcagagtgaacttcttagggctgcgcttcatcttagtatatttacttttttcgctcttaaggtagtcttctatgtcttcgagcttaaacacgtgaaacttttgcctgaagttaaggtcgcagtagaggcacttgtggtaggaacagccacttgttagtggcaccataaggttgtgcatctcaggcataggcgtgtacatgtatatggggtagaagccttccatatatatcacctcttataataatattagcactaaagtgagatcatgtcaaaaaaacagctatgatttttcatagctgttttcgttttacaccttactttttaaattttttccaaattacccttgctactattattataaggataattattactattcaatcactagtgatgcctttagctggagcttctttttcgtctttacttagctcggtatgctctataagcttatcttttccatcctttaaaaagatgatgtagtcagcgtagccttcctctgccatcttttcaagtggaacgaagcgtagtgcagctccgtctatgcaatatctaaggccgcctttatcactagggccatcattaaagacatgacctaggtggttcttgccatgaagacttttaacttcaacgcgcttcatgccatacgagtcgtcctctctatatgcaaggctgtcactcttaatcgctcttgcaaagcttggccagccgcagcctgcatcgaacttttcatccgatgtaaagagaggctcgccagttaatttatctacatagatgccacttctccactcatcatttagctcggaggagtgtggatgctcagtgccttcctttctcatcacgcggtagctcagctcgtcaagtagctccttggctttctcatcgctgacttccttatactcactctcaaacagtggctcatccgcctcagctaggttgatgtggcagtagccgccagggtttttatccaagtagtcttggtggtagtcctcagcattgacaaagttcttaagagcgctcacttcaacagctagctcgccatgaagcgcctcctcatagctatacaccttgtatatggcctctttatcagcagcgtcactgtagtaaatgccggttctgtactgtctacctctgtcgccgccttgcttgttaacactctttgggtctatgaccttgaagtagcgaagaagtatctcttcaagacttatcacactcttgtcgtagactagttttatggtctccgcgtgatcagtctccttaaccctttggtagtcagtgtcagcgcctataccattggcatagccgacagtagtatctacaatgccattcactcttttaaagtagccttccataccccagaagcagccgcctgctaggtatatagttttgtatttcataatatcatctccatatatattctcactacatagatacccattcactattgaaatgatactctctaagtgttataattatcataggtgatgaaatgagagttagaagaaacactagtgtttacataaattttgaaggtagaggcgagggtcaaagagatatgagtaaggtctacgcatgtatactaagcgcagtagccgtagctttacttgtcgcgttttactttttgtatagatacacaacaagccatgtatatataaaggaagcgagtgaggacgcaaggacttatgaagagatctgcaaagagactacactcgaccttgagaagtttaataaggcagatgacaagttcaagatgaagatagacgacgcaagttttattaaggcgcaagcagagtattttatgccgcttgaaccgaaggagaaacttgacaagaactttgccaagtcgtacaaaaaagtcttcgaagacgaataccttttcgctggcgatgccaaactgataccactgaagctcttgaaggcactgtcgcgtaacgagatcagactcattaaggcagagatacttgcgcgccacggctatgaatttaagacaaaggaattcgctgattacttcaaaagaaagtcgtggtacaagcccgatgagcattacaatagtgcgtttttgtcgagtactgaggcgcagaatatagcgtttattgtacaatatgaaaaagaactcgatcgcaaataaaatttcttaataaaatgcgcccttgagctcgttccattcacggcaatgctcgcttatttcgcattaagttgagctcttttgctagttttgaatttttttgtcgctgcggagtgcgcatttgcacacctcactccaaaaaattctgtacaacgctaaatcatctcgtttttcctgcgaaatttactcggtgtatatatactgataaaatattttgacaaagctaattagtgaggagaaaatatgtttatttagatcaataagtgagaaaattgttattcacgagcgcagcattcggagaaaactgtttagtgagaaaagatatgttccaaaagaagcgcattgagacaaattgcttcaattgctttgcgtaggacgacggccacaaatccatctagttgagcgtagcgaacgaatatggatttgtagtcggacaagcttagcaattgtcaatttgttgaactaagcttcgtggaactatcttttcgatgtgcgaacggatatgagatcacaggtgagtaagcttagaaatttccaatttgagaagcctaagtcacgagtaatacacttttcgattactaagacagcctccataggcgcagcgagagaggtaatcacttttcgttattcagatcatattaaatcacttttcgattaataatgcattttcgtagacgagcaagtgagagaaaacaattttcgtgatacacgcaaaacaattttttatgaacaagagaaaaacatatggagcttatcctaatcagataggctctcttttttgtttgaaaaaagctatattatggtataaataagtataatcaatattcatacaggaggtaatactatgaagatgaagaaaattttatccattgtcctagctttcgtcttagtactaggtactatgagcgcaagctttgcacaaaatgaagcaatgagcaataaagacaagattgactaccttgtttcaaagggatatgtcaaaggtgacgcgaaaggacttagactagcagaccctatcactagagaagagtttgcagctatgcttacaagaacacttggcaaggaaagtcttgctgacaaggcaatcaacctacctagcaagtttagcgatatggctatgggacgctggtcaaacggctttgtcaatatcgcaagcgagctaaagatcatcagtggatacgaagacggcactttcaaacctagaaacaatgttaggtatcaagaggccatcaagatgcttgctgtggcagctggcggaactgatatcaaggcaggagaaggtgctaactgggctctaccatacatcacatacgctgcaagtaatggcgtgcttgatggacttatggaccttgattacaaggcacaagctagtagggagaacgtttttgtaatgatatacaaccttcttaagggtatgaaggaagctgatttatcaaagcttactgccatagttacaaagacaaatgcaaattcaaatctaagtgaaaagcaagcagagatacttgtattaaaatcaagcttagatggcttcaaagaaggtaaggcctacatcattgaccttaaagacggcatggaccctatggacatagttggcaaggtatacgacctagacatcgaccaaaagaacatgattaagacatacagagacagcgccatcgcaaagactgaaatcgcgcctatcaatatcaaaggtgcaagactatatgtaggagactctactaaggaatcaacagttcttgaagataaggctgctcttacagagcaaaagttccgcggaggagctgttaacggcaagtactttgatttattcaacgactttgctaaagagacaaactacaaggcagaccttgcatatgtaacaagcgtttctgcaaaagttgtctatatcaaggcctacacattcgaagacatcatgccacttatctcttatgacaatggagcagttaaagttcttgacgacgaaacaggcgctattgtaaagagaaatcttaagaaggcatatatctataatgatggcaagcttgcggcaatagaccctgctaagcttgaaaagtacgacgttttgcacttctacgcaagtgatgaggctatagtcgtaagaaataaggtagaaggagaaggcgctaagtacaagatcagtagagatggagccttcatcaacctagctaataaagactacaagctatcagatgaaaaatcaagaagagccgttgcaactattgacgaaaaagtattcacacaagtgaacgcacaaaagtacaacgacgaagtaaaactactaatcaatgaaaaagttaatcttgcactagacatctttggcaatgttcaagtgatctacggcaagctttcattcgatgaagacgtctttatgatagacagagttactacaaacgcagtcgctcttattgacagagacggcaaagaagtgagagttcaagactcactagaccttaagatttataaagatggcaaggagataagactatccgagcttaacaactacgacatggtttacgcactatatacaaaggatgcagtacaaaaactatttgtattgacaggacacgctgactatgccaaggacttcaagccgcttgacagagatgcaaagacatacaaggtcttcgcacctacaaagagcgttaagagaagcactatctacgtggcaggcaaagaagtgaaccttcttgacaatactttgctatataatttagtagaagtaggcaaggactacaaagttgaaactattagcctagatgaagtaaagaacgcaggctttaataagacagtaacagcttatgtattcacagttaaggacctaaacgcaaaagacgttactaagtacgacagcttccgcggcgcagatgatgcaccagttgctatagtatttaaaaacgttgaaaagaagaaagtagttgacacagaagacatacttgagctaagaagcgactacgattccaaacttgataagtccttcgaaggctacgacaagacaaaaacacttagagtctacgacacagacggcgcaagcttccctaatgctaaagcaggcgatatcgttaagctaagccttgacaaagataaaaaagttttaagagtagataagctcatcacaagcctaagcgaagagtacacaatcacaaacgtattatacgacgcaggtggcgcagaaaaattaatccttaaagatagcaaaggtaaagttcaaaacctattcacaaacgataaaaggatagttttcggcaagaactatgcgaaggatagtgtgattaagattgcattaaatgagagtgcagaggtgtacgtaatatctgtaataaagtaatttcgcattcgatttgcgcctagagcttgttaatttcatacaccaagagaacgagtgctagcgatgttcgattggctatgtatgatttattccagagatcacaaaggtgtcgagcaaggcgaagacagctttgattgatcttacggatcgatttttgccaatgctcaggtacgatctgtacattccgcttgacaaaaatctccacatcgctttatccataaatttttccagcaaaatctttggcggggtatgtatagagaggcggttcatcgcttcgtaaaaaattagcttaattaaaatagggatcgatataaattatcgatctctttttttgaccaaactcttgactttttatttaacgtacggtataatgtacataagaggtgatattatgaaaagcatgaacgttactaactttagaaaagatatatttaaggtactagaagacactgtaaaatacaacagcgttgtgaatgtgtcaacaaaagaaggaaatgcagtacttatgagcgaagatgattatgagggaattatggagactttatatttaagctcaattccaggacttaaagaaagcataatagaaggacttaatgctgggccagaagagtatgtgagtgaagacgatgttagatggtaattataaaatattctattctaaaaaggctttaaaagatattgataatataaaaagtgctggacttgaaaatacagtaaaatcattgattgaaataataaaagaagatccatttactagtccaccactgtttaaaaagcttgttggcgatatgaaaggagcctactcaagaagaataaattatcaacacaggttgatttataaagtagacaaagatagtaatagtgtttatataattagaatgtggtcacactatgaataaaagtttataaagcgatgcgtttattacgtgtcgcttttttatttatggctctatgtcaaatattgaggagacttttttgttgcttaaggccatttatttactaagtgcaaaaaaagccctccttactgattcttcagtaaggagggtagatattttacaattaaaccaactgctttattttttaagctatttaacttttttttgattatctaactttaatccatctacatcttttaaattaataggtttaaagtattctacataaccattatttaaatccacttttttaagttctactttacgtctattctcttggtcctctggaatttttccattattaagccattcagtaatataaattcgaagctcactatatctttttgcattatgattatagtgcatatccttggctatttgttcttgatttgctcctctattaatgaataattgtattacctcttctgttttttgttcatctcttaaattagtataagtggtagactcaaaataatatggctcacccttatcgttgatagtaattaaagcaacatgcccatacttagtaccatctttttctgtacctttaagaagtatagatttatatggcaatccagctttcttaaataatttagcagcaaacacagataaactatgacagttgcctttcttgctatctaaattaatagtatctccagcattatggctatattttaaattgtaattaatcatataattaactacgtctttaattttgccctctggagtatctgcactagttttaaagctgttaatgtaagcttctgtcttaggtccaactttatatccatcataagggagctctgagttagtctcccaaatacccatcgtgccattatcaaaaatatcagcttcatatttaaaattactcaaatcttcttttatttgagcattagctataggtgaaaacacaaatagcattactagtgtaatagttaatatccttttaaatttcatataaaacaccttccttatttgtttgtttttctactctaatgtatacttctaatttagatttaattaacttaattatatcacattattatttttattacaatgtaaactacatggattataaagaaaaagaataatataaattagaaacgtatcgcaaatcatctaagcccacccccaccgtttaaaatcacttctctttgggcatatatactttagaggtgatattatgaagattgttttcttagacatgtacaattcaaatccgggcgacattgacacgtccatgttcaaggattttggcgaattcactacatacgacagaactaatccatcagatataaaagaaagaataaaggatgcggacatcgtgatcacaaataaggtaaggcttggcaaggctgagcttgagggcagcaaggtgaagttcatagccgaggcggcaactggcttcgataacattgacctaaatgccattaaggagcttggcattggccttgcgaatgtgcctagctactcaacatattcggttgtgcagctaacacttgctcacttacttaatgctgttaacgatgtctattcttatgctcaaaaggttcgcgagggagcatgggtggacagccaagactttaatttcttcctaggtactatacacgagcttgcaggcaagactgcgggcatcgttggctatggtgatatcggtcaaaaggtagctgatgcatatagggctcttggtatgaaggtcattgctttaaaagtagcgggtcaccatgcggacggggacttcttccgtgactacgaagactttttcaaagaagctgacatagtgagccttcacgcgccaatgaacgcggattcaaaagaaattattaataaaaagagccttgctcttatgaaaaacacagccatcatcataaacactgcacgcggcggtcttatcaacgaatctgatttagctgacgcgcttaagaacggcgatgttgctttctatgcatcagacgttgcggcacctgaacctatgactaaggacaacaagctatacgcacttaaaaacgcggctttcacaccgcacatcgcttgggcatctttggaagcaagacaaaggctttacaaggtgatttatgacaacatcgatgcctatgttaatggaaggagcttaaacagaattgtctagaaaggtcgcacttatcgccggctctttcatatcggggatttcttccttggagctacttaaggcgatagaaggaaaaataaacgctgatgtggatatatatgcacttccagacggctacggcaacatctatgaggcgacagaggacctaaagtccttcaaggtagatgaggccattgtcatggacgaggaaggagtagaacacactcttaagtacctcagatgcgatgacaatgtcattgtgtccttctcgagcatcataaagtacaggatgaagggcgacttaagctcgactagctaccttgcaggcgctcttgtgaagaagcttatagaaaatggcgagaagaagatcaccatcagtgtaggtggcagcggtgtcaatgacgcagctgttggctttttgcgtgccatgggcgtgaagttctacaatgtattgaacgaagaagtgacagagactagggacatatacaagatcaaaggctttaacacgactgccatggacagtttaattcacggcgttgactttaagatcatcaagtactcaaagatgcgcttcataggctaccgcggcacgacatatcaaaacaggctcatcacggacaatctcatacttgagatcttcgagcgcaatatggaaaacttccaatacctacttcaaagcgccttcaattgcaaggctaaaaacgtagaggcggcaggcgcaggtggcggttcgatgttttcactttgcatgtttttaaaaccaaaagttgtggatcttggcgattttctagaaaaatattttaattttgacaatattactcaaaaaagtgatataataatcttagttgacgactatctatccttaaagcttagaaaagaaagctttaggtcgctagttcttaataaggcaaagaagtatgacaagaagatcataggtcttgcgctcgacgcggaagaggagaaggtatcctttatcgagcaaggctttactaggatggttgaccttacatatgactccgagtcactagatagagcggcaaatatcatcaataattatttaaaaggagaggatgacatggcttacaaagaagaagcacttaagtttcatgaagaaaagagaggtaaattagaagtagtacctaaggttgaagttaataacgcgcacgaccttgcacttgcttacacaccaggtgttgcagagccttgcaagcttatacacgacgacccagaattgcaatacaaatacactgcaaaaggtaacctcatagctgtagttacagacggttcagcagttcttggccttggtaatatcggctctaaggcaggtatgccagttatggaaggaaagtccatattattcaaaaagtttggcggcgttgacgctttccctatcatgctagatacacaagacgttgacgagatcgtaaacacagttaagaacatcgctccaggctttggcggcattaaccttgaagatataagcgcgcctagatgctttgagatagaaagaaaacttgatgagatgcttgatataccagtcttccacgacgaccaatatggcacagccatcgtcgtaacagctgcacttatcaacgcatgcaagctaataaagaaggattatgcagaccttaaagtcgttatcaatggtagcggcgcagcaggcattgccatcgcttatatgatgcttaaccttggcgttaagaatatacttatctgcgactcaaagggcattatctacagaggcaacgaaaagaacaactggatcaagaaagagatcgctgaaaagacaaatccaaagaacgaagaaggcacacttaaggatgccatggtaggagcagacgtattcataggcgtatcagcaccaggagtgcttacaaaagatatgatcaagactatgaacaaagacgctatcgtcttcgctatggcaaacccagttccagaaatctacccagacgaagcaaaagaagcaggcgctaaggtagttggtacaggtagaagcgattttcctaaccaaatcaacaactcacttgccttcccaggtatattcagaggcgcactagacagacgcgcaaagactattaccttcgatatgaaggttgcagctgcacatgcaatcgcaaaccttgtagacgataaagaccttacagaagagcacatcatgccagatatgttcgatgagagagttccaaaagtcgttgcaaaagcagtttacgacgcttatagagagtaatgagctacggattcattaaaaaattagataaagtagataaagaagtgatgctgggagtgagcctagcatcactttctattaccacagactttgacggcacaggcctaaataaccactgcgccttcactacagccaccaacatcttgaagatgatgggctttgatgatgtaagctttgatgaagtgtatagatatataaaatcagggccagttttgtttatggagccgcgtgtgaaaaaaattattaagaatagaaagacaagcgtaaaagttaaaagaaaatattttcccaaaaccatggacatagtaaaggctattgatgaaggacatatcacagccatgctactcatagagtcagtaaaaagcgcacactggattatagtcacaggctacgccatcagcaaaggcgatatctacctaaaggtcttcactaactggtaccacgaggcgcgctactacaaagtgaatagtgggagcaaggccgtgatgagcctcgaattttatatctaaggcttgacaaagaatactactaggactataataaaagtacatctaatactttggggtaaggtgaaattccttttaaccggcggtaaagcccgcgagcatatgcagaacctgtgaaattcaggtgccgactgtacagtcaggacggaaaaagatcttaaaggttattagttgaataatcattaaggagggtgttttttttatgtcaagagcaaaaaaaatcacattaattgcagtagttgccgctatggcaatagttttaacagcgataattcgctttccaatcacatcactaccattcttaaagtatgacccgaaagatgtcatcctaacaacagcaggcttcatctttggaccactagttgcgatcgcagcggcagtcattgaagtacttgttgagatgataaccttctccgagtcaggaccttggggcgcagtgatgaacatcatagcaacactttcattctcaggcgttgcagcagccatctaccacagaaaaagaacaacaaagggagcagttttgtcactagtttgcgcagttttatcgctaacagtagttatggcactttggaatctagttgtaacaccgatatacacaggttttccaagagcagaagtcgtaaaacttatgccagtaatcataccatttaacctaatcaaaggcggagtcaacgcagcactgatcatacttttgtataagccaatcaagagcgcacttgcaaaagcaggcctagcagaaggagtagcagcaggaaagaacgcaacttggaatgtgattaagatgctaagctttgttgtattgcttgcattgattgcactaataatttatttaagaagtggcatataaataatatttaagtgagtacattgattaatgtgctcactttttttacgccttgggtatatatagacaaacatcatattagaaaggtggcgcatcatggtaaagaaaagatacctactactaatcgcgagcctcgtgtggctattcgcagggctgaaggttctaagcctaggactcgaggcctacaaaacaaagttcacggcgcttaacgtccttatgtcactcgcagtcttcatagtcttttggctcatggtctttaatagactcgtaaacaagcacaccgtgcgcatcaaagcatacacagaagagaagagatacttttggaacttcttcgacctcaagagcttcatcatcatggcgatcatgatgacaggcggcatacttataagaaagtactcactattaggcgtgaacttcatcgccttcttctacacaggcataggcgcggcactaagcttagcaggcttgaaatttatgtataattttataaagtactagtgccctccacttacaagttaatgcaaataaaaaaaaccctctctactaagcaaagtaaagagggtattattttatctaaagttttgcgcgatattcaaaaatacggttatggaaagcgagttgattatgtcgattgcgaaggctccaaccattggcaagacaaagtatgcctttggtgatggaccaaatctttcagtaatcgagtccatgttggcgatgccgttgtatgttgcacccatgccgaagccgcaaaggccgcccgacaaaactgccgcgtcgtagtttctacccataacccagtagttgataaagtacgcgtacaaagccatgagcacagtttgcgcaagtagcaccacgagcatgatgccggcaacatcctttaagtcaagaaggttgatgtcgatgagcgccattaccaagaaaatgtttaagccgacgtcaccgcagatggagttagctctctcatcaacagcaaacttcgaacccttcttgccgatggtgttgacgaagatgcctgcaagtatcattgctgttacataactaggtaggctcaatggattaccaagtatgcttacattgtttttgatgagaacttgcaatatcgaaccgagaccaacagatacgaagatgagacctaaaaccttgacaaagtcgaaggcgtttagtggaacaagctctttatagctagcaccagcgctaaccttttcgagactctccaaaacattattctcagagctgtcattgtatgtaggcttagccaagtgatttcttctaataagcatagaaccgataggtccacctataacagagcccataattacaccgaaagttgcagccgccatgcagaaagttgacgcattaaataggccgtgctcctcaaaagtgctaccccacgcgccagcagagccgtgaccaccaaccatagtaaccgagccgcaaacaaggccaagcagcgaatctacccctataactttgcacatgaaaatgccaaggacatcttgaaaaataactaaaaccgttgctacaagtaagaaataaacaaaacccttgccgcccttcttaagcgtgtcgagatcggcaccaacgccgatggatgtgaagaagaccatcatgaaaggatccttaagagtgttgtcaaaaacaaaagtacatagccccgtaagagctaagacaaacctaatgatagcgaacaaaaagccgccaataacaggcgcagggacacaaaaagtctggaaaaatttaaccttcgttctgataaatttccccaccaaaaaaaccaagatagcaaagccaaccgtttgcattacattaaatgaaagaatcatttaataaacctccttattaaagattgcctctcctatctacaagaataattataacataaaaattgtaaaatgcaagagtaattatatataaaagtattacaaatatgtaatctttgtatattgagtgaaagcgacatagtataaagaaagactacacagaaaaaattgtgtagtctttctttatgtcttaagataagaaaagcacatcgaaaagatagttccaccagagcttagttcatcaagttgacaattgcacattgaaaattgatttccttcgcttgctacgtctacgaaaactgataatttctgagcttactcacctgtggtctcatatccgttcgcttcgctcagctagatgagcccacgggcggttcgtttcgctaagaaattaaggcagttttctccgaaggctgcgctcgtgaaaatcaattttctctttatgtcagcgcaaatccatctaccccgcaccaatttcttaaagaaaatgcgatgattgggcgaagtgaatttaataaaatatacaaagtcactcaaacccttagtttgcagagaagttgagatgattttgcgttgtacagaattttttggagtgaggtgtgcaaatgcgcactccacagcgacaaaataattcgaaactagcaaaagggctcaacttaatgcgaaataagtcgagcattgtcgaaaaaaggaacgagtccaagggcgcattttattaagaaatttagtcctcgattacaaagccagtgacccgtgactgaatcgccaattgcgttctcgtctcaaagcctgtcttctctaacaaatgctttatatgcgtcttcacagtattttgtgaaatatcaagtttttctgctatctcatcatttcctgcacccgttgtaagcagtcttaagacttcaatctctcttggtgtgaactcgcttgacttcgccatacctagcgtaaccacaggagtattatcagggtatatcgactcaccctttaaagttctctcgactatctcaatcagcgtctcctcagagacatccttgtaccaaaaactctcaatacctatctttctcgcgcgctccatccaagagacttccggcatactcgtaacagcaattatcttaagatttggctttagctttttaatcttttccgcggcgtcaaggccattcgacccgtcattcatcagtatgtccatgattacgaggtcaagaggcgccttcaaaacgtaagtatccgcaaacatcgccgtatcaatgcagtagagcacctcgtactcaggcgactgctcgatgtagagcttaaacagctccctcgaaacgaattgatcgtcaacaatcataatcttataagtcataattttctcctttcagccaagaaatcctaagagtaaatacctcactcgtatcaatactcatctttccgccataaatcttaagacgcgctcggatgttctttaaaccgcccttttccttaatttcagagcttggtttatggccgtcgttctttatagtcaaatttatccttagaccatcttcatttatatcaatccacacatttttcgcttcagcgtggcgaatggcgttgttcagcgccttgtggactatgcttataaaagtatttttatcattttcgccctctggcaaagagccagtaaagtgaaaacctatgccgattgactccgcagtttcaagcagtttcttccaaagagcgtcctttacctcttcgtcttcaccctcatccaaaacgacgagactctcgttccacagctgcactagcctcttgcgctcgtcctcattcttgtcctgtttatccaagtagtgcctaaaataaattagcgactgagcgatcttgtcgtgaatcttaatctttgagcgcaaaatttccttctgcctagtgtattccaaagccgtatcttgataatccttcaaacgcttgttcgcagcctttatctctttattcttcttttttatctctccaagcacgccccactcctcggtgatgttgtaggcaatcgtctctctgtactttttctctttatcttcaataatttggtagagccatatcttgccacacgcccccataaccagaggatccttttgcaaaatttgagttgagtcgcttaccttgcactcacgagcaagccttgcacaagtcaaatcattaatcagatgctttccaaaaacttcgtagctaatcatttgcatctgcctgttgacaagagtcggcgttccgtcaagcttcgagaaacacaagccgtcaggaagattatccatactctccttaatcgagtttttgccgatttgactttttcttatgcgccttagcctaaagaagagatcgatctgcgccagagctatgccaaataagtagctcgtaaaattagatacccaaagatttaagaatggttttgaaatcagcatgcgccttgatccaagctccgcaagtatttgcactaaaaataaatttactaaaaccaaaaatacgctcgaggcaaaggcagccgaccttggctttatatccatcagctcaatcatcagcctaaggctaattgcaagcagcaccatgcatatggcgaagattatgcttatttcactcgagtttaattcaaagatcctcatcataacccataacctcctaagcttatgcgccaaagaccaccctcaaggtcctctagcatatctagcccatcaatcaccatgccgatggtccccacctcatcagcacttatttttatctctacttcatcatcatttacaagatttacatccacagctttgagagcatgataatttacttcaagtatcctttgaaaaacttcgtaaatggcaagagcagtgtctatatccaaagcgctatcactttgccaatttatcttagattccacgccgcttaagcttagataatttagtgattcagtaaaagcaagacccagctcagccatggcgatgtttttatcttttttacttaataaaaataggttcgagtacctcttgatgtaggcactcgttatgcatgccctttttagaaccgcttcaaaagattcttcgtcctcgggtaaattattcattacaatctttaaaaaattaaatttatcacttaagctcgagtcgatgtaggagcgtatctcattttgctcctcaagcttcgccatcttctccttaagctttttatccgcgctcaaaagttcattctcactcataagactttcatttaaagcgtatagccgctttttaagcgagttaagctcctttaagtctataaaccaaaacgcctcgccgccactaatccttgcgctctcaagtagagtgtccttgtcaagcttagtagccttaccaagcgaagcgtgtatcatttcagcagttactggtggcattttagtcggcgcaaaaactatatccccatccatgtccatgattccaatatttaaggacgatagtcttaagaacttgtcgtagcccctgttagatgggattgaccttgtaaataccaaagactcgataaagagaataattataagtatgttaaattcggcacttgcaatcgccgtcttgatatacacaaagaaatctctgttaataacgtaagagaaagtatataaaatccacaaaagcattggaagtataggaagcatcaccggccacggcgagcgcatcgacctcgacgcacgtaaggccgagaccaaagaagcgatagttaatattgcggcatatagtacgattatgtagaagagtggcttatacgcctcaacacccaaaggcacatccgtactaaaggcaaggccgtggaagtcattcgtcaaaaccaaaattacaaaacactcagtcggtatccaaagaaggtgccaccacttgctgataggctcgcgctcagacttattcaccatgagcgagataaaaaatacaagatgaattatgtttaacgagaaaaggtagtaaatgtagcggatgtacttgatcacgagtatattgtcaaagaggatctcatacttcaaagtcctcgcaccaaggtagccaatcataagaaaggcgatcatcttaaagtactttttcgactgcgtcctaagaatacggctctccatgatacgatcccaaagcaggatcacaatcgtgtataagaaaaagacgatggcgttcacagaaaaattaattacgccgaagtactctagtagatgtaggctcatcgccagcaaaacgaaaaacgtactcgttatgtaacttaaaatctccttgcgatacatagtaaaccccccttcacatactttatatagtaattatatcatatagcactttattatactagaaaaaaactaggtagatagaaaaaaattgcaaaaatatttcttatatatcacccttttgggtgatgtggaaatggtttttattatatataatgtacttaagggaaaatatttatacaaaaaaattttttaaatatcacccttttgggtgatgtggaaaatatttttatagtatacaatatattcaagaaaaaatttgaaaatttcattaaaggagtgagaattatgaaaaagaaaaatgaaagacacatcgcgatacttttggcagtgatgatgatctttatgaacttcatcataacgcctgttatggcaaatggggaagatagaataaaagtaacggagatagaagcaacagcgactaatatggaaccggtgtttggtaactcagtttcttcagagcctacatttactgtaacaaaaggaactgaagctcattttaataccattatgggagattggaaaaagaaaaatgtagaaacgggaaagtttgaacatggtgatgaaactattactgccgggacttggagatatgaggtacaaattagagtggatggtgcttatggaacaactcacgttcttgacaataattttacagttaaagtaaatggtgaattatggacaactgaaatgggccttgttgacaccaacttttcatttggtcacgcttactcaccggaatttactgtagaggaacctgccattgacctaactttttatgattcatatacatttgatatcacaacagtgtataaaaatgtagctatttcttcattttcagtagcaaataatgcagcaggtggaacaagaccttatactttttcaaaaacatccggtcctgcttggataaaagtatcaacagatggaataattagcggaacacctactgctatgggagaaaatgaagatttagtcgttagagtaaccgatagtaattcaaattacaaagaaattacaataagtgttgcaaatacagttgttaaaccggaagatagaataaaagtaacggagatagaagcgacagcgactaatatggaaccggtgtttggtaactcagtttcttcagagcctacatttactgtaacaaaaggaactgaagctcattttaataccattatgggagattggcaaaagaaaaacgtagaaacgggaaagtttgaagatggtcatggtactattactgccggaacttggagatatgaggcacaaattagagtggatggggtttatggaacaactcacgttcttgacaataattttacagttaaagtaaatggtgtattatggagaactaaaaagagcgttgttgacaccgactattcatttggtaacgcttactcaccggaatttactgtagaggactctactcacacagaccatagtgctcgcaccaaaactgacggacagccggcaacctgcgtagcagacggttggaaagattactacaaatgcaacggctgcgataaagtgtttgacgcagcgacaaacggcaacgaatactctgaccttgcagcgtggaagaccggcgcaggtaaaattgatgcattaggtcacgattattccgtaatgcagcacgatgatacacagcactggaagaagtgttcacgttgtgatagcactaccacaaaagaaaatcacagagacggaagtgctacctgcacggcaaaggcagtatgttctgtttgcggtacacaatatggcgatcttgcagatcacagctacagcaccgactggaagtacgatacaaacaatcactggaaagaatgcacttgcggcgacaagaaggattctgcggagcatacatggaatgtaactgccgcaacagaggaaacagataagcattgtactatctgcggttatgtagcagagccaaagctcggccatacccacagccttacacttgttccagaagttaaacccgactgcgatacagatggaacaaaggcatactacacttgctcctgcggtaaatattttgaagatgctacggcaactaaagaaattaccgaccttgaagcgtggaagaccggcgcaggtaaaattgaaaaattaggtcacgattattccgtaatgcagcacgatgatacacagcactggaagaagtgttcacgttgtgatagcactaccacaaaagaagatcacagagacggaagtgctacctgcacggcaaaggcagtatgttctgtttgcggtacacaatatggcgatcttgcagatcacagctacagcaccgactggaagtacgatacaaacaatcactggaaagaatgcacttgcggcgacaagaaggattctgcgaagcatacatggaatgtaactgccgcaacagaggaaacagataagcattgtactatctgcggttatgtagcagagccaaagctcggccatacccacagccttacacttgttccggaagttgaacccgactgcgatacagacggaacaaaggcatactacacttgctcctgcggtaaatattttgaagatgctacggcaactaaagaaattaccgaccttgaagcgtggaagaccggcgcaggtaaaattgaaaaattaggtcacgatataaatataaacacaccagcaaatggaacagttagacttagtaaaactaaagcgaaaaaagatgacataattactgtaacagctacagcaaatccaggctatgaacttgacaagatagaagtagacggaacaaaaataacaggcaatacatttacaatgccagacaaaaacgtttcagtcgttgttacatttagagtaaaaactgtaacaccaccaacagctcacagcataactgtcatcgcatactctcacggctcagcttccgcaagcaagagctcagctaatccaggcgatctcatcagcataagcgtttacccagaccacggctacgtagttgacgaaatctacgtaaaagacgcagccaatgcgttgatatcaagaaacgactacaatttctacatgccaaacagtgcagtaaatgtttacgtacacttcaagccatacttctacgactatgactacgactactatagaccatatagaccacatagacacacagaagacaagaaagaggacaagaaatctgaagacaaagctattgacaaggatactaagaagccagtagaaaagacagagtcagaagtggtacttagtatcggctcaaaagatatgaataataagtacaacggtatagcttctaagaagggcatggacgtagctccatatatcaagaacggtagaactatgcttccaattagatatatcgctgaagccttaggcatgggtgttacttgggatgcaaagacaagaactgttatcattcaagatatgttctacagggtcgaaatacctgttaacacaaacaaaattattgtcaatggaaaaacttatacaagcgacgtaaaacctgaaattaagaataacagaacaatgcttcctatcgcgaacattgcaagagctcttggccttaaagatggtgaagacatcatctgggatgctagcaagagacaagtgattattaagagaatatacgataaataattttataagtcctagcaaggtccgtgcgctcactccgcacggatttttgctaaagaaagcaaaagttttcttttcatagacctctcccaaatggtcctgccaaagtggcgggatcatttttttgagtggatttgtttttttgagtagaattgttttaaagaaaatttacttatgtaatttttcttgcgattttaaatattttatatttaaaatctatgaagttaaaatctttttcaaattcgcaaaaatatttcgaagaaaatttatttgcaaaaattttcttgtaaaatttaatattttcatattaaatttttcaaatatcacccttttgggtgatgtacaaaagtgttaatggatgtaaaataaaagaaaatttataatgataaattttcttgcgatttaaaatatttacatattttaaatctaactagaaagaaatatctttcaaagaaaaggagtgagaattatgaaaaagatttctagaagcataattatttttatgcttctatctgcattattattatctagctgtcaaaagtcaaatgacctagcgagtgagacgggtgctaatgaaaaggcaaaaactgaggacaaaaaagatgatgatgcaaaaactgaggacaataaagatgatgatgctgatagtggcaagaccataagcaagactaaagaggcgctaaagtacgttaagggcgccaacttcggctctatgtcttcttatgtcgttgataaagagatttggaaggactttgtcgacgaaaagtatatagactatgtaagtaaggaaggccctggcatgcacttacctagagtgcttttggacagcgccgatgcaaaggacgcaaataaagagattgacgagactgaaaagtgccttagacagctatacgaaaagcacgaaagcgagatagaggacggtgacccaggtatttacgcggacttctctgtgtatcaagatgaaagcgttctaagcattatgattgaaacatactgtttttgggagggcgattaccctacgtacgaagtatttaacttttctctacctgatggcaagtacatctcagactttgaccttatgaagcactttggcgcagaaaaggatgaagtgcttgctagtattgaaaatagcttaaaggaagatagggatttgaacaccaaaatgtattacccagacgtacatgattatacgtttataaattcgccaaataactacattggcatagttttaaatcatttgtgggacgattttgcttcaacaaatcgccaaatatatatagacgaggtcggcaagcctaattttatatttaatcaaagttgttactttaattttatgggtcctgtaactttagagcttaagttaaataaatttgatacgaatccaatctcaagtgaatatataaggacggctagaaaattaggcatagatccaaaggacgaaaaatacaaagccttagtcatttacttaggctcagcttacgacgaagaaagccttaaggacacgcttttaaagttaattgtttggagagataatttttctagctatgatgatccaaacctattgctatcattaggtgatggcgaaggatctgaaacgccgatcttaaaaggtcaggagtgctacctagtagtgcctaagtacaaaaacgcttcaattatgcttaaagagctaaaactttctgagggaggcgagctaaaagaagtggttaataactacatggacaattgcgcgtgctctggacctacacttgtctgtcaaaatattagcgagatagcaccaaacgcgaagatcacaataaggtatagggatgatgtacttgagttttcacctagtatcagccaaaaagatggcagcgtgatcttgccagatgaagtctacaacgcagaagatctaattgactgggacaagctaatcggagaagacgcctacccaggaaatatctttgacatacttaagtcaatgatgcctaagggttagagattaagaaaaataggaggataaaaaaatgagaaaaagattatccatattattagttctggcaataattttctcattagcggcatgcggtaaagaacctcttgacgacaaggcagataaggcaagcgaaaaggtaaaaaacaaggcagacacagaaaagaaagaagaaaagaaggaagaagcaaaagccaagggcatgatagaggttcacggtgaaggcatatttacaactccagaaggcatcgaagagctcagtgaagaaagattaaaagaaatatatgaatattttgatgccaagcatttaaaaactgagggcatgacctatgaagaagtagaagaatacattggcgtgccaggtgctcactttgtagaccatgatgaagaaaatgaaaatggagagcttacaaaaagcattttttggtattcaccagaccacttcctttctatggtgtttactgctgacaaggatagtcctgatgactttggcctcacagagacttgggccatgccaaaggccattgaagaagatgtagaagacccagtatcagaaagtgaagaaaaaccgacagtagcatattcagatgagacaggcatggtggagcttacaggcggaagccaaaatatatatccaggagatatctcaaagcttagcgaagaagaacttgaaaaaatagctaaatactttaaagataactattacgaaactcaggggatgacctatgaagaagtagcagaatatattggcgcgccaggtgctcactttgaaaactatgatgaagtggatcccaaaagcggagaactgacaagatatgtttgctggtattcagaaaacagtgtctttgttgcgttttttaatgctgatgcagaacatcctgatgactttggccttggattgaccgaataccatgaacagtttaaataaaaaataaatcacccgtttgggtgatgtgctaaagtaaattatattatataattatatacaagaagagaagtttacttaaagtacacaaaggaggtagaattatgaagtggatgaaaaaggcactttgcctaggactagccctcattatcatgcttagcgtggcagccattgcaaaagaagagcctgtgaagatatatatcaacaaaggcataattccatcggatcagccgcccatcatcaaaaattcgagggtgctcgtaccactaagggttatcgctgagcagcttggtgcagatgtatcttatgaggcaaaggaaagacgcgtcaacatcaacaaggatgagataagcatgaccttggttataggtgacgacactatttggtattctgataaggaaaagtctggtccggtcgctatcgatgtgccggctatgattaagaatggcagaaccatggtgcctctaagggctgtggctgaattatttgatatgaatgttaagtgggatggcaaaaaaagagctgtctatatcgacaacaatacagaaaatcagtacactatcacattgaaaaatgccggattgaagatcatggatgcacttaaacaaaagggctctttaccggacggtacttatgtcgccgatgtcataagagaagagattgacttcgacggggccaaggtccaaggctacgcggtcactcttagaaaggacaatccaaacgacaaaagcctagctgagcttgttggccactactttatcgacgaaagcggcagtacgattttgcactacgacgtagttactgatacgtataaaaatatatttttagaataattttatagtaaaaaggaggatattattatgggatttattagagcatttacaggtgccttaggcggcactttcgcggaccaatggctggacttttacggaccgggcaatctttcttcgggcactttaggtatatttccagcggtagctcaaggacaaaacgctgggcgtggtgaaaatactaagggcaacaacaatatcatttcaaatggcagcaagattatagttcctgaaggaactgcgcttatcactatgcaagacggtatgatcactggcattgttaatgagccgggcggttttatatattcgtcagacgaccctaactcacaaagcatattcgcaggagatggcttaagcgcttcactaatcaaatctacctgggaaaaaattaaattcggtggccaagcaggcgctgaacaacttgccttctatgtcaatcttaaggaaattcctaagaacagatttggcactcaaagcgaaatatactgggacgatgccttcttcggcacacaagtaggcgctgtaactagaggtacctacactttgaagataatcgatccactactatttgtcaagaactttgttccgcaaaagtacttagttgcaaatgcacctgcttttgacttccaagatatggacaacgaagcggcagaagagctatttaacgaagtagtttcatcactatcagcagccttctcaaactatacgaatgacccaacaaagggtaatcgtatgagcaagatccaaggcgaccaaatcggttttgctaagtcactatctgacgcagttgaagatggttatgagtggagatcaacaagaggtcttgagatagcaaagactgcgatacttgctatagagtacgacgaagacactaaagtgcttatgtcagacgttaagaaagcggatgccttatcaggtgcacgtggcaactccttcttccaacaagcagcagcaagaggcatgcaggctgctggcgaaaacggcggcggcgctaacatggccttcatgggcatgggcatgaacgcagcaggtaatatgatgggagcgactcagcaagctacaggccaaagcacttatcagccaaactttggcggcgtacaaaacgcaggtggcggacaaaatgcggctccacaagcggctccacaagaggatccaactgaaaaacttatcaagatgaaaaaacttcttgacgctgaggttattacacaagaggaatttgacaaagcgaaaaaagacttactagacatatagaggtgatcttatgactatagatgaagatattaaaattagagatatgacgagtgatctcaaagacggtcaagtcaagtgtcctaagtgcggctcgaccgacatagcgactaataccaagactggcaaacttagatgtaatttctgtagacacgagtttgagccagagctagcacccgaagatgcagatataagcacacttgaaggcactaccatgggcacaggggcagccgacatcaatgaggcggcagatagcatgatcacacttaagtgcgagagctgcggcgcagaagtagttgttgacacaaacacgggcgcgcaggcgagatgccactggtgtagaaacaccctatccattaacaatgttattgacaatggcgcagtgcctgacgtaatcttgccatttaaggtcacaaaggcagaagcccaagaagagataggtaaattcgttaagaagagaaggttcttcgctcatccgacattttcgagagagttcactacagaaaacatctccggcgtctatttgccatacatgctagttgatgtcaacgcccacatgaatctttctggcgaaggccagatagagacagcgcgttaccaggtcaaagaggatgacaaaacgcataccgagtacgacgcaaacagctacgaagtcgagagagacttcgatatattcatagacgatttatcgatagaggcgagcagcgacaaacttgattatatgtcaaaggaaaagactacaaatattataaatgcgatcatgccatttgacacagaaaattgcgtgaaatttaacgcaaactacatgagtggctacacatcagaaaaaagagacaataacatcgatgccctaagagagacggccctggcgcaaagctctgacgttgcaaggcttgcagcgaaggaaaccataaaggactacgacagaggagttaggtgggacagtgaagaatacacagttaagggcgactcgtggaaggcggcctacctaccagtgtggctatatagctacatgcaaaagaacaagggcaaaaacctacttcactacgtcgcagtaaatgctagaactaaagagaccatgggcagcgtccctataaacttcaaaaaactatttatctactcaggcttagttgaactttttggcggtcttattgcttttataataaacatggtcgcatctatgagcgtatttgacggtacaaaattccaagactataaggatgccggttggcttttactagtttcaggcttcgttttttacgccactatctacttaagatatagaaatatcgatgaaaggcaccactacgagaacgagaccaagcacgagatcaaaaatcttgtccgtgaagatagattcattaggaaactcactggtctaaaaaaagaccgtatcgaaggagaaaatgcttccgagcttaagggcaataggcttgatctaaagaaaaacaaagagcttaagaaagttatagacaagggtctacttgatgaggtagaaaaaaaataagaaaagactcaacgagacccttgacgagagagataaaaattctaataataaaaataaagatttagaaaaataaattaattttgctttttcataattcatatcactagagaggcgctcctataattatgggggcgcttttctttatgcaaatggcaatagatttttctaaaaaaacttacttacgtaatttttcttgcgatttaaatattttcatatttaaatctaaaaaatcacccttttgggtgatgtgctaaagtaaatttaattttataatatacttagaatgataagataattttaaaaggagtgagaattatgaaaaagatttctaaaagcataattatatttatgctaatggcggtgctcttattaagtagctgccaaaagacgagtgataaaaaagaaacaagtgatacaagagagacaagcgcaaaaacacaggaccataaagatgatgatgcaaaaactgaggacaaaaaagatgatgatgctgatgctgaaaagaccataagcaagaataaagagacattaaaatatgttaaaggcgcaatctacggctctgcatcatcctacgtcgaagacagagagatctggacgggcttcgttgacgaaaagcacatagaatttgtaagcggcgacggacgtggcatgcacctacctaggatacttttggacacagacgacgcaaagaaggcaaacaaagatattgacaagattgaaaaggagattaagggcctatacaatagatgtaagaaagagatcactgatgaagaagtaggcatatatgcggctttctccgtttatcaagacgaagatgttttaagccttatggtcgagagctacaatttctgggagtctaaaaacacttcttattacgtatataacttttctctaccagatggcaagtacattacagacgcagagcttatgaagcactttggcgtagaagaggacgaaattttgggcttaattgaaagctctttgaaggacgagcatgagcttgaaaacaagctttactatatgaacgtttgcgattcatccatcttaaacacaccaaggagctacacaggcgtggcgcttaataacttgtgggacaacttcgacccagatgcacatcatatctatatagatgaagttggcgagccgcactatattttcaaaaaagtagaatttgatagccctctaatagcggatttgaagcttaagtcaaataaacttagtgaaaatccaatatcacctgcatatatcaagatggcgagaaagctaggcatagacataagtgacgacaaatacaaagccttaatcataaacctaggtgcagcctttgatgaaaaaagccttaaaaagacacttcaaaagctagatccttgggaaaatgattttaataattttgaagaaccaagcatgttacttacagtaaaatacgatgatcaagatgaaaatccatacctaaacggacaggagtgctacctagtagtgccgaagtacaaatacgcctcggtcgcactcaaagagctagaaatatcgggaggcggcaagctaaaagaaaaggacaacgattacatggattatattgccacagccggacctacctttgtcctacaaaatattagcgagatagcgccaaacgccaagatcgtgattaagtatagagacgatatttttgagttttcaccaacaattagcctaaatgatggcagcatgatcttgccagatgaaatctacgacgcagaagacgtccttgattggaagaacctcatagtagaagaagcatactcaataaatttctttgagatacttaagtcaatgatgccgaagggttaaatagattaattaataagagaaactacaggtaaataaaacacactcctaataaacattaaagcggttaggcatatacgacctagccgcttctattttatgcccttatataataggaagaaaatataagaagcgaggcatatagtagtgagcctgtgactatatagcacgtgagatatatagtaagtgactttatatatagtgagaggcgaggtgtatagtgagagccttcctatatataaagagggccaatacacaagaccttgtgtgcacataagagacgatacacaattgtaaaaatatttttaaaaattttttaattattttaaaaaaacccttgacaaagataaaaataaatggtagaatggataagtcatctggaaagactccagagggcaagcaaaactgaataaaagtgaaaagaacgatttaaaccaatcaatttttattgataaataatttcgaatttaagagccaaggttaacttgggattaaataaaccatttaatcgagagtttgatcctggctcaggacgaacgctggcggcgtgcttaacacatgcaagtcgaacgatgaaagagaatccgatctcttcggagtgaagaatctctggattagtggcggacgggtgagtaacgcgtgagcaatctgccttacacaaagggatagcctcgggaaaccgggattaataccatatgatatctagcgaccgcatggtagatagattaaagaatttcggtgtaagatgagctcgcgtcccattaattagttggtgagggtaacggcccaccaagatagcgatgggtagccgatctaagaggatgaccggccacattggaactgagaaacggtccaaactcctacgggaggcagcagtggggaatattgcacaatgggggaaaccctgatgcagcgacgccgcgtgagcgatgaaggctttcgagtcgtaaagctctgtcctatgggaagataatgacggtaccatagaagaaagccccggctaattacgtgccagcagccgcggtaatacgtaaggggcgagcgttgtccggaattattgggcgtaaagagtgcgtaggcggcaaattaagtcagatgtgaaaactaagggctcaacccatagattgcatctgaaactgatatgcttgagtcaaggagaggaaagtggaattcctagtgtagcggtggaatgcgtagatattaggaggaataccggtggcgaaggcgactttctggacttgtactgacgctgaggcacgaaagcgtggggagcaaacaggattagataccctggtagtccacgccgtaaacgatgagtgctaggtgtctgctcatacgagtaggtgccgtacgttaacacaataagcactccgcctggggagtacgtacgcaagtatgaaactcaaaggaattgacggggacccgcacaagcagcggagcatgtggtttaattcgaggctacgcgaagaaccttaccaggacttgacataccaaggaaagtttttagagataaaaaccctagatttatctaccttggatacaggtggtgcatggttgtcgtcagctcgtgtcgtgagatgttgggttaagtcccgcaacgagcgcaacccttacatttagttactaacaggttaagctgaggactctagatggactgccgatgacaaatcggaggaaggtggggatgacgtcaaatcatcatgccctttatgtcctgggctacacacgtgctacaatggtcggtacaaagagaagcgaaatagcgatatcaagcaaacctcaaaaaaccgatcccagttcggattgatctctgcaactcgagatcatgaagccggagttgctagtaatcgcagatcagaatgctgcggtgaatgcgttcccgggtcttgtacacaccgcccgtcacaccatgggagtaggcaatacccgaagcctgtgagctaaccgtaaggaggcagcagtcgaaggtagggtcaatgactggggtgaagtcgtaacaaggtagccgtatcggaaggtgcggctggatcacctcctttctaaggagaacattagttcttttcactttgggctttgctttatggatcttgaagaacttaaaaaaggtgcaaatccttttagatccaaaaaccaaataaaacttaataaccataatcaaatgaaaacgaaacgacatttataaagaaaataaatacagtaaattttaacaataagcgttaaaggatttttaaaaaaattaggtcaagttactaagagcgcagggcggatgccttggcaccaagaggcgaagaaggacgtagaaagctgcgaaaagctccctagatctgcaaacaagaaacgaaagggagatatccgaatggggcaacccacttaagcaaaccttaagtatctatatatgaataaaatagtatatagaggcaataccgggagaactgaaacatctaagtaccccgaggaaaagaaagaaacatcgattttcaaagtagcggcgagcgaaatggaaagagcccgcttaaagaaatactaagaaagtatccgaatgatcttggaaaaatcatccatagaaagtgaaagacttgtaagagaagatattagtatttcaataagcttaacgagtaccacaaggcacgagaaacctggtgggaacatgggaggaccacctcccaaggctaaatactacttggtgaccgatagagaacagtaccgtgagggaaaggtaaaaagaaccccgaaaggggagtgaaatagaacctgaaaccctgcgtttacaagcaaagaaagcacgtgaaaagtgcaatcttgtactttttgtagaacgggccagcgagttacttttgtaagcaaggttaagaagttaagcttcgaagccgaagagaaatcaagtcttaatagggcggtttagtttacaggagtagacccgaaaccaggtgacctatccatgagcagagtgaagttaaagtaaaatttaatggaggctcgaaccgggtgtggtttaaaacacatcggatgacttgtggataggggtgaaaagccaatcgaacctggagatagctggttctcctcgaaatagctttagggctagcctttaggatgtttaatggaggtagagctactgactggttgcggggtgtttgtacattaccaaaacctatcaaactccgaatgccaagaaaacaaacctaaggagtcagacatagtgggataagcttctatgtcaaaagggaaagagcccagaccatcagctaaggtccccaaataccgattaagtggtaaaggatgtgaagttacccaaacaactaggatgttggcttagaagcagccatacatttaaagagtgcgtaatagctcactagtcgagtgaccttgcgccgaagatttccggggctaaatcggataccgaagctgtggactcaacttgagtggtagaggagcattgtgtaataggctgaagcagtatcgaaaggcgctgtggacgaaacacaagagagaatgctggcataagtagcgagaaggagtgtgagaatcactcccgtcgaaaacctaaggattcctgagcaaggctcgtcccctcagggtaagtcgggacctaaggccaggcctaaaggcgtagccgatggacaactagtaaaaattctagtactatcaaatatcgtataaatgaagcggggacacagaaggataagctaagcgtaccagatggaagagtacgctcaaataaaaaggcatgccaggactaataaccaggctaagctgatttatgatgaggatcgaaacaaagtagagaagtagccgatttcacactgtcaagaaaagccgctaaatagataaatgatacccgtaccgtaaaccgacacaggtaggaaaggagagaatcctaagacgcgcggaagaacctttgttaaggaactcggcaaaatgaccccgtaagttagcgagaaggggagccagagcgatctggccgcagtgaataggcccaagcgactgtttaccaaaaacacaagtttctgctaagtcgaaagacgacgtataggagctgacacctgcccggtgctggaaggttaaggggaaatgttagcgtaagcgaagcatagaacttaagccccagtaaacggcggccgtaactataacggtcctaaggtagcgaaattccttgtcgggtaagttccgacccgcacgaaaggtgtaacgatttgggcactgtctcaacaaaggatccggtgaaattgaagtaatggtaaagatgccatttacccgcgacaggacggaaagaccccatggagctttactgtaggctgacattggatttcggtagtacatgtacagaataggtgggaggcaaagatcctggtacgccagtatcagaggagccgaaaagtgggataccactcctgtagtgctggaattctaaccttgagccgtaaaccggtttagggacactgtcagttgggcagtttgactggggcggtcgcctcccaaacagtaacggaggcgttcaaaggttccctcagcacggacggaaatcgtgcaaagagtacaaaggcagaagggagcttaactgcgagataaacagatcgagcagatgagaaatcaggacttagtgatccggtggtaccacgtggaagggccatcgctcaacggataaaagctaccctggggataacaggcttatctcccccaagagttcatatcgacggggaggtttggcacctcgatgtcggctcgtctcatcctggggctgaagtaggtcccaagggttgggctgttcgcccattaaagaggcacgcgagctgggttcagaacgtcgcgagacagttcggtccctatccgtcgtgggcgtaggaaatttgaaaggagctgtccttagtacgagaggaccgggatggacaaaccaatggtttatgagttgtaacgccagttgcatagctcagtagctacgtttggaaaggataagagctgaaagcatctaagcacgaagccccccttaagataagatttcctttaagtaagacaccttgaagaccacaaggtagataggcagtaagtgtaagagtagtaatactttgagcctaactgtactaatatgtcgaaaacttgatcaaaagacgcttgttgaagaattatggttattaagaaatgtggcagcaatagcaagagggaaacacccgttaccataccgaacacggaagttaaggctcttaacgctgaaggtacttggttggagacgacctgggataataggtagccgccacttgatttaaacagatagcattatatgctatctgtttttgtttcgcattcaatttgcgactgaggctcgttaagtccatgcaccaagagaacgagcgatagcgaagttagattggcaatgcatgccttattccagagtttacaaagagacggaacgaagtgaacgtcgatttgaataaacttacggatcgctttttcggcaatactcaggtacgtttagtacattccgcttgacaaaaacctccacttcgtcctatgaatcatagcgtaaaggttcacgttcatttatggacggggttcttcttttcttcgcaaaactcgcttcgcagtaattatgctcaaatatatatttactttgtttgcttctcagcaatacttaggtacgtttagtacattccgtttgccgaaaaactccactgcgtcccatgcatcatagcgtaaaggttcatgtatgttagtaaatgctacttctcagaaattttaattacacacaatttattcttagccgcatatttttatatgcggtttttttgcttaaaaagctattttatgatataatccactaaaggaggctactatgaagaaattcaaagcgctatactacagtctatacataattttagctctaattgtcatcggctattaccttattaattatggcaatcccatcatcaaagcgagggtagagaaagatgcaaaggagtacataagtaggcattataaggatcttgaccttgagatcgagggcgttagctatcaaatgacgggcggattttacatcgtagagcttcaggacaaaaagagccaagacacgaattttcatctagattataaggcatccggcaagtttatgtgtagtacttacgatgaaattcttgataacacatacaaaaggtacgaggcctttcttaaggactatgccaaggatatagctgatgaagaggcttttgattttgagcttagtcttcttcctgacaatgagcttaagtatgaaaactaccttacacttgatcaagaatttgacagggagcatctcccaagtaaggtcttagcacactttcacgcatatgaagatgaaccaagccttgatggcatgatgactaggcttaaaaaagtgcaaaaagccatgagcaaaaggaacttggacgtgcgctactactcaggcaggataattcccacagctgacaaggccaaagagggtatggcggagaaatgggggaacgccatcagcgccgagagggttatggagaagactatattagatggtaatatggaaaccttagagaggaggtctaataaatgactaagactataaaaataattttatacacattgcttgtgctgctcttgggcatagttttgttccttgtactgtcattctatggcaatcccattagcaaaattatggcggataaggcagcggatgaatacttaaagactcactatacagaacttgaccttgtacgcgagcgtgcctactacaactttaaggatgctaaatatgtcgtagagctctgggacaagaatagcgtcgacacgaaatttgctctaagtttcgatagctttggtaaaatgaagaacgatacttatggcgacaggctttttaacactttccgtagatacatgggctttttagatgacctagcagatgagatagctaaggacagcggacttgattttgaaatatggcttagaccagatgatgatattgattatagagcctatctcacacttgatcaggacttcgatgcagataatttgccaagcaagattacggcagcttttaaggcctatgcagaaaaaccgagcttagaagatttaatgaatggtcttaaaaaactttatgaagtgcttaaagaaaggaatataccagtgtcgtcatactcaggccttataattcctaacgctgacaagaaagaagatggcgaggcagagacttggaagaacgctatcagcgtcaatgctgttctggaggaagtaattataaaagaagacatggaagagctgaagagaatatttgatcaaggaaatgagattttatataaatgaaattttgcgttaaatttgcccacggaacttgttcgcttcgcttcctccctcaacgtacccgttagtacgatgtcggtcgggcgctacgttccacttcgtcccgtgaatcaaatttctccgcaaaattattcttcggacaatatagtgatgagcgaaatttggtttagtggtcccacgctttttcttgactaaaactctttattatgataaaattgtagcacgaggagggatactatgaaatttaagaatatattagcggctattactatagccatgctacttatggcgggctgcaccaatgtgcctgaagcgccaaaggaaaaagttgaggttgacaatgtgaaatacgacaagttcacatctgagagctacacagctattttcgaagattatataaacaatactgacgagaagaaccttatctactcgccgtactcttacaagcttgctcttgagggcctaggcactgtgacagcggactttgatgcggatgagtaccttggctacgctgttaaggaaaatatgcctaaggagcttagtggcactaagactaagaccattatcatgctaaataagaatgagtttgagactaaagataaaaatataaacgtcgtgagctttccagatgaggctgtaaagcttagtgataacgccaagaaagaggtttttggcgagcttttgtggcctagcgaatatgataatgcgactcgttttgccatcatgaacgcgactaagttcgagtccgaatgggctgagccatttgacaagagtttgatgagggatgacgagttttgcacatatggcgatggcagcggcaagccgggggacattatcaagaagaagtacatgattggcgagcttgacactcttgcctacgacgatgatgatgtcatggtcggcatgaagcctcttaagaaaactaactcagctgtctacttcatagcggcaaaggactttactaaggacaaaattgcaaagatcgccgcaaatattactacgtatgtcaataaacttcgcgattataaagatggtaatggcgcaaagttctacgactatgttaatataaaagtccctactatattggacgagactaaggtagatgttttgaaagcggagctaaatgcgggtcacgtggggcttgcgaagggcttcaaggttaaggacactatcacaaataagggcgatgaagagctatatattaatgatatcacacaatttgcacgcttcaagcttgacgacaagggtgtaagagctgaggcggtaactgatataaaggacggtgctgaagcacctgtagagaatccgacagagcttaatatcgagtgtacacagccattctttgtagcagttgaaagcgagggggtaatcaccttcattaccttcatcggatactaaattttgcgttcgtgcgtagcaccaaggttctcgtacgcaagtacgaggttcttcaaattgcccacggaacttgttcgcttcgcttcctccctcaacgtacctcttagtacgatgtcgatcgggcgctacgttccacttcgtcccgtgaatcatagcgcaaaggttcacgtccatttatggacggggttattctttttctctgtgtagcgtaaaggttcacgtacgcaagtacggggttcttcaattactcgttgtacaatgtagcaagatataaaattgtctacggaacttgtacattccgcttgacaaaaatctccacatcgcgcaatccatcatagcgcaaaggttcacgtccatttatggacgtggttcttcttttccagcaaaattgctcttcggacaaaagagatctaaatcaattcgctaatctcatcatagcgcaaaggttcacgtccatttatggacggggttattctttttctctgtgtagcgtaaaggttcacgtacgcaagtacggggttcttcaattactcgttgtacaatgtagcaagatataaaattgtctacggaacttgtacattccgcttgacaaaaatctccacatcgcgcaatccatcatagcgcaaaggttcacgtacgcaagtacggggttcttcaattactcgttgtacaatgtagcaagatataaaattgtctacggaacttgtacattccgcttgacaaaaatctccacatcgcgcaatccatcatagcgcaaaggttcacgtccatttatggacggggttcttcaaattgcccacggaatttgttccatctataatatctcaatagtgagaaaagtgattttcacgagcgcagcattcggagaaaactgtaattagtgagaaaagatatgttccaaaagcagcgcattgagacaaattgctccaattgctttgcgtaggacgacggccgagtgtcttgcaccaaggttcttgccaaaggggcaaggttcttctaaatccatctagttgagcgtagcgaacgaatatggatttttagtcggacaagcttagcaattgtcaatttgttgaactaagctgcgtggaactatcttttcgatgtgtgaacaagcatagaaattatcagttttcgtagaccagcaagcgagggaattacttttcgatgtgcaaaattattcttcggacaatatagtgatgagtaacattattctttgaataagagtcttataataaatatttatagtaatgagcgtggtatatccacgctttttctatttgcaaagctaaaataatatctataataaacctagtcaatataaataagtataatgcgtgtacaaatcctcttctttttcaaaatatattgggataaacatattgactattttctatgtgtgtgctatcatcaatttataaataagaaaggagtgaaggatatgagtgaaaatatatatgcagctgtttctaaaaagcttaaggcgatatcggatcaaaagagactaaagattgttgacatgctatcttgcggtgagctatgtgcttgtgagattcttgaaaagtttgacatcactcagccgactctctctagtgacatgaaaaagctcgaggaggcagagcttgtcaagagccgccgcgagggcaagaacacttattatacgctaaacaaaaaggcgcttgaacacttccttgagcagcttgagtacatctttggtgacaagcctgattgtatctgtcacagcaaggagaagattgattactaatatgtatttcggataaaatataagatttatctaaaaaatgagcttatctgtattggataagctcttttttttaccctatccctgcccatatcttgccaaaatcgccatttagtgatacaattaccttaggtgatactatggatttaaaggcgaagcttaaaattttatctgactcggcgaagtatgatgcttcatgctcttcgtctaattcttcgcgcaagaatactggcggcatcggtaatgcggcctcatctggcatctgtcacagctggtctgaggacggccgctgtatatctctacttaagatcttattcaccaacgtttgcatttacgactgcgagtactgcatcaaccgcgcttcgaacgatgtcgtgcgtgcttcgttcacacccgaagaggttgccgagctcactatgaacttctacatccgtaattacatcgagggcctcttcctatcgagcgccgttatcaagagccccgactacactatggagcagctgatcaggactgccgagcttcttcgtaacacttatcattttgctggatacatacatatgaaggtcataccgggcgcgtccaaagagctagttacaaaactagcatctctaattgatagagtctctgtcaacatagagctaccgaccgagaactcacttaaaatgctcgctccgcaaaagactactgatggcatcatgaagcccatgaacaatattaaaatggcgatagctgagaacaaagaggacaggttgaggtacaagagcgcgccactcattgccccggcgggtcaaactacgcagatgattataggtgccgcgaatgaaagtgacgagaccatcatcacgaaggcgtcgcttctatataaaggctttaatatgaagcgtgtctactactcagcctttgtccctgttgttaagtcgaagtacacatccggcattaaagctgcgccgctacttagggagcaccgcatctaccaagcggactggctgatgcgcttctacaagtttaagccgaatgaaatcgtttcacgcaaaaaccccatgctcgacctggaccttgatccgaaggctttttgggcaattacgcacatcgagctcttcccgatcgaagtcaacaaggcgagctacgaggaacttcttcgcgtgcccggcttcggtccgacaacttgcagaaggattatcaacgcaaggcgctttgccaagctatcgtacacttcacttgagaacatgcacatctccttaaagcgtgctaagtacttcatcacagtaggcggtgtttatagaggtggtaaagtgggtactcgtgaagagctgcgcataaaactcatggataaggtgaacttaaatgaacagctatcgttattttgattacgaccaaagcttcgagggattaatgacggtcatctttgaactttatgaggacatagagcgcgcgaagtacatgagagaggctcaagagtccctactcgacactaaggtctttatcgcgacggatatggaaaaggcgactcgcgtaattaatgccatcaaagaaaaattttcaagccgcttcatgagggaagtcattgcagtctttttgtcctatgatcctaagaaagaagatatattaatccgcgccatcaagggcatcttcaagcgcggctacggctacatcttttcttcggagaaggcggcaagcgagtttcgccgcatacgtagaagcgttttatcagagaaccactcgtacaagggtctacttcgcttcaaagaggtagagggcggcgtgatgctagctgagtttgagccaaaaaacgacatccttacactactcgtgccgcattttgtaaaaagatttcctacgataaacttcgtcatcgccgatgtaaagcggggtacggccgccatgcacatggacggcaaagtagagtttctggagctaaaaaagctaaattacgaaattagtgagagagaaaaattcttcgaagaggcttggcaggacttctacaaggcaattgccatagatgagagacgtaatgaaaagctcatgatatccaatatgccaaagcgttactggcactacctcactgaaaaataacttgtatttaatgagggtttccattataatggaattaaacagtttatcagtctaaatgattaaataaaatatatgcacagaaggaagtgacattttgattaaagaaaaatttaaagaagtcatagcgaccgttttgccgatctcgctacttgtaatcatactaaacttcacattcataccgcttgaggcagatctattcaaacgctttttgctaggcgcagttttcatacttttggggctaacgatatttcttatcggcgtcgaccttggcatcacacctatgggagacagcttcggtcacgcagcagttaaaagcggcaagctttcggtcatagcaatcatgggacttgtgcttggcttcgttatatccatagctgagccggaccttcacatcttggcagaccaagttggtgatgtgaccttaggcgtggtatcaaagtcgtccttagttatgcttgtgtcaatgggtgtcgcagtcttgatatcgctaggcatggtgcgtatagtaaaggtcttctcactaaagacattcctactcataacatacggcgtcatactagttcttggaatacttgcagaccagtttttcctagccatctccttcgatgcatcgggagcaactacaggggcgcttacagtacccttcttacttgctttatccgcaggtgcctcagccattaacaaagatagtcaaaagtccgaagaagactccttcggcttagtaggcatagcctctgcaggcgccatcattggtgcactcttacttggtatgctgggtagtccaagctttggagacgtacccgactatgctgcagcaagtgaggcaggagtcatctcgcacttcattcacgaggcgccgatagttgcaaaagagatcattatcgcattgctaccaatcatcgtgatatatacgatatgtaacctagtcttcttccacaactcgaagaggatgaacgcaagagtcgcaacaggctgcgtgctaacattcgtaggactagtaatcttcttagttggtgtaaactccggctttatggatgtcggacgttatataggccgcgtgcttgcaacagagcacagcaagaccttcatagttgccatcgcctttttaatgggtgttctaactatacttgcagagccggcagtgcacgtacttactaatcagatcgaggccgttacagcaggctcaatcaaaaagtcagtagtacttatgaccttgtcaataggtgtcggcatcgcagttgccttgtcgatacttaagatactagtaccagggatgcagctttggcacgtcttgctacctggatatatacttacattcatcattatgcgcaaagtgccaaacctattcgtcggcatagccttcgactcaggtggagtcgcatcaggaccaatgacagcaacattcatacttgcttatgcgcaaggagttgcagcgtcaacaccatcggcagatttgcttatagacggcttcggtaccatcgccatggttgcgatgacacccttaatagcactgcaaatacttggtttattctacgtaaaaaataaaggaggaggagctaatgcgtaatttaaagtctcgtcacttagagatgctagtagtcatagtcgagcagcacaaagcaagcaaagtcttgcacttagctgatgagaaaggcattacagcctcagtagccatgctaggcgtgggcactgcatcaaggacaatcttcgactaccttggactaaacgacaagaagaaagagatacttctaatctttggcacaaacgaggagataagaagccttgcagcgtgcatcacagaaaagttagagctaaacaagccaaaccacggaatcgcctacatcgagagcgcattcaacgtctttggcacagaagataatgataaagataatgataatattaaaagaggtgaaacaatgtacaacgccatctatacaatagttgaaaaaggaaacgcagaagacgtcatcgaagccgcacaaaaggcaggctcaagaggcggcactatagttaacgctagaggctccggcagtgaagaagcacgcaaagtcttcaacatgttcatcgagcctgagaaagagatcgttttgattatatccgaagagcagatgacaaaggatatagttgagtcgataaggaaagagacaggtattgaggagaagggtaagggaataatatttgtgacgaatgtggaggccacatatggcctagtcaaaaattaggattttgcgttagaattgcgcctaaggcttgcgcgctcgcttcctccctcaacgtacccgttagtacgatgtcggtcgggcgctcgttatgcatcgccttatccatcaattctctccgcaaaatctgtatgcgatgcttattcatttttttatcaaatcgctctgcatagcgcaaaggttgttaagtccatgcaccaagaaaacgagtgcgagcgatgttcgattggcaatgcatgccttatgacagagtttacaaaggttcttgttcgtaagaccaggttcttcttttgcctacagaatctactcttcgtacaagattgcgaaattaagcgctaaatataaacaatacgataagagagcttcggctctcttttttgtgtgcagctaaaagtgaattcttaagcaaaacttaatgattcttaagaaattcttaaggtttaattaagaaaaaattaagatttgtatattataataagaccataaagataaacaaaggagtgaaaactatgaatgaaattttaaaggtaaattctgtaagcaaggtttacggctctttctacgcactaaaggatgtcaacatgtgtgtaaacgaaggcgagatttatggtcttgtcggcaagaacggcgctggtaaatctactttacttaaaatcataactggccttagctaccaaacaagtggttctatcgagcttcttggcgatgcgggcgcaaatattaacatagcgaggagaaggacgggcgctctaatcaacaggccttacttcattccaacgctaagtgcaagggacaatcttgagtacatcgcgatcaacagggacatcaaggagagaaagaagaaggttaacgaaactttggagcttatcggccttgaaaatactaagaataagaaggcgaagaacttctcactaggtatgcagcaaaggcttgccatcggtatcgcgcttatcgatgacccggtctttctaattcttgacgaaccaatcaatggtcttgaccctatcggtatcaaggagatcagggaccttatcaaacttgttaatcaagagaagaagactactgtcatgatctcgagccacatcctaagcgagcttaacatggttgctactaagtacggctttattgacaatggcagacttatccaagagattactaaggatgagcttgatgaaaagcttaaatcgtcgacaaagatcaaggttgacgacgctgccaaaggggctatagttttggaagaggacatgaagcttcataattacaaggttttagctgataatgttatagctatctatgataatgttaatagcagcgccatattcaaggccttccaagcagcagacgttgaaattatcgagataaatcaagctaaggaagagtttgaatcttatttcttaagcttagtaggaggtagaagagatgtttaattttataaaagcagaaatttttagaattagtaaaagaaagtacaatgtaggtctgtacatcttcggttttgcaatgtgtgcctttgtcttatacatcttcgcaggatttcaaaagagcagatttgatgtagaccgtgacctttcgatgatgttcttcactttaggtcaaataatgtctatagcatccatactaatacctctgatggtgaaccttacagctcttgaaccatacgcatcgggcgcaattaacaacaacctagctcttggccaatcaaggatgaagatctacttagcaaacgcaatcatttccttcctatatatcttggtctacatgatcatcatgtgcactatacttctagctgggggcgcacttatcgcacctaccagcactacaccatttgcagatatgatgaagaactttcttataggctttgcatatctactaccatgtatatggttttacgcgtcactagtcttgttcttccaaatacttacaagacacagatcttcagccattgccatctcttatgtggccatggcaatcttccaaccagttcttttaataattttgagtaaatttaggttgtctccaaatttaatattcttagcaccatcaagaattgtccaatcaataacaacaatgatgggtagctatgaatttgactttttacgaggaataacttacacagaaagaattatgaatgttaacaccttgctttatatcatgcttggctggatagctcttgtttgggctggcatctactttgtaggcagaaaaagagaattttaatgaggagggtatttcctgcaatcatactagcagcggcactaatttttttagtagccgctcttggtttagatttgatgactgttgttattgtgcttttaactcttgtggcatatctttcttacaccatatacctatcaagaaaagagcttagagaatttcgtgaaaatcttgaggacaaggaagcaagcgagattaaggtcgctttgcaaagctattcttatacgggtgaattgaatgagatctgtaagataattgaagcaatcattgactcgaagaacactatgggtcaaaagtacaacgcctcgatcgagaaccaaaacctgatgattacgaacatttcgcacgattttagaacgcctcttacctccatcatgggctacatcgatgtctacgagagaactagggacgagaagtaccttgagataatcaagaagaaggccgaggagctaaaggacctcatcgacggtttttatgacttttcaaggcttgtgtcgaaatcctacaagattgataagagggtctttaatctcgatgactttatcaaggaagagatagtgaactactacgactactacattgccaaaggccagatgattgaagtgagcttggatagagtgagatgcttccaagatgagaagaaccttaagatagttgtcgacaatttgatttcaaatatgatgaagtactccgaaggcggcgacaagattgagctaaagtacaaagatggctacttcgagctaaaattttctaatctcgcgcatatagtaagcgatgatagtatagagagagttttcgaaaggaactacactatagataagtcgaagaatgatgcgtcgagcggattggggttaaatattgtggagaatttgtgtgaattgatgggacttgaagcaagtgtatcgtacgaagatgatgtatttgcgattacaatcaaaggcaaagcactaaactaaataaaaaataaattcataataaaaccactgaagcgaatgatatttaattatcatcgcttcttttttattattttttactattttcattgaaaaataaaaaatatgtttatattttcatttgctgggtataaataagtcagagatagtcaaaggaagtgatattatggagtataaagattactataaaatattaggtgtcgacaaaaaggcctctgatgctgagatcaagaaggctttcaggacgcttgccaagaagtatcatcctgatttgcatcaaggtgacaaggcgaacgaagaaaagttcaaggaaataaacgaggcttacgaagttctctctgacaaggacaagagacaaaagtatgacgctttcggctcgaactacgacttcagaggcggacaaaactttaacccgaacgattttggttttggcggctttggcggtgctaatgcgggtggcggcacttattacagatacgaaacaaacggctctggtggtgacttctctgacttcttcaatatgttctttggtggacaggggggcactagaagcagcagaagctcagcaggctttaatataaatgatatattcagaggcagagcaaagaaagagagacaaaggtacaacactgagctatacatcactctcgatgaagcatacagtggctcaaagaggtctgtctcactaaacattgacggcaagaacataagcgtaaatctaaacataccaaagggtattaccgctggcaagtccataaaagtggcgggcgaaaagtggggtgtaagtggcgacatctacttcaagattcaattcttaaaggatcatcgctacgagcttgatggcctcgacatcaaaactagcgtggatatctacccttggggcgcatacttcggctgcgaaagagtggttgaagtctttgacaagaagatcaagattaaggtgccaaagggctacgacactactaagcttatgaggatcaagggcaagggctttactgatatgaagggtgcaacaggcgatttatatatcagatttaacatggtgaacccaaaacttgatgaggaaggcgaaaaattatataaagaattagaaaaaaaatataaataaatataatagaaggtgatattatgaacatggataaattaacgaaaaaaacaattgaggcgataaataattcgaatgaggctgcgaggtcactcggcaatcctgagataagaccagcgcacctacttaaggcactacttgaggacaaggaaggccttatcagaactacagttgaagctatgggtgtaaatgtagacggcatgcttatggatgcccaaggcataattaacaatttccctaagcaaagcggcgcaaatatctacacatcggctgaatacaataaagttttggaactagcagaaaatgagatgaaaaacttccaagatgagtacctaagtgttgaacatctattcttaggtatcatggaagtgaaaaatgcgaacatcgatgccattttcaagaagtacaatataacgagagcggcattcttagatactttgaagggctttcgtggcaatcaaaatgtaactagcgacaaccctgagatgcgttatcaagcgcttgaaaaatacggcagagaccttgtggaatacgcaagaaagggcaatatggacccaattataggccgtgacgacgagatcagaaacgttcttatgattctttcgagaagaacaaagaacaatccttgcttaatcggtgacccgggcgttggtaagacagccatcgtcgaaggtctagcacaaagaattgttaaaggcgacgtgccagaaaatttgaaagacaagacaattttcgagcttgacatgggcgctctaatcgctggagctaagtacagaggcgagtttgaagagagattaaaggcagttttaaaagaagtcgaaaaatctgaaggcaagataatattattcatagatgaaattcacaacatcgtcggcgccggcagaactgaaggctctatggacgctggcaaccttctaaaaccgctacttgcaagaggcgtactaagaaccatcggtgcgacaaccattgacgaatacagaaaatacatcgaaaaagacaaggcacttgaaagaagattccaaaaagttatggttactgaaccatctgttgaagacaccatctccatcttgagaggtttaaaggaaaagtacgaggtttatcacggaatcagaatttctgaccccgctgttatagctgccgcagtactttcagatagatacatcaccgacagatatttaccagataaggccatcgacctaatggatgaggcctcggcgatgattagaactgagattgactcgatgccagaagagctcgactcgaagagaaggcttattatgcagcttgagatcgagagagaggctcttaagaaagaggacgacgagcgcagcatgaagaggcttgaggagcttaacaaggatttgcaagcgcttcaagaggaatacgacgtcagtctaaagaaatggcaagaggaaaaagacaggatagaggacgttaaagagcttaagaagaagatagatgagacaaaatacgagatagaaaaggcacaaagagaatacaatttggaaaaactttccgagcttaaatatggtacacttgcgaaacttgaggcagaacttaaggaaaagaacgaaaatgtcaatgaaaagcaaaagtatctaaagcttgaagttactgaaaacgagatcagagacgttgtatcgaaatggactggcatacctgtttctaagcttgaagagagcgaaaaggaaaaactactaaaacttgacgagatacttcatcaaagagtagtcggtcaagatgaggcgatagaagccgtatcaaacgccatcatcagaaacagggcaggattatctgacccgaacagacctatcggctccttcatcttcctaggaccaactggcgtaggtaagacagaattaacaaaggccttgacacaagacctattcgacgatgaaaagaatatgattagaatcgatatgagcgaatatatggaaaaattcgctgtatctaggttaataggcgcacctccaggatatgttggctacgaagaaggcggcgagcttactgaaaaagtaagaagaaaaccatattcggtagtattattcgacgagatagaaaaagcgcatccagatgtattcaacatacttctacaagttttggatgatggtagattaactgacaatcaaggcagaacagtcgatttcaagaacaccatcatcatcatgacaagcaacatcggctcgccagacatacttgaaggaattagcgaagacggcaagattacagacgagacaagagaaaaagttaatgacgagatgaaggccgcattcagaccagaatttttaaacaggatcgacgagattgttatgtttaagccgcttatgaaggcagaaatctttgacatcatcgaaaaagaagttgacaagatcagagttaaacttgaagcaagatccatcactttgactatatcagaagctttgaaggaatacatccttaaagaaagctactcatcagcctttggcgcaagaccagttaagagattcattcaaagaacagttgagacaaaactttctagaatgattatagctggagaagttatggacggcgaaaacatcacaatggactacgacggaaaagatattgcagtaaagaaaaattaatatagacgaaagagcttctactacggtaggagcttttttatgccgcgctgtgtatattgacaaaggaagagaattgtaatacataaattcgtctatatccttgacaattaagtttcgttgtgctacaatcatcattgtaataattaatattttatcactaggggagccattggctgagagatttatcgacccttatgacctgatctggttagtaccagcgtaggcaagtggagtaactcctagtgacatcattaggaggtttttttatgaaaaaatttagcacaaaagtattgacagaagcggcagttatgatcgccatgtccatagtacttggtagattcaagatttttgagatgccacaaggcggctcaatcactcttggacaaatgataccacttttattctttgcaataagacacggtgctggctacggcatcatcgttggcgcagtgtatggcgttctagatatgatactaggcggctatgtagtaacaccattccaagctatacttgactacccactagccttcggactacttggacttgcaggctgcttctctaaacaaattgttaaagaaggaaaatcattctacgtaccagcctctgttatcatcgcagtactaggtagattcatctgccacgttgcatcaggctacatcttcttcgcagagtatgcagaaggatcaggccacggcccatttatgtactcagttatatacaacggctcattcttaggagtggaagcggcaattgcttttgtaattattcttattttagcaaagaatgtgttgctttatggcttagatagaagcaaataagattttgcgcttgtgcgaagcaccaaggttctcgggacccatccaaagcgtagctttgaagatgggtgaggttcttctaattgcgcctaaggctcgcgcgcttcgcttcctccctcaacgtacccgttagtacgatgtcggtcggtcgctcgttatgctgcgccttatccatcaattctcttcgcaaaatctgatttattggataagaactaatatcttattcttatgaaatttaaaattatatatcttttgcattggctattgtgagtttgcttacaatagcctttttttgattttgcacatcgaaaattatttttgtgaaaataaattttgcttaagcccataaactaaatatattttttaatttgcagagaaagcaaaataattcaaactagtcaaagggcttgctttaatgcaaataaaaagacaggtgcttaatatagcacctgcccatctcttatttaattacaccttcaacaaggtataactttttaaacaatattttcttgaatttcaaagttagcgtatcgtccatcgccctgacagcaacaaagacgtaaaccttgaatccatctacttcataaagatcgtaatcatctttattactaggttcttccaatttcacgattggtgttacttcacctgcgcctcattcggagcagcccagtaaatcaatcgttacagtgttttttccttcgctcttaagagcgctcttaaaactatcttcaagaataatcttcataattgtaacctcctttaatagagtttagtccacaatttcttttctgttgtaaatttcttcgttcaatacaccagttctcttcgcagctataaccccagcaagtagtgagtcagagatgtttagagcagttctacccatgtctatgattggttcaactgaaattagtagaccaactaagccaactgggaagtttagtgcacttaaaacaactatggcagtgaaagtagctccaccacctacgcctacagtaccgaagcttgctagtacgcatagcaatgctacttcaacaagaaaagctattgacaatggatttatacccatagtcggtgcaatcataacagcaaccatagctgggaagactccggcgcaaccgttttggcccacgcttgtaccaagtgtcgatgctaggtttgctatgccctctggcacacctaagttattttctgcattgtttatggtaataggaagtgtagctgcagatgatcttgatgtgaaggcaaataatagattactcatagattttctgtagaatgtgaatggatttagtccagctgtcaatagatatagcatgtgaactataaccatgattatcattgctgcgtagctgattagtatgaagtttacaagctttagtatagcttgccaatcagatgttgcagtgatcttgatcattagagctaaaacgccgtatggtgttagtctaattatgattctaacaaggtgcataatgacatcggagatgtcctgtaccccttgaataaacctatctgccacgtccttcttataatttttaagctgcatagctgcaagacctatcatgaaagcaaagaaaacaacagcaagtgttgcgttattgccttgaccagtaagtgcgtagaatggatttgttggtatgatattaacgatttgctcttgcataggaagtttgctgaaatcagcttgcttctccataagcacctcttgtctgtgcaattcgttttcaccagaatttagtccatcggcatttagtccaaagactgctgataatgagccagataccatagccgcgataaatactgtgattaagaagacagccataatcctaaatgtgctcttgcccatgccgctttcttgcatagcaactgatttaacgatgcttataaagattagtgggaaggccaccattgttaaaagttttacataagcactgccgactatcgaaatccaggatactgatgttccaaggacttccttatctttaacgataatttgtagtagtgcgccgaaaatgatgccgactgctaaagctatcaaaactctagcgttgaagcttaggtttagcttcttcatgtagctaattgcaaatagcatacatgcaaatattgcaataattaataatacaaataataaagtcattttttcttcctcctttgcttgaagcataccacttatgcttttaattgtcaagaagggtgcgtcacatagattgatttatgcttatggttttgcgaaaaaacattatacacataacattatataaatatggaacgagatcaaatatctagttttaaatttcgacgaaaaagcaagatgattgaagaacctcgtacatttagtacgagaacctttgcgctagccaaagttgagaattttctgaacgagttgaacttattgttcatcgcagtgaagaaaaaatttgaaacgagtcaaaaggattaacctcttagggacagagaaaataataaaaacttggaaaggaggtaattctcatgtcaaatacgaaaagaacaggacaaacggcactttatgagcgtttaagtcgtgatgatgaccaagggtcagaccctgaaatgcaaggagaaagcaattccatcaccaatcaaaaacagctgcttgaaagctatgcgaaaagaaacggttttgtaaatatctatcactataccgatgatggagtaagcggaacgacctttgatagagagggatttcaaaagatgataaaagcagtagaagaaaacaaagtatctactgtgatagtaaaagatatgagcaggtttggcagagattacctcaagaaaaatacagtctatcttcagagcaagaatggaagaaggtaaaagagtatctccaagcgttccatacggctattatagaaaccctaagaacaaacagcagttacttgtcgataaagagagtgcaaaggtcgtaaaacgcatttataggcttgtaatagagggatatggcgtaacacagatagcagatatactaaccaaagataaagtccttatcccatcagcctatgcagaaatacactatcctgaaagtaaccacagttccaagaaaagaggaatagaagacccgtatttttggacaccaaccacagtaagctatatcttagaaaaaagagaatatatgggacacaccgtacttgggaaaacaatatgctttgattataaaaccaaaaagcgaagaaaggcaaaagaagatgaactcattatcttcaaaaacacccatgaagccatcattgacgaagaaacatggaacaatgctcaacgattaagaaaaacagtgagaagaagtccaaagtatggtacaacctcacacccgtttacaggacttttaatctgtgcagattgtggaggaaaattaagctacagagagccggcagaacataaagaaaagaaatatgatagtgattactcttttgtatgtcaacattaccgacacagaaaaggcacttgcagtatgcactacatcaaagtaaaaacagtaaatgaaattctattaaaatcaatcaaagaaatcacagactttgccaaagaagaaaagcaagaatttctaaaagtgatgaacaagttatctgatgaaaaaagagaagaaaagtatcaagatgataaaacgaaattagaaaaattatcttcaagaaatgaagaactaacaacccttattacaaagctatatgaagaccatgcacttgggaaaattcctgtaaaacactttgatagattatttaacacttatgatacagagcaacaagaattagaaaagcaaatacagtattttgaaaatgaaatagaaagctatcatcagagaaaagttgacaccgataaattcctaaagatgatagaaaaatataccgatattgaagaactcacagtcccaatgataaatgagtatatagaaaaagtagtagtccatgaagcaacaggaggaagaaaagggaaagatagaaaacaacaagttgatgtttactttaactttataggcaactgtcaagtaccacagaaagctgatatagaaaaaatggcttaaaaatggtataatattactaattattgagatagaaaattagaagttataggacaggtgtttttatgagtgaaattttagctaagccatgtgttggagcaattattaccaaaacggaaaataatgaaaaatatattcttattcaaacaagacaaaaagatgatggaaatgaaactaatggaatgatagaaatacccgctggtaaggttagagaatatgaaaatattttttctgcactgtgtagagaagttttggaagaaacaggattgaaaataacaaagatttatgggaaaaatagtgcagtatcaaatagggttggagatgttaccactatttcgtttgaaccatattgtgttacacaaaatttatctggtgcgtattctattattcttattacatttttatgcgaggcagaggggaatttgttaaattacacaaatgaaacccaaaatattagatgggaaaagatttcgtatgtggaagaattgttaaaagaaaaaatagaacaagtattctttatgcatgtaaatgctttgaaaaaatttttaaacctataaatctccgtttgtcgaagtaaaacaattaaataaaaacaataatatagcaacttacaaaacagtaaatcaaatcggtttactgtttttctttgctcaaaaatagaaagagaggaaaacagaaaatgaaaaatatagatgaaaaaattttaatggcagaagaagaaattaagcagttacaaaacaaaagaaaaaagctcatcagtcagcagaaacaggaagaaagaaaaaagagagataaaaggatatatgaaaaaggagcagtctttgaaagtatctttaccgaaagcaagggttttaccaaagatgaattctatcagctaatcacattcccaaatatcaaagagttagtcaatcaaaaaatcctaaaaatcatagagaagcgagaacaaagcgaaaacaaaattatagaaacacaagaggaagaaatgaacacagaggaatagtcccttgtttacaagggcgcacttatacaccctaaagggtgtgtgcgttctccgaaggctcttagcagagggcatatcagctaacgctgatacaggggagctacactcccctacggaaataaatttcctaccccttgtgtacttcccaaaagaaatcggataaaagctatccgatttttttaggaagtcttatctatcgccaccatatccatataagaaaaagaaaggaggtttttagctatggcgatataccatctttgcataaagattatctcaagaggaaaaggcaaaagtgcggtagcagcttccgcctatcgaagtggtgaaaagataaaaaatgaatatgacggcatagtccatgactttacaagaaaaggcggaatagcccatacagaaatcctattaccacaaaatgcaccacaggaattttcagatagaggaacattatggaacagtgtagaaaaaatagaaaaaagtaaaaattcacagcttgcaagagaaatagaaattgcattgcctaaagaattagacagagaaaaacagattgagcttgtaagagagtatgtaaaagaaaattttgtaaaagtcggtatgtgtgctgacattgcattgcacgataaaaatgagggaaacccacatgctcatatcttacttactatgcgaccgttcaacgaagataagacatggggagcaaaatcaaaaaaagaatatatccttgatgaaaacggagaaaaagtaaaactcaaaagtggaaattacaaaaccaaaaaaatcaatacagtcgattggaatgagcaagaaaaagcggaagagtggcgaaaagcatgggcagatattaccaacaaatatttggaagaaaacaacatacaggaaaaagtcgatcaccgttcttatcaaagacaaggcatagaacaaataccgaccattcatttaggaatatcggcaagtcaaatggagaaaaaaggtattgttaccaacagaggaaatatcaacagagaaatcagacatcaaaacatgattttaagagaaatttcaagacgaataaaagccttaatgagatggataagaagtttaacaacaaacaagaacaaagataatctaatagagaaccaagaggatatatctttacaatccaccaccccactaaaacaaaatgatttaacagatatactctctaatctcataaaagaaaatgcagataatagtaatataaacttagaaaaatatattgaaagctatcaatttcttaaagagaaaaatattacatcaatacccgaattgaaagaatgtatatcagcattaagagataagaactacaagactacaagagctatcaaagataccgaaaagaaaaccaatgacaaagtagagcttatagaccaatcagaaaagtatttgaaacatagagacacatacaaaacctatgtcaagttgaagaaaagcaagcaagaagatttttataacgaacatacagcagaaattattttatttgagagtgcaagaaaatatctaaaagagcatttaggagaaagtaagacattagctatatccaagtggaagttagaagcaacagcattgaagaaagaaaaagacaccctatattctcaaatcttagatatgagaaaagaggttgaacaagctgaaagtgttagaaactgtatagagaaattactacaaggaaatagagaactaacacaggtaaagaggaacgagttagacctataaaactaattggaaatatggtataataataaacaaatacaattttgatttaaggagatgaacattgtgcatgatttgaaaataaaaggtatcattgaatttttaattaaggcaaaaaaagcaacttatgctggcgatggaaatacaaccaattcatcaagaccgtgttcacatgatttaaagtattttgaagataattttgaatactatgattcttattttggaacagatccgttcattggagaggaggctctttggtcaaacggagaaataatttggtcgatgaactatgcaggtcgaaaacttgacaaagaatttgagtacggatttttaaaagaagcattgcttttggttaatagtgaaaatccgtttagaggacctgatgaatattctaatggtgattataaatatatgtgtgaaacgataggggattttgaatggtttcaaggatatgaatcaataacttttcaagggaaattagtctatgagtgctattatcatggagggatagttcgataaatttcggttttaggaggtggaagtttggaattttataaagcgttagttggagaaaaaaagcaaaagaaaaatatattcagcgatttgattggggagtgggatattgaatgggttgatggaaaaggtactgaaaaggaaagacatgtaattggagaatggatattttcagagatactaaatggtgatggaatacaagatatttttatttgtccatcaagggaagaacgagtatccaatcctcagcctgacgcagagtatggtacaacaataagaatgtacaatcctaacaaacaaaaatgggatatttgctatacttgtttaggtaaaatggtatatttagaagctgaaaaagtagaagataaaattgtacttacaaatataagcaatgataaaggcataaatttatgggtctttgatgatatttctccttcaaaattccattgggaaaataaaacatcttttgataatggaaaaacttggataacaaatggagaagtatttgctaaaagaagataattatagataatggtttgtatcatgattgataacttaataaaaccgatacaggaacagtaaatcaaaaaaggtttactgtttttctttccctaaaagttaaatttccatacaggacaagcgtccataaatataaaaaggtacttgacaaaacgctctctggggaacgacaaaagatattcagccttatgtagatgagaagttccaaaataatatcttgcttactcaaaccgagcgattaaccatgaatggcagaccggcaaatccaaagtatgcaagaaacaagaatgtgcttgttattggtggttcaggctcaggaaaaacaagattttatgtaaaaccgaatctaatgcaaatgcactcgtcatattgcgtaacagatcctaaaggattaatcttatagggacagagaaaataaaaaacttggaaaggaggtaattctcatgtcaaatacaaaaagaacaggacaaacagccctttatgagcgtttaagtcgagatgatgaaatgcagggagaaagcaattccatcactaatcaaaagcaactacttgaaagttatgcgaaaagaaacggctttgtaaatatctatcactataccgatgatggagtaagcggaacaacctttgatagagagggatttcagaaaatgataaaagcagtagaagaaaacaaagtatctactgtgatagtaaaagatatgagtaggtttggcagagattaccttaaagtaggtttttataccgaaatacttttcaaagaaaagggagtaagatttatagccatcaataacggaatagatagtgaaaaacaagcagaaagcgactttaccccatttctaaacattatgaacgaatggtacgcaagagatacatcaagaaaaatacaatctatcttcagagcaagaatggaagagggtaaaagagtatcaccaagcgttccatatggctattacagaaaccctaagaacaaacaggagctacttgttgataaagagagtgcaaaggtcgtaaaacgcatttacaggcttgttatagagggatatggtgtaacaaagatagcggatatactaaccaaagataaagtccttataccatcagcctatgcagagatacactatcctgaaaataaccacagttccaagaaaagaggaatagacgatccatatttttggacaccaaccacaataggctatattttggaaaaaagagaatacatgggacatactgtacttggtaaaacaatatgtattgattacaaaaccaagaaacgcagaaaggcgaaagaagaggaactgattatctttaagaacacccatgaagcaatcattgatgaagaaacatggaataacgcccaaaggttaagaaagacagtaagaagaagtccgaagtacgggacaacatcccacccatttacaggacttttaatctgttcagattgtggaggaaagttaagttacagagagccggcagaacataaagaaaagaaatacgattgtgattattgttttgtatgtcaacattacagacacagaaaaggctcttgtagtatgcactacatcaaagtaaaaacagtgaatgaaattctcttaaaatcaataaaggaaataacagattttgcaaaagaagaaaagcaagaatttctaaaagtgatgaacaagttatccgatgaaaaaagggaagaaaagtatcaagatgataaaacgaaattagaaaaattatcttcaagaaatgaagaactaacaacccttattacaaagctatatgaagaccatgcacttggaaaaattcccgcaaaacactttgatagattatttaatatctatgacacggagcaacaagaattagaaaagcaaatacagtattttgaagatgaaatagaaagctatcatcagagaaaagttgacaccgataaattcctaaagatgatagaaaaatataccgatattgaagaactgacagtcccaatgataaatgagtatatagaaaaagttgtagtccatgaagccacagggggaagaaaaggaaaagatagaaaacaacaagttgatgtgtattttaactttataggcaactgtcaagtaccacaaaaagccgatatagaaaaaatggcttaaaaatggtataatattgttaattatttagagagaaaaattagaatttgtacacaggatggattagactaatgaatatacatgaatttggaaaaggtaatgaacaagcaattctgctgatacatccttctgttgtaagatgggattattttgaacatttaattccgcttctcaaaaacaaatatcatctgattattccggctcttcccggatatgattctgaggatgaaagtgactttacaagcattgagaagatcgctgccgaattgaatgagtggcttcaggctgaagagattgccgaattgtatgcagtatatgggtgctcgatgggcggctccgttgctttaatggtaacgcttggacaacttattccaatcagacactgcattatggacggaggcattacaccatatcagctaccatggcttgtcacacgctttatcgccttgagagactatctcatggtgatgctgggcaggacaggtggagtgcgcttgcttgagaaggcttttgctaccgatgaatattcgaaggaagatcttcaatatgttgcagatgttttgaagtgctccagtagaaaaacgttatggagaacttttgactcatgcaacaactataagattccacagcccattccgaaggtcgatacgcaaatgcattactggtatgccgatggcgaagaaaaggagcgaaaacttgatatcgcctacatgaatcagcattttccgcaaacagaattcaaggttttgcctaaactggggcatgcaggtcttgttttactgaaaccggatttatttgtgacaatgataaacgaattgttttgagacagacaaattgcagtttgtcgaagtaaaacaattaaatacaagctataacatagcagttcacgaaacagtaaatcaaatcggtttactgttttttctttactaaaaatcagaaaggagaacagaaaatgaaaaatatagatgaaaaaatcttaatggcagaagaggaaattaagcagttacaaaacaaaagaaaaaaactcatcagtcagcagaaacaggaagaacgaaagaaaagagataaaaggctttatgaaaaaggagcagtttttgaaagtatctttaacgaaagcaaggattttaccaaagatgaattttatcagctaattacattcccaaatatcaaagaagcaataaatgaaaaaatcctaaaaatcatggagaaaagagaaaaaacggaagaagaaaatatagaaaaacaagagaaagtaacggaaacagagcagtagtcccttgtttacaagggcgcacttatacaccctaaagggtgtgtgcgttctccgaaggctcttgcagagagcatatcagctaaagctgatacaggggagctacactcccctacggaaataaatttcctaccccttgtgtacttaccaaaagaaaccggataaaaaacaatccgatttttttagtaagtcttatccatcgccactgtatccacatcagaaaaagagaggaggttttagctatggcgatatatcatcttagtataaagattatctcaagaggcaaaggcaaaagtgcggttgcagcagcttcttatcgaagtggcgaaaagataaaaaacgaatatgacggcatagtccatgactttacaagaaaaggcggaatagcacatacagaaatcctattaccacaaaacgcaccacaggaattttcagacagaggaacgctatggaacagtgtagagaaaatagaaaaaagtaaaaactcacagcttgcaagagaaatagaaatcgccttacccaaagaattaaacagggaaaaacagatagaacttgtaagagaatatgtaaaagaaaattttgtaaaagtcggtatgtgtgccgatattgctttgcacgataaaaatgacgggaatccacacgctcatatcctacttaccatgcgaccattaaatgaagataaaacatggggagcgaaatcaaaaaaagaatatatccttgatgaaaagggagaaaaagtaaaactcaaaaatggcaattacaaaacaagaaaaatcaatacagtggattggaacgaacaagacaaagcggaacactggcgaaaagcatgggcagatattacaaacaaatatttggaagaaaatagcatacaggaaaaagtagatcaccgttcctatcaaagacaaggtatagaacaaataccgaccattcatttaggcgtatcagctacccaaatggaaaagaaaggcatagccacagacagaggaaatatcaaccgagaaatcaaacatcaaaatatgattttaagagaaatctcaagacgaataaaagccttactaaattggataagaggaataggcaaagaagaaaaagaagaaactgataatctcaaatctaccctcccacccaatgaaaatatactatccgtttttgaaaatcttatccgtaaaaatgcagataaccataatacagatttagaaaaatacatcgaaagctatcaattcttaaaagagaaaaacattatttccttatctgaactgaaagaaagtatagttactttaagagataagaattacaagaccacaagagccattaaagatactgaaaagaaaatagatggtaaagtacagcttattgaccaagccgagaaatatttgaagtataaggacatctacaaagcctatacgaaattaaagaaaataaaacaggaagatttttataatgagcatacggcggagcttattctatttgaaagtgcaaggaaacatctcaaagagcatttaggggaaagtaagaccttaaatatatccaaatggaaatcggaacttaccactttgaagaaagataaaaagagcctatatagtcaaatattagaaatacgagaagaagtagagcatgctgaaaaagttaagacctgtatagagcagttacaggaacaagaaaaacaactatcacaggtaaataggaatgagttagacctataaaactaagtaaaaaaagtatataatattaactagtgaagacaaaaaataaaatttgaaggaggcgtttacatttggggaaaatagaaatgcaagagaaaataaaacctgttttgaacggcactgcagaaactatgcttcaaagtttttatgcacgtgcagagtattcacagagaaagaagcataaattctatgatgcaaaagcagtagaacttgtaaataagattgattatgacttttcaactgcagcaaaagatcgtaccatgagtagtggtgtaatcgcacgcacactcgtctttgacgaactggtcaaagaatttattgggcgaaacccgactgctacaatagtgaacattgcctgtggactggacacaagattttatcgtgtggataatggtactatcacttggtataatctggatctgcctgatgttataaatctcagagatcagatttttttagaaagcgggagagtttcatctatcagtgcgtctgctttagatccaaattggttcaaggaagtaaaaaacagagagaatgtactttttattatagaaggactgtccatgtatctcactgctgaagaaaatgccaagatactttctatcattcataaaaactttgacaccgctacggtcataatggaatgtattgcaaagatgtgggtaaaacgagaaggggttgaaaaatccattcagcaaaccggagccagattcgttttcggtgcagacagctttgatgatataaagaatattgctcaggggtttcataagattaaagatgacaacatattacgtggtatgcgtgttcttatgcctacattaaagctaatcgactggcttccgattgcgaggaagatcacgcagaagattcttgtttttagtaaagattaaagcaaaccacagtttgcataactaacaatttaataaaaactaacacagaacagtaaatcataaaaggtttactgttttttctttgtctaaaatcggaaaggaggacttatgaaagaagaaaaaagagaaatacaagcaccacccaataaacagttaataatggatattggaaagacaaaatatactgtaaacctacatttcaaacaaggtacaggagaaacatacaaggataaaatactgaagttaatcaagagagaaacagaaaagatataaatttgtcaaagaaattttgtttatgtccttgacaaatcttccctaaaggaacgatagtaattgagtgtggtaagatgcttgaagataatggttatgagataaaaatcttaaataccatcaactttaaaaagagcatgaagtacaatccctttgcctatctcagaagtgaaaaagacatcctcaaattggtacagacaatcattgcaaacactaagggagagggggaaaaatcaggcgaggatttttgggtgaaagccgaaaagctctactatacagcacttatcggctatatcttctatgaagctccaagagaagaaaagaactttgcaactctgcttgatatgattgatgcttcagaagtcagagaagatgatgaaacatatatgaatccgatagacagactctttgaagcactggaaaagaaagagcctacacactttgcagtcaagcaatataaaaaatataaacttgctgctggagtaatagaattaaggagaacacttaatcactattttagtgaaatatgtacttcttaattctttttttattgaaaaattaagagaaagggggtaaaaatgaggaattttgaaaagataacagcactctatgagagattaagtcgtgatgatgaactgcaaggagagagtaactctatcatcaatcagaaaaaaatattggaagaatacgcaagcaaaaataacctgtcaaacatcattcactttacagatgatggaatcagcggaacacagtttgacagaccgggatttatggcaatgatgaacggagtcaatcaaggaaatattggttgtatcatcgtaaaagatatgagcagacttggcagagattatctcaaagtcggtcaatgtatggagatactaagacaaaagggcgtaagactaatcgctatcaatgacaatgtagatagtttttacagagaagatgattttaccccttttagaaatatcatgaacgaatggtatgcaagagatacatcaagaaaaatccaatcgactttcaagtcaaaaggggaaagtggaaaacatacggcaagtacaccgccttatggctatatcaaagatgaaaaagataaaaacaaatggatagtagatgaaaaagcagcagagatagtaaggcgaatatttaacctgaccatgcaaggaaatggtccgtatcgaatagcaaagatattagaaagtgaaaaagtagatatacccgcctaccatcaacaaaaattaggctatggactatatcaaagcaaaaactttgaacatccctatcgttggtgcagctcaaccatagcaagcattttaaagaaacaggaatacttggggcatacagtcaatttcaagacaagaaagcatttcaaggacaagaaaagtaaatatgtatcggaagataactggcttatttttgaaaacacgcatgaaccaatcatagaccaagaaacctttgataatgtgcaaaggataaggggaaatgtaaaaaggtatcctgacggttggggagaatatcacccactcacaggactgatgtattgtgcagattgtgggagcaagatgtatgttcatagaacgagcaattacaaaaatataccctattacacttgcagtgcctatactaaaacaccttgtggcatgctttgtccatcagcacacagaataaaagcggaagtagtcttaaaccttattagggaaacactgaaagacattaaaaaataccttgatgaagataatgaagcctttatccgttccattcaaaatgaaatggaagaaaaagaaaaaatagagatagaaaaggaaaagataagattaacggaaagccaaaacagacttcaggaactcgaacgactgatgtgcagaatttacgaagatatgatcctgaataaaataccgaataatcgctatgaaatccttaataatcaatatgaaacggagcaggtagctttaagtaaagaaattaaggacttggagcagcaggtttcaagatatgaaaaagaaacagacagagcaagaaaatttatatctcttatcagtcgttatgaaaactttgatgaacttacaactacaatgataaatgagtttgtagaaaaaattatcgtacacgaaagagatagaaaaggaagtcagacatcaaagcaaaagatagaaatttactttaatttcataggaaattatgaactgccacaggcggagttaagcgaggaagaaaagcaaaaatttgaggaagaagaaagaaaaatcaaggaaagaaaagacaggcttcatcaaaactacctcaagcgtaaagtaaacggcaagcaaaaagaatatgaggagagatataaggcaaggcgagaggagaaaaaacaggaaaagctaaagagtttgaaaagaacagggataccagtaagtgagtatagaaaaatatttaaaaaacaaaaatgatatacaatatttagttgacattaactatcatatagtatataataaaaacagacgacactgtcggtttttatttgttgagtagaaatgaggtctttattttgaaagaagaaaaacaaaaagttggacaaattagaaaaaaagagattcgagaagctgcaaaaaaatgtttttttacaaaaggctttcaaagcacaacgatggaagatgttattacagagataggtatgagtagagggggtgtttatcatcattatgcaagtacaaatgaaatgcttaaagacttaatgcttgatggtaatgattacagaaacagcttgataaatgagtatttggaaaataatcgaggcaaagataaatatcagcaaatgggtgatattttggttgataagtcactggctgatacagatttgatgagattatatacgctccttttacaggcaaaaaaatataatgaggattttgaaaagttgtatcaagaattgaaacttaatacgactaatgagctaagtttaatcgccaagcagcttggaattaaagcagatatatttggtgatggttttttagtgaattatatcaatggattgatattaagttcagaaattttaggtgcgagaaagtcttatagcgagcataaacgatatataaaagaaacaatgataaattatattgttgatgtagaaaagaaaaattaaaacaattaggaggtttcaaatgagcaaacgattagaggtaaaggatttaatcaatataggattattttccgtattaggattcatatttatgatgattggatcatttttagcaatggttccggttttaatgccggttgtcccatttgcacagggagttttggtaggacctgtaaatatgctatattctaccaagattaaaaaaagaggaatgatttttattcaatcattattgattgcattgatatatgttgctatgggacatggaccttgggcattattgactgctgttattgcggggattattgctgaaataattttgaaatcaggagaatatacgaatgtaaataaagcgagattagcattttctattgctccactttgcacattgggaaattggttaccaatttttatttcaagaaatgaatatattcagcagatgttagagcaaggatacaatcaagagttcattgataagatgcttagtgttatgccgaattggattattgttgtaatggcaatagtaggaattatcggtgcatatataggttgcagcattggaatggcatttctaaaaaaacacttcaaaaaagccggtatggaaaaataagatttcatggagagttaggatgataatcaaacttgattttcgtacaaaactttttatgacgatagttctttcatatgtgatggtattaggcaatattcaaacaaagtatttcgtgcaagccattttaatatccacaattccgataatacttttaattaacgcaaaatatataagagtagctattattggagtggctactcttttgtttgtttatgctgctgataaatttctgatagggcttaattacaatcctgtggttgcaattttattgataatagtgatggttattaaaaaaattctccccgcatttttgatggggagatataccatacttacatcaaatgttggagaaagcatttactcattaaaaaaaatgaaatgtcctgatgaaatagccattcccttgacggtaatggtacgtttcttttatgctgcaaggattgattatagtaatataaaaaaagctatgcgtttgagaggattgacgcttaaaaggttaataaagagtccaattttattatttgaatatagattagtgccattattgatgtgcttatcaaaggcagcagatgatttgacggtatcagctatgacgaaagggttggctgtaaatcaaaagagaacaagtattagtgaaacatatatgggacttgttgactttatgtttttcttaataatggcatggataatctatctatatataaggggaaaatatgcttgaattacaaaatttaacagtgggttttgacggtgaaagcatattgaaaaatataaatatgattttcaaacccggtgaagtaaccgtcattacaggacattcaggaacaggaaaaagtagcttgctaaaagttatcaatggaatcattccggaatacaataatgcagaattagaaggagatattgtatttaacggaaaatcattgtttggcttgacaatattggaacgatctaaatttatatctacagtgtttcaaaatcctaaaacacaattttattgtatcaattcaaccgatgaactggcttttcagttggaaaatagaaacatagacaaagatttgattttagataaaattcagtattattcagcggttttaggtacaaaggaattattagataggaatatctttgaactatctggaggcgaaaagcaattgattgcagtaacagcttgtgggatttctgaaaatgaaattatcttgttggatgaaccctcatcttccttagatcaggttgcaatagagcatttacagaatgccattatggaactgaaaaaaagaaagaaaattatcatcattgtggagcatagattgttttatctgaaagatatgcttgataaattgtgtgtgatagaaaatggaacttataaagaatacacaaaagagcagttttgtgatgatttctttgaacaggtttctgaaaaacacaatctaaggagttttaatgcgatttctaaaaacaattttttaagcaggaaatataagcaagtagaagtgttaaagaaaaattcttcagatcttgattgtaaagcattgtcttgtttgaatttcaaaaaaaaatatgaaagaaaggaaatctttgacttcagtattgcctttgaatccggtatcaatttcatcattggtcaaaatggtgttgggaaaagcacttttatcaatttgctgatggggctgacaagaggaacaggagaggtgttttataagggagaaaaactaaaaaaacgatatgaaaatatttttgcagtcatgcaagatgttaattatcaacttttcacagaatctgtatggcaagaacttggaacagttacgaaacaggatgatttgaaaaatgaagccttaagaaaggtacatttatttaataaaaaagaaatgcacccaagttcgttatcaggtggagaaaaacagagattgttacttgctatgtctatggtaagccaaaaaccaatcataatatttgatgaaccaacgagtggactttgcaaaatgcaaatggatattttgattgaatttttgaatcaaatggtatcacaagggaaaactattattataatcacacacgattatgaatttatagatagatgtaacggaaaagtatatgagtttgtgaaataaatataggtaaaggagaatgatacgatgaaagaagatatgaaaacacaactattaacaaaaagtcctaaagaactgttatttaagttggcaattcctggaataatcgggatgattgtcataggattgtatccatttatggatggtgtgtttgcgggatggattattggagactatgcaatgtctgctattagtatatccatgtccttaacaataataaatggtggagtatcagcacttattggagttggtagtgcatcaatattatcaagggcgattggaaagggagataaagaaacaactgacaagatatttggaaatttttgttattgggtaattttattctctatagttatcacaatattaggtttgatatttgcacctaattttttggatttagtaggagcaaaggggaatattaaagaacttggagtcagatatttaagagtagttttttttggctccatatttgttaattttgctcaagccggaaatatgacaatgcgtggtgaaggtgcattaaagcaatctatgattattatgggggtaggagcaatattaaacattattttagatcctattttcatgaagttgatgggagaatatgcgattgaaggggcagctattgcaactgtaatctctcaaattgtgcaagctatattaaccttccgctatttttcaaagaaaagtgcttttgtggggattcataaaatccaaaagagtaaggatatttccagtgaaatgtttagcataggaagttctgcaatgatgatgcaaattttatttgcagtacagcaaacatttttgtttaagcaagcctttgcgtatggaggagatgattggggaattttgatgtctgctacaatgcgattatatatgttttcctttattccactgtggggtatgagtcaaggtttacagcctgttattggggcaaatttcggagcaaagcaatataaaagagtaaaagatacaatgaaggtttttatgtacggagcaactattcttgcagctctttcatggataccatcgatgttttattcagaaaaattactatcactattcagtgtaagaagtgaaatcatagaagctggtgttatgaatttcaagatgttttattctacattcatcttatatggaattatgattatgacactcacatttttccaatccataggagatgggaaaaaagcaggtatgattgtaatgcttagacagttagttttatttattcctgcaatattactatttccaaaggcatttggagcgtcagcagtttggtggacagaacctatcgtagattttagtatgattatgttgggactgtttttaatgcttaatggacttaggaaaatgggaaaacaacaaattacaaaaagttaggtagctcaaaagacaaaagaaaaaatgagaaaggtttgatgtatgaacattatttaactataagggatgggtgattaagatgaaaaaatctttatatacaaaagaaataaataataaaaatttctatttgccttatagttgtctattctctcaaacaattaaatacatctaaagaaaaggtaaactcttttcaattcggaggactatttacgccaaagtgtagaagtcctcctttttttattctcaaaaagcaaaaacagagagcagaaaaaggaggatagcacaatgaataaaaaagaatatcacatctatgttagagggaaagctgtacctgtaagtgaagaagtctacaaagcctattggaagataacagagcatgaaaaatatcttcagagaaaagattggaagtatgacgtgattccattttcagcactggataacgatggacactttgtagacaatatcatagatgaaagaatagacttagaaaaaattgtagaggtcaaaatgcaaattgaagaattaaacaaggcattagctacactcacaaaaaagaaagagagcttatagaagccattttctacaaagaagaaagtctaagatcgattggcaaaaaagaaaaagtaagctatcaagcaatcggaaaaaggagggataagattttagaaaaactaagaaaacttttagaagataaattctaaaaaatgctgaaaggttaagtatcaaagaatggtgcttagcctttctttgtttggaacacaacaatattgaaatggaggaatgaaaaatgaaagagttagaaaatgtaatgagccagttggaaaaagaaactaagaaaaaagaacagacggaaaacaaaattaagcaactaagacaaaagaactcccgcaaattcatttaggcacaagcagttatcagatggagaaaaaaggcatagccaccgatagaggaaatatcaaccgagaaataaaacatcaaaacaaaatactaaaagaaattgcaagacgaataaaagccttaatgagatggataaggagtttaacgaaagataaaaataatgatatttcaaaagataaacaggacgatatggctatacaatccactaccctaccaaaacaaaatgatttaacagatatgctctctcatttcataaaagaaaactcagataaccacaatgcagacttagaaaaatatattgaaagctatcaattccttaaagaaaaaaatattacatcaataccagaattgaaagaatgtatatcagcattaagagataagaactacaagactacaagagctatcaaagataccgaaaagaaaaccaatgacaaagtagagcttatcgaccaagcagaaaaatatttgaaacataaagacacctacaaagcttataccaagataaagaaaagcaagcaagaagatttttataataagcatacggcagagcttattctatttgaaagtgcaaggaaacatctcaaagagcatttaggggaaagtaaaaccttaaatatatccaaatggaaatcggaacttaccactttgaagaaagataaaaagagcctatatagtcaaatattagaaatactagaagaagttaaacaggcagaaaaagttaagacctgtatagagcgattacaggaacaagagaagcgaccatcacaggtaaagaacaatgagttaggtctgtaaaaataaaagtgaaatatttataactttgctattgacattaaaattattatgtgatatatttataacatcgagttagaaatatatcacttgaaattatatgtaaggagaatttgaaatgaaaaacaaagtatctatacgagaagttgttgcaacaaaaattattattgcaattttaattgcagggtattattggttgtggagtagaagcgactatcagcctgaatatcgacaattttcaagctattggggttttcttttatttttgatactgatagtacattattttagagtaagaaaatataagaaagaatactttgatgaattggcagaaaaaaatctactcagatgtgatgcgatatgcttgaaagttttttgtcttttgatggtgattatagcatatttaggaggaattttaggccatgtaaacgcaatttcaacagcaattatgggatggcttattatcggaagcgtaattgcaattacaatacttcgtacgattatatttttaattatggattctaaaggggtataattatggcatttataacgaaagtgaaagaatatcgagaaaaggcaaaatataagcaatctgaacttgctgaaatggtaaatgccagaagagaaactattgtacatcttgaaaatgggaaatataatccatcattaaaattagccatggatattgcaaaagtatttaatgttagtgtagaagatttatttgaatttacagatgattgagatacacaatttaatttaagaaaatataatatgcaattctcagaacagtaaatcaaaaaagatttactgttttttttctttgtcaaaaatggaaaggagaacttatggaagaagaaaaaaaggaaaatacaagcaccacccaataaacagttaataatggatattggaaaaacaaaatatactgtaaacctacattttaagcaagatacaggcgaaacatacaaggataaaatactaaagctaatcaagagagaaacggagaagatataaatttatcaaagaaattttgtttatgtccttgacaaatcttcccaaagggattgctttaacaagaaagttaaaacattcacatagaactaacaaagataaaattaaatattaataagttttcaaaatcgtgaaaaaatggcaaaaaatcccttcacataaaaattattagtgctataatatcaaaaaaggagattgatgaaatgaaaataaaagaatttttacacaagaagaacgtacttatctcatacaaggtctaccttattgacgtacttggcaacatggcgatgggtctgttcgcatcgctacttatcggcactatacttaacacaatcggcactcacacaggattaaaatttctctctgaggagctttggccgctttgcaaaaacatgactggcccagccatcgccgcagcgataggagttgcgctaaaggcaccgaaccttgtcatgctctcatcgcttgcagtaggctacatcggtaacgaactcggtggacctgttggctgccttatcgcctcagtcgttgcaatcgagctcggtaaactcatctcgaaggagactatgattgacatcatcgcaacaccgcttacagtcatactatcgggcttcgcgatcgcaaaattcgtcggcccttccatcaatatgatgatggtgggactaggtgatatcattatcgaagcgactaagctaagaccattcttcatggggataatagtctccttaatcgttggaatggttttgacgctcccaatatcgtctgcggctctttgcatgatgcttggactaagtgacctcgctgcaggcgctgcgactgctggctgctgcgcgcaaatggtgggctttgcggtgatcagcttcaaggtgaacagcttcgacggccttcttgctcaaggacttggcactagtatgttgcaaataccaaacatagtgaagaattggaagatatggcttgcaccaagcttagcgtccatggtgactggacctatcgcaacttgtgtatttcaattaaaaaatactccgctaggagctggaatgggaacttcaggattagtcggaattttagaaacctttaatgcaatgcaaggggaagatatgaccatgacaatgattggcgctctattgacatatattattttaccagcagtgttgtcactactattccataatttatttaaaaaattgggatgggtgaagaacgaagacctattactttcgcgttaatttataattctattccgattagacatttttcaaagctatactataaaatgtgtagtcttttttgttataatgggtaaaaatcctgtgtaagatttaatattattaaagcaaaagaaaagaaagagaggtaattatatggcatgtacaacaatcctagtcggtaaaaatgcgagctacgacggctcaactatagtcgcaagaaatgaggactcaccatctggcatcttctgcgcaaagagatttgcagtgatgaaggcaaaggatcaacctcgcaaatacaaagcagtgatttcaaaggttgagatcgatttaccagatgaccctatggactacacttactctccaagctctgacacaagtgagggcatttggggtgcttatggtgtaaacgcagcaaacgttactatgaacgcgactgaaactcttacaacaaacgagcttgttatgggagctgacccattggtagagtatcacaaggacaaagacggtactgaacacttcggtggtatcggtgaagaagaccttgttactattacacttccatacatcaaaagtgctaaggacggtgtaagaagacttggagctcttcttgaaaagtacggtacttacgaaatgaacggtatcgctttccaagacgaaaacgaaatttggtggcttgaaactattggcggacacaactggatggcaaagagagtgcctgacaacgcttacgttatcatgccaaaccaactaggcatagacgagttcgactttgacgacgcttatggcgcagaagaaaactacatgtgctcaaaatcattgaaagacttagttaaaaaagcacatctagataagagaatgagtgaagaagaggtatttaacccaagagatgccttcggttcacacgacgactcagaccacacatacaacacaccaagagcttgggttctacttcgttacttcaatccaaagacatacttctgggatggaatggacgcagacctaagaccaacagatgacgatctaccatgggcaatggtacctgaaaagaagattaccatagaagaagttaaatgggcactttcaaaccattatcaaggtacaccatacgactgctacgcaaagcacaaagacgaaatgaaatcaggtatctttagacctataggtataaacagaaacaacgttttaggcttaacacaagttagaggctacatgccagacgacttgaaagcacttcactggctagcacttggctctaacgtattcaacgcgatagttccattctacacaaaggtttctaagactccagactatgttggcaaggcagttacaaagccatcgacagacaacttctactggatcaacagaatcataggtgcccttgcagacgcacactttgcagaaaacgcatccaatgttgaacgctaccaaatcaagatcaataataagatgaacgaactaatcaacaagttcgacgaagaatacgcaaacgcaaaggataaagaagccttcttcgaaaaagcaaaccaagaaatatccgacttcgtagaaaaagaaacattggattacttggataaggtattgtttacttcttcgtgcttgatgaagaatggtttctcgcgtagcgacgcataaaatttcttgttaaaatgagccctttcgctagtttcgaatttttactcactgcgacgtattattcatacgactcattcgtaaaaattctgtacaacgcgaaatcatctcatttttccggcgaaatttactcgtagtacaagagcgacaaaataaataaattcttatataaacaagaaaactgtgggactcatctctcacagttttttcatgccacaataatgacaatgtattgacaaagtccttataaagtgctagaattatcttaaggatggtgatattatgagtaacactaacttaaatgtaagacttgataaagacataaaaaaggcagctgaagatatatatgccgaacttggtttaaatatgtcgacagccataaatatgtttttaagagctagcattagaaagggcggcataccctttgacgtaagattagacgtgccaaataaagagacactagaggcaattgaagaaggcgaaaggatagcttatgacagttcggtgccttcttatgataatactgaagaccttagaagagctttagaagtatgaagtacaaaataaagtttacttcgaaattcaaaaaagatattaaactttttaaaggacaagaaagaaggcttgataaagtttttgaagtcatcgataagctagctaagggagaaagattagaagcaaaatataaagatcatcctttgttgggtgactatattggtacaagagagtgtcatatagaagctgatttactgctgatatatcaaaagaagaaagatgtattagtactgaacattttacgtttaggttcacattcaaaattatttgtataaaagattggtcggattgctccggccattttttttatgttcaaattacatatgtacgcatcaacatatatattttaatccatacaagcgttgaaatcttgacatcttatcggccttgctatataataagccgtgtaataaaggaggcttatatgtcaaagcgtgtcaaagttttaatcgcaatactatgcatcatcttagccctaatgtcgctactaagctttttcgttgcgtccatgagcgccttccacatatgtagacgcagctcctgccctatatgccgctttatggatatggtatcagacatgcaaaagtcactaaaccttagaagcaaggcagtgctactaatattattagtcttggtatatataaagagccttacaagtataacgagagtctcttcatcaaagacgcccgtcgagcttatggtaaggatgaacgattagaagatttataataagaaaataagagagtaaatagtagaatatacaaaatatacaaaatacaaaaaatataattaatatataaaggagaataaaatgagtaaaaaaataaatatctttttagcgtgcttactagctttagttttgctatcagcttgtaattcaaacaaggcacccgaaaagacagaggcacctcaagctgagtcaatcccagcaagtgaagcagacagtatacaaaaggacggcgctatcaaggtcgttacaaacatcttcccagcatatgattgggtaaagaacatcgcagaaggtactgacgtagaggtagtaaaccttactgacaagggtgtgagccttcacaactacgaaccatcagcttctgacatcgaagagattgctaattcaaaccttttcttatatgttggcggcgaatctgatgagtgggctccagatgcagctaaacaagcaaaaaatgcaaaagttcttaacatgcttgaaatcttaggagacagtgttaaggaagaggaagttaaagaaggtatggaacacgaccacgaccatgaacatgaagatgctgatcacgatcacgaccacgaccatgaccacgatcatgaacatgaagatgctgatcacgaccacgaccacgaccatgaccacgatcatgaacatgaagaagtagaatatgatgaacacgtatggctatcattaaagaatgcaaagactatatctagagcgatagctgatgcactagctgaaattgatccaaagaacgcagacaagtttgataaaaactacgaagtatacgcagcaaagcttgatgcacttgaagcagattttgaagaagcaagaaagactgcaaaggttgacactatcttagttgcggatcgcttcccgttccgctacttagtaaatgaccttgaccttgactactacgctgccttcgttggctgctcagcagaatcagaagcaagctttgaaactatcagcttcttagcacaaaaacttgacgagcttggcttaaagcacatcatcaagctaatgggctcagacggcaagatagctgacactgtaaagaactcttcaaaggctaaagatcaagacatacttgagatgacatctatggaaaatgtaggctcaaaggacggcaagagctaccttgaatacatgcaaatgaacttagatgctttgaagaaggcactaaattaatgaaattaacacttaagaacttaggatttggctacaatggtcaagtcctaagtgactttataaacctagaagtagatgacaaggactacatcgtcatcatgggcgacaacggttcaggtaagtccacacttgtgaagaccatcttgggtttaaacaagaagatctcaggagatataatactggaaggcatcacaaaggacgagattgcctacctaccgcagcttatctccatagcagaggactttccaactacaatcttcgagctagtcttatcaggctttaagattaagaagaggttcttctacactaaagaagaaaagaagagagcccttgactctttagagaagttcggcatcttagatttaaaagacaggcgcttttcatcactatcaggtggacaaaggcagagagttttgcttgcaagaagcttcgtagaagacaagaagctccttatactagatgagccgcttgcaggtctagatccagatgcgcaagagagcttgtacacaatgcttaatgagcttaacaagagcgcagccatcatcatggtgtcgcacgacataggcagagcaagaggctttgccaagaaggtcatcaagcttgaaaaccatcatataaaagtggagaaaggagatgctacacatggacttagtgaataaattcatcttctacctaggctaccccttcgtgcgctacgcactagtatgcgcctcactcatagcacttgcatcagccttcttaggcgtgatactcgttttgaagcgctactcttacatcgcaaactcactttcaaacgtagccttcgcatccctatcgatagcgacagccatcggcttcacacaaaagcttgctttagcactaccactaaccatattcttcgcactaatactacttcaaggcaacaattccaagaaaattatctctgacgcagccatcgccatggtctcagtatcggcactggcaacaggctaccttgttatgaacgtctttagagtcggccccaacgtctcagtcgacgtgtgcacaacactttttggctcaacatccatactaacacttacaaagtttgacgtcatcacatccatcgccttgtcaatactcgtgatacttttcttcatctactactacaaagaaatctacatcacagtcttcgacgaggaccttgcgagtgcgtcaggcatcaaagttgaaaggctaaacacagtcttgtctatggtagtcgcagttgtgatcacacttgcaatcagacttgtgggttcgcttttagtcgcagcactcatagtctttccagcagtttcggcgatgaaagtctttcactcatttagaaagatcgccatcggatcggcagttatatcgctcatctcggcactaggcggcgcagtctttgcgatacttgcctcgacaccagtcggctcgaccatagtcgtgatgaatctcgtaatatttttaatcatgtcagtaattggaggtatgaaacgtggataaaacaagaaagagaattttgaccatagtcggaatcttgattttagtcttgatgctgttctcctttacgagcaaaaaagtaatttatcgctacatgccaaacagcgttgctaaccaaaccatcaagaagatgaaagaggcttccaaagggatgacgactgatgagaagaaagtagagctggatgagaatgagatggctaaggaagaagcagtggataatgatgagagcaaagcaaaggacgaagatgcttctagcgaagagggcgaagaaagagggtacgattacgacctaacaggcaacgacgcagacatgaactacgtcatagtcgcaatgatcgctgaagatccaaagagcttcgaaggcatcaagatcaaacttagaggacttgccatagaccttgagacaacagacacatccggcatggatcactacgtcgttatcaacgatagacaggcgtgctgccaacaaggtctgcaatatatattgaaagacaaaaatcaaaaataccctaaagagcaagagatgattacagtggaaggggaactaacagtgtttaatagcgaagagattccgtttccattggctgtgattaaaaacgctcgccttatttcacgctaaaacaagccctttgactagtttcgaattcttttgtcgctgcgacgtatcttcatacgactcgctccaaaaaattctgcacaacgtcaaatcatcttgttttctctgcgaactaagtgtattgatgaatataaaaaatctttgtaaatataaagtttaatataataataaataatggcgagatcactctcgccatttttaattaacttaagcaaatttttaattagtagcaataaagtacttgacaaaatagttagcaaatgataacatatataaaaagaacgagtgtcggtcaattggtggtgaaaaattgtcaaatagaattacaaagaatcctgatgaaagaagaaaagagcttataactattgcttctaagctttttgaaaagtatgggtatgagaaagtttctgttagagatattctcgcagaagttaatggagcgccaggaatgttttattactattttaaatcgaaagaagatattttcttggcttgtatggaaacgtattttgaagaaaaactaaaaaataagttggatatacttcaaaataaggaaatggattacgaagaaagaataaaaattttaagagaactcatagtaaaagatatcagtcaatttacaacaagatataatttttcaaaagagaattcaattactgataactcttacaggctatgggaattgattcattacattggaaaatttatagatgtctattcagagtttataattgaaggaattgaaaataaaaaaatagaaaataatatgggaataaatagagaaaatgtgagaagttttgcagcttttattttatacggagctgttggaacaatatataacgactatattattaatggagaaaacaaaacaaattcaagtgaagcctttggaataataagcgaactatttcaaagatctcattagagaaaaataaaatataagtattatacaagggaaacatcaatggtgttttccttgtattagttttaaggcaaatgaacgaactcgttcggtaaggaggcaagttttagatgaaaaagaagaaatcaatcaaagatattatttcctacagtgaaataaaaaaaggacaacttgtaggaggaatattatttgttagtcttgggatgctattaagtatttgtccaattttggtgatatacaaagtcataaaatctctatttttatatgggaaattagaacaaagtacaatgcagttttgtatctatggacttgcagcagtggtattggcatattgcttgacttacataggtagtattttatgtcataagttttcatatgttttaatagctaacttaaaaaagaagatattatttcatattgggaatcttcctttaggattttttaccggagacaacaagtcaaaaataaggcaagtattgggatcggatatgaatcaaattgagggatatttttctcatcaattaccaaatttaatttcaactttagtactaattttagcaatgataattgttatgttgaagataaatttaatattaggtcttacgactttgttaattatatttgttggtttaggaattcagattgcaatcatggcaaagattataaagtcgggtggacttgagaagaactttgcgattttagatcaaattaattcagcaactactgaatacgttaaaggtatgccggaagtgaaaatatttggaacgggaataaaatcatttaaaactttttcaaagtcagtaggagaatatagagactttacaagttcgatgacatcaatgataagaccgggatttgtttcatttagaatgtttattttatctgttgctacattcatagttccagtaggaatacttttaatgtcacgaaataataacttggatttcactacagtctttattttctatttgattcttgcacctgccattagcgtacctgcattaaaacttagagattttgcagaaggaatgaatttactaaatgaagttgttttgagaatctacgaaattatagatcaaaaagaattgacaattgaaaatagcaaggaagagataaaaggtcatgatcttgaatttaataatgtaagcttttcttatggaaatgaagaggttttaaagaatataagcttctgtgctaaacaaggagaagttacagcattggttggctattcgggagcaggcaaatctaccattggaacgctaatacccagattttacgatccttcagaaggctctattaaaattggtggagttaatataaaaaatattccgatgaacgccttaatggagaggatagcattcgtttttcaagacagtgatcttatcacagatacagtcttcaataatgttgctatggcaaagacaggttctacaaaagaggatgtcataaaagcatgtaaaaaagcaagatgtcatgatttcattgaaaaacttcctgatgggtatgatactgttttgggtaaaggaacttatttatctggcggagagaaacaacgtattgcagtagcaagagcaattttaaaggatgcacctatattagtattagacgaggcaacaagttttgctgattctgaaaatgaatatcttatgcaggaagctttgtctgaattggttaaagataagacagtcatcatgattgctcacaggttaaataccatagaatatgcaaatcaaattttagtaatatctgatggaaaaattgcagaaagaggtaagcatgaagatttaatccttgcagatggaatatataagcgactctttgatatttataagaagacaaatatttggcaaatggatatagaagggagtgagaatgaatgataagaaatattacattaggaaagatgaataatataagaaaatcaattattttaaatgttttggcatctatttccaaccttataccatttattgctttggcgaaagttgtagaaacactatttttaaatagaggagcagataatatagatacgagacttttatggaagtattttgggataatggcagtatttttcttaataacattcttattggaaaatttagccacaaaatatacctatgaacttggatacaagacaagtgcagatggaagaatagagcttgcagaccacataagaaaactgccaataggttatatttcagggaaaagttcagcagagatcttagatacattaatgaatgattttttcaaagttgaaacggcagtaactcatcaattacctcaatttttcagtggtatatgtgtagcggttctttgctcaatattatttttgatgattaatgtaaaaatgggaatagcaactcttataggactacctatttctgttctacttctcacgctcatgcaaaactttcagaaacaaatttatttaaaaacaaagaaaatgaggataaaagaggaagaagatataaacgaatatttggatgctattaagactctaaaagcttataacagcttagatgatacattaacaaagcttgaagaagatatagataactcaagaaatgcaaatattaagagtgagaaaggagttggttcattaactactatagcaagtatgattttaagaataggacttcctttgatgagtttagcgggttcctatttgtttataaatggatctttggaaattgatacatttttaatgttcttatttgtaggcacaaggatttttgatccattagagcttgcacttgtaaattatacaggtttacaaatggcatcagtttcaggagagagaatcattaacttacttaacgctaaacctatgtcaggaaattccgatgtaaacgaaagcaacaaaattgaaatctgtgatgtttcattttcttataaggaatctaaggttatcgataatgtttcattagacattaatgaaaatgaattaaccgcctttgttggttactctggctctggaaaatctacactaattaaattaatttccagattttatgatcctaatgaagggacaattaaaattggtggagtagatttgctaacagccgaccctgataaattaatggataaattttctgttgtttttcaagatgtatatctttttaaagacacaatttataacaatataaaatttggaaatgaagatgcaagtaaagatgaaatcatgaatgctgcaaaaatggcaggagcttatgactttatagtcaaaaaagatgatggatttggcactatgattggacaaggaggagcgactctgtctggaggcgagaaacaaagaatatcaatagcgagagcaatattaaaaaatgcaccaataatactacttgatgaagcaacatcttcacttgatcctgaaaatgaacttattatacaagaagccatatcaaatttaattaaaaataaaacagttgtggttgtagctcataaactaaggagcgtaatgggagctgataaaattgttgttttaaacaaaggaaatgtagaggaagttgggaagcatgaagaacttattaaaaatgaaggactatataaagacttatggaattatcaagaaaagtctaaagaatggaagattgtacagtaacaatcaattttaaaggaggaaacttatgaaaacacaaaagaaatcatcaaaaaacgcagttacagccggtgttttaattgcactttactttgtaacatatgcagtaattggggcaatatctatgccagtccctgttttatttttactaatgcctatgcttgtagcactacttgctgcaccaacctatcatatgattcttgcaaaaacaaagtcagctactgctattgtaatcgcagctatcttaccaagtattttattagttgcaactgggcatattccaattgcaccattagtggcagtgcctgccggaataattgccatgttcatagcaaaaggtgggaattatacagactttaagaaaaatacaattagtcatatgtttttttctctaaacttatttggaggattcttaccaatttgggttatgagagaagcattttttgaaagtgtaataaaaggtggcttagatcaaagcttttgtaacacagtaagggcatggacaccaatatggatgttaccagttatgattataggaacatttatattctctttgattggttcttattttacaaagaaaatactaaataaaaagttggaatccgcaggagttttataatggaaaattcaaagtttgttctggggtcaaaatatgacctcagaacaaaacttatcttgcttataggtgcaaatattttaatttttttagggtttgattggatctatcaaagccttattacattatttttccttgtcattattattagcgatggttataaaaaatccgctataaggtatattttattttttgtaataagtgtagtattggaaaaatctttagcctattttagtatgaattttcttttgaatttaattttatttatcttggcaattggaagaaaatttctgccatgtattatcgtgggtaaatggattttaaattcaacatctgtttccagtgcagtggcaactttacaaaaattaaaactttcaaaagactcgctcataatgatttctgtaatatttagatgtttgcctactattaaagacgaatggagtcatataaatatggcgatgaaaactcgaggaattaattttaacttaatcaatttaacaagaagaccaacattaattatggaatatttttttgtgccattgttcgtaagtgtgatagaacttggggatgagctctctcaatcagccattataaggggactcgatgctcctgttaacaaaacaagtagacacctaattaagtttagaaaaaatgatattggtgttctaattcttatgattttaattttatcaatagtaatatttatgaaagtatcagggtgggacttatgatcgaaattagagaattaagttttaagtataagggaggatctgattactcattaaaagatataaatttgaaaatcaaaaaaggggaatgcattcttctgtgtggtaggagtggttgcggaaagtcgactctattaaagcttatgaacggcataatacctgagttttatgatggggacatttccggcagtgttatggtcaatggtatgaatacatttactacaccaatttataaattatctaagaatgtaggctcggtttttcaaaatcctaaaacacagttttatacaatcaatacaaccgatgaaattgcttttggtttagaaaattacggaatagaaagagaagtaattaacaaaaggattgaagaagttgaaaaagagcttcatcttgaaaagttgatgaataaaaatatattcaatctttctggaggagaaaagcagaagattgctatagcaagcatttatgcattaaaccctgagatatttattcttgatgaaccgtcttcaagcttagacataaagtcaatgaaagaactatctcttacaataaaaaagcttaaatctttaggaaaaactattattattgcagaacacaggttgtggtatttaaaagacattgttgatagagcaatatacttagaggatggaaaaatcatcagagaatatagtatggacgaaattgaaaatctaagtgaagatgaacgaatgagaactggacttaggcattctgattataaagctattgaaagatttgatgattttgaaacttcaaataaagggactttattagagttaaaaaatctaatattcaaaagaaataccaaaataattttgtccattgaggatcttaaattttgctatgggaatattattggaattgttggagaaaatggaattgggaagtctacgttagcaaaaattatatgtggcttatacaaagaaaataaaggtaaaattttaaaagatgatgataatttaaatataaaaagtaggctaaatgagagcctgcttattatgcaggaagtgaactgccagttatttacagacagtgttaaagatgaaatagtattaacatcaaatactaaagataataatgctttagatacttggttaaaagatatggagttaaaaaatatcagtgataggaatcctcacaccttgtcaggaggacaaaaacagagagtgattatcttatcagctttactatcagacaagaaaattctatttttcgatgaaccaaccagtggattggactatagaaatatgaaaatagtagctaaaaacataaagaaagtaaaggaagaagataagttgattttaataatatcccatgacgttgagtttttagagtcagtttgtgacagaattttaaattttaaaagcatataaaaattggcgagatcactctcgccattttcatgtcattattcacttgtttctatatatttttttattgtcttctttgctatcaagagattaattacgaatttaagccctatcaatggatgcttcatcatgatctttctgccggcgtacttcattatcggctctatctgttccagatcgcttgccttgtagcaagtagtcggacactggtggcagaaggttttgtagaaggagtgcggacagcgctctatgtgcctaaaggccttcataacaagctcgtagtactcatcgttaattttgtacttccacatacgcggcctagatgagataaactcgtctatctcgccatcgaagcagtatttattgatgggctttttgctgcgtgcaactttgtcctcgcagtagatggccgtcatcaatagaaagaccttcttttcgaatagcttttttgcagcttcctcatccttgccgatggggattttattttttaatataggaaatgtttttgttttcatttttcacttctttatatattatttttataaacttcagccgttcattttgcgatgaaaatcgatagataaggcgaagcataacgagtgaccgaccgacatcgtactaatgggtacgttgagggaggaagcgagcgcgctagccttaggtgcgattttggcgcaaaataatcacattatcacaaatgcgtagagtactatccctatgacttaccataagcacggtcttgcccttcatatacttcttaatcgagtttaagattatgctctcgttaagtgcatccaaattacttgttggctcgtcaaaaagatatatctctgcgtctttcaaaaagcatcttgcaaggcccagtctttgctgctcgccacctgagaagttctcgcccagctccttgatatatgtgtccaagccgtccttaagtgagctcacgtagtcaagtatagatgccttgcgtagcgcctctttgagctcttcatctgtagcatcgggttttgctatcaagagattgtccctaatgctgccttcgaagaactcgctcgtttgcgtcatatagctaagcttttcgtataatgatgcagtgtttatatccaagatgttcttgccagcgattttgatctcgccaccctcgaggttccaaaagtgcatgatgagcttaagcatagtcgacttaccgcagccgctcggaccttgaatgccgatgaactcgtgatttttaactctaagcgaaaaattatccaaaatcttctcactcttgtatgcaaagctaatgccattaacttcgattatatcagcttcgtaagaagcaattgcgttcttgcttaagtatcctttattagtaatctcttcaaccataggcttctcttcaagtatagacatgaccctatcagctgaggcaagagtttgagctaggccgttaccaagtagtgagacggctcttacggcaccgaagctaaagtatgttaagctagaggctaataagatgtcagagctggcattaccagactttgcaagcactacaaagacagccgccgttacaaaaacttccagcatatcttcaagcgcaagcagcaccgcaagctgtctaataagcctgtcctggttcgtcttaagttttgcgtttagcgcgtttacttttttaaccgccctcttttgataagcaaagctaatgatctcagcaatacctcttagtagatctaagaagctgttactgatgcttgcaaggctgcgtctcgtttcagctgccgcatctcctgcaagagatgagaataccattggcaagaccacggcgatggctatgtgacccacaagcattacaattgctgctagaggagatatttgtcctaaggcgagtgcatatacaaggctggtgatgatcgctatacaaaccggggatatggtgtgcgcgtagaatacctctaaaagctccatatcagatgagatggcgctgataaggtcacctttgttcatcatctcaatcttggctggtgcgagtctacgaatcgctgcgaagaccctgtttcttaatagagccaagactctgaaggcgatgaggtgattcatgtactgctcaagatatctaaataagccccttaagatgacagctccagccattatcttcatgataaatgcagcctttgagccgccttcaacgtactctattataagccttgcacctagaacgccgatggctgtgtagaagaggaaggagatgcatcctgctaaaacagccactgccatgtatttacttagaggtttaacaacttttactagcttcgaaattacttttaatccatctctcttactttgcatcgttaagacctccttccaagctctcttgcgcatcataaatgcgcttgtactcgccacactgcttcataagagtctcgtgcgtaccttcttctacgagattagcctttgccatgacatagatcttgtcagcgtccttaatcgatgaaaggcggtgacttactatgatgacaagtttttccttcgcaatctctttaatattgttcaaaattatttcttcactttctatatcaatgttgctagttgcctcgtcaaagataaagatcttagggtcatagaccatggctctagcaagagcaagcctttgcctttggccgccgctaaggtttagtccgccgcttgataaaggcatttcaaggccgcccttgtccataatctcatcatatagattaaccttcttcagagctgtgtatatggcactgtcactaacatcatcccttgccatgacgatgttttcccttaaagcaccttcaaagatgtgcgcgttgtgcgtgatcctgtttacgttcttggcgatggatgccgaagcaagctcagtatatggagcgcttccaataaatacatctccactcgtccctctcatcgcagctgagatgagctttgcaagagtcgacttaccagagccgctctcaccaacaagagcgatgtatccttgagtaggaaagtcgatcgtgatattattaagcgcataagagtccccgtcagggtacttgtaggaaagcttcttcacacttagcttaagatccttatcattaggaaactgagcttctctatcatcctcgtttagttctagaaaatcgataagcgtcttgccagcagcaacaccagtcattgcaacgtgaaagctcgacgtcaaagtgatcatcggcctaaacgcatccatcgacataatcagtatcataatcaaaaagtttagagcaagtccagtcttagtatacacataaagacttgtgaatatacacgcaatcgatgagccgtatgcgatccactcgataagagtgatagagtttagctgcatagcaagtatgcgcatagtctcatttctgaagtcttcagccttctcgtcaagctcctcagccctccttatgtccgctctgaatatctttagagcagtgatgccttgtaagctgtctaagaatagctcgccgacatcttgatacttgcgccagtacttcttttgcatgcgtccaaccatagtcaagataaacttcaaaagtagtggtatgataggcattaaaactaagaagactagtccaacgcgccagtctatgtatgacaagatagcaaagttaacaagactcgcaccgaaagcgccgtagtactcaggcaagaaacgtccgtagtagttttgcagctgctcaatagtgtccgagcctagattgattagagtcgcagtcgagatttgctccttgtagctgggaccaatcgaggccgccttagtgatgagcctttctctaagcttacccttcacctcaccaatgatgttcgattggtagtcagtcaccttgtatagagcaaggaccctgatagcaataccaaggacaaagattattagaagtttttttatgtcaatggtacttttagagtaaagagcctcagctaaagagccgaaggcaaaagcaagtagagcagtccctacaacgcgtagcatcatcataaagacactgcttagtatgtattttttcgccttgcctatagatttgaataaatatttatcaagcatatattctctcctttgtatatagtcgttacataaacattagcatgaactaataagataagtataacataaagcaagcgctttttctataaatttatgaaatacagtgtgattgtagtagtgatttgttacaattgtgttaaatacccataaagacttgtatttctatggtgagggtgatatgatgaatagtaagaacatatgtaaatacatattatacgaaggaaaaacaaggaggaaaaatgaaaaagaaattattcgcaatgatactttgcttagaaattatcagttttcgtagaccagcaagcgaaggaaaacacttcttgcattaaaacttgaattggctgattgtgaatacaaagattagttcattaattattaaaaaactggctagaaattaaataaactatatacaagaaggcatcgtatgatgtcttcttttttatacattttgattgacttaataaaatttatgcgttataatgtgctcagatagaatataacaaggaagtaggttagaatcctacacagtgccgctacggtatttgcatttatgcataagtccgatacttgtactttagttttgttccggttcagggcaaggctagtttttttagcacagttaattctatactatatcttattaaaggagaaagattttatgaagaaacttattttcttagtagtcatattgtcgctagtgttcacatatggctgcaaatcaaatgaaaagccagctgaagttagtgacaatgctaatgctagcgaaaaaactgaagctaatgaaaaggctgacgttaatgaaattgttgttggtcaaacttgggttatctcaagtgacgatccacttgacggagccaatggttggagtataactaaccacggcattagcgagtacgtatacacactacaagctgatggtactcttaagtcgagattcgttaagtctatcgaagctaaggatgaaactcacttcacagctgaactaaacgaaggagttaagtttgctgacggcagcgaagttgatgcaaaggcattctctgaagctatgaacatgatcatggaaaacaacgagttcgctcgtgcttctgctggtaagattactttcactccagtagaagattacaaggtagacatcgttactgagcttcctactgttaatcttgaatccatctttgctgaatggactaatgttatgttcaagaaagatggtgataagtacatcttcactggcgcttacaagattaaagagcttaaaccaggcgctgaagttgtactagaaagaaacgaatactacgatggctttgaagctagacctgagactgtcactataaaggcgttcaaggacggcaacgctcttaagcttgcttacgaaagtggcgaagtagaccttgcttttggtcttactaatgatgtagctgtaggcttaaaagacaagggctttaaggcgcttgactacaacgcaggctaccaatactactgcttcttaaatcttaagagagatcacttaaatgaccttcacttcagaaaggctcttgaccttcttgttaatagacaagagattattgacgcacttggcggtggagacatgcctactggactattcgcaaagaactttagcttcaatggcgatcaaaaattaacttatgacatagaaaatgctaaggaagaattcaaggctgctggctacacttatgaaggcgacaagcttatggacaagagcggcaagcctgttaagcttactatattaacatactctgcgaaaccagacctaccagttataggtcaagtgcttgtatctgacttagagcaagtaggtatcgaagcaagcgtgtcactagctgacagcatcgacgaagaagctgctaagggcaatcacgatatattattatacgctcaaaacccaacagcaagtggcaacccacactacttctttgctcaacacttcaagactgacgctgttaagaaccacagctactactcaaatgctgaagttgataagattatagacgagcttggcgttacagctgaccttgctaagagagacgagctttcaaaagaaattcaagcaaagatctacgaagaccttccaatactatacacagttgacccacactggttcgtaatgctttctgacaatatcaagaattatgaaatctggaacggcgactactttgtaacaaatccaacactaacagttagatagatgaaagtcataaactttttttgcaaatggtttttgatcttcttcgtaggctcacttattgcctttggcatagttaggcttatgagcggagacccggtgatgatggctcttagcgaaagaaacctacctgccactgaggagaacgtaaactatttaaaaaaagaatttggtcttgacaaaccgcttatatcacagtatttagactggataggagattttataaagggtgattggggcaaaagctacatgacaggcgtcaatcttaagcctgaaatactaagaagagctccagtctcacttttgcttggcttacttgggctagtatacgcaagtatattagccttttggctaggctaccttgccagtttgaagcgtggattttttgataaactaacaagggcactagcattattcacgcagacagtgcctgtttttatactcatcatactcttcgtctactttttcggagtgaagtacaggtttatcaaatttttcaagtcaggctccatagcaagtctagcagtcggagttttcttcgtcggccttccacttatagggccgatgtcaagaacagtcaggatctacttcttggaagtgatgaaaaagccattcttcagcttctaccttgagagaggctacaaaagagaaagagcgcttttaaagtattgctaccacgagcccttacaaggcttaacaggtctactaataagtcaaagcgcctacgtcataggtgccagctcagttgttgagttcgctctatctatacagggactctcggcacttttaatcgagtccatagcgcacagagattacctaatcatacaaacatacataatgatgatcatcatatggatgttctttgtgcatttaatattcacagtgttttcaaaagtctttattagaagggggagtgcgtaatgaaaaaagctatagtttccgtagtcatcattttactcgtggcgatagttttgtcaataatacctacgcaaaacccgaagttcgtcgacatcaagaacaagtttcttccgccatcggctgagcacatcatgggcacagaccaccttggccgcgacatcttctcgctcatggcacaaggctttttaagaacactctatgtagttgtgatagcaagcgccgtctcgtatatcttaggcatgtttctaggcatagtcgcaggcttttatggcggctttgcactaaacattatcaggttcttaaccgacctaacgcttatcatacctaccttcatagtcgccttgatcgcgtccatagtcttcacagactcagtacttgcggttggacttgcacttggcttttcaaacctaggcttctttgctaatcaaagctacaaactaagcgagattatactaaaggacccttacgttgatacactaagaatgctgcaagcgccaaactcctacattatgagaaagttcctactaccacagcttcttgcaccgagcctaaaccttatgggtaacaaggcatcaaatcacatcttggcatatgcttcacttacatttataggcctaggagcagacatcaccgcgccagactttggaaccatgctctaccaatacagaggctacatcatagataagccgctcatagtactgtggccggcactaggcatattcttcctaagccttatctttcactacacatttgacgaggtgaacatatgatagagctaaagaattattcagtaagcatagctgataagaagatcatcaaggatataaactttaaacttgcgcccggcgaagccataggcatcataggtgcttcgggtgcgggtaagagcgtatcgtttagatcggcacttggcttaataaaaaacgcgcacatagacggcgagatatattataaaggagaaaaagtcacaacacttaaagataaactaaaagggcccataggctacataacacaggatgtacaaaactcactaaacccctacatcaaagttctagatcagatgacctctgacctagtcttcgccaagggtatgaagagaagcgcagcgagacagaaggcgctttcgtctttggagatgataggcatcaaaagagagaacgcgaagaagtacccagatgagttctcaggtggtatgcagcaaagagtagttatatcgatgatactcaatagagacccagagctcttgatagcagacgagatatcgagcgcacttgatagagagtccacagacatggccatagacataatcaaaaggcacatgcaaaagagcaagatgagccttatctatatcacgcacaacccctacgacgcgatcgaactaacagataggatctgtgtttttaaagcggggcaaatcaccgaagacaagacatcagctgatatatttacaagtacagatgagaatacaaagtcattattagaggcggcaaggattatatatggaaaagatactagagattaaaaatttaaaaaagagctttaagatgtcagacgcgccgaccatatcagatttaaacctagacctttatgagaatgagtttttaggcatcattggcccctcaggtagtggcaaaacaaccctacttaggctcatagctgggctcatagtcctagacaaaggagagatactctacaaaggacgcgacctacccatagttggagataaaagaagaaacttagaagactttccggtgcagctgatatttcaaaatgcagtctcgtccttcgacagcaagaaaacgattatggacagctttaaagaggcacttcacttttcaaagaaggacttaaaccttgatgagcttaaagagcttatggacgagttcgaactagatgagtcagcactggataagaggccctacgagctctcaggcggtatgattagccgcgcgcaaataattagagcgcttctaacacagcccaaagttctcttagcagacgagattacatcgccactcgatgtcaaccttaagctcaagactacagagctacttgacagctacaggaaaaaacacggcatgagcataatacttgttagtcatgatgtgcagttattggagcatgcgtgtgaccgggttgttagcataaatgatataatggttagggctaattaattcttaaaaaaatttcgcctaaggcttgttccttcattgccaatgctcgacttatttcgcattaagttgagcccttttgctagtttcgaatttttttgtcgctgctgagtgcgcatttgcacacctcactccaaaaaattctgtacaacgcaaaatcatctcaacttctctgcgaactaagagttttagagactttgtacagcattatcaaaaattcacttcgccttatccataaattttttttgaagaatggctttaggtttaaactttagtttaaacgctaaaaccttagttgacacgtggtaaaaatttgattttataaaatttaataaatattttggtggatacaattaactttgtatccatttttattgctagatatgtttttacatcaaaatatttatttacgacagagaatcatcgccaaacttatgatttgcagagcgaacggatggataaggcgaagcataacgagcgaccgactgaggtgtacgtacgggtactccgcaaggaggaagcgagcgcgcgagccttaggcgccgttcgaatgcgaatcatttgaatgcaaatctttgacaagcaaaaaaattagtagtataataaacctactatatggcgtaaacgaggtgatactatgagaaaactttctctaattaaaaaatacatacagccatacatatttatttatttactagcatttttattcgaaatcatgtcgagtgcactgcaaatgctcatacctataatcttaggtacgactatcgacagcatcataggcagcgaggagccgactaacaagatcatgatttcattcataaatcttttaggcggcagagacttagttagggagcgccttggccttatcgcagtggctttcattactatcagttttactatagcgttacttaacttcttaaggccatacatgagtggcagagcgacttacagcatcagcaagggcattcgtgacaatatttatgcgaagatttcttctctaagcattaaggacatggcatcgatcacaacaggtgacatgcttcaaagggcgtcaagcgacatcactcagtttgaaagcattgtctccactaccatgatggcgcttatgggcaatatctcatacattattatttctttaatcacgctatttacaataaacttgaagctttcactagcgtctattgcacttctaccgatacttttcgtaggaacttttatttttgataggaaggttgtcaagaccttcgacgagttcgaaaagtcggaggcgagacttactagcatagtgcaagagaacctatcgtcttacaaggtcgtaagagctttctttaagcaaaagcacgagattgaaaagttcgaagaggcgaacatggaccttgcgatgaaggactacaagatcatggagtacttcgcgttcttctggtcgatagccgagtttatttgcttcttacagatagctttgacagccatcttcggtgtgcttatgcaccgcagtggagctgtatctttaggtgagtttacagcggtctttgccgttgcctttaacatggtttgggtcgttttaggcacaggtagaatgctttcgaggttcactagggtaactgttgccataagacgcttcgacgaagttttagagatggactctgaagaccttgacaagggcatcaaggacatggatatcaagggcggcctagtctttgataaggtaaactttgcctatgaccagacgcatggtgcacttaaggatttatcctttagtatagatgcaggcaaaacgcttggcgtactgggacttactggctctggcaaatcaactttagtttctcttatacctaggcttatggactacgagggatcgatcaaggttgatggcgtcgagctcaatactatagccaagcgcaagataagggagaacacgtcaatcattcttcaagagccctacctatttaacaagagtataaaagaaaatattgcatatagatggcctgaagcgagcgatgaagagatcatcaaggcggctaagattgctgacattcacgatgacatcatgaactttcctgatggctatgatacaattgtcggagagaagggtgtgagtctatcgggcggacaaaagcaaaggcttgcgattgcgaggactatactagttcacacgcctataattatcttcgacgatgcgctatcggctgttgatacgcaaaccgacatcaacataaggactgcgcttagccaaaacgaaaaagctcagacaaagatcatcatctcgcacagaatttcaactcttatgaacgctgacaagatcatcgttatgaagaggggaaagaaggttcaagagggtacacatgaggagctaatccacgaagacggcctttacaaaactatctatgatatacaaaacatcgaggtggactagatgaggattacattatttaatttagttaaaaaatttaagaaagaagctgcaaccgttgcgactcttaacatgatatatgcggtgctacttgcgttttggccgctattaacaaagtttatcatcgataattacatctacaaaaacgacgtagagggctttccgaaattcgtcatcttgatgctagcctttgtcgtgatgatatcattaacagagcttacttactgctttgcagcgggcaaattcgaaaaaaaggtcatactttacttaagaagcgaaacctttcttaagacgcaaaagctatctgccaagtacatggacacgcaccaagttggctggctagtttcaaggcttgtccacgacactatgtcaatcaaggaatcagttgcgtggaacctcttcgatatggcggacagcgcttcgagactaatcatcatatttatcacaatgtatttacttaacgcgaagttatcgctatatgtattagcaagcatgccgttcatagccgcctttacttacatcttccaaggcaagatgatgaaggcgcaaaaggacatcaaggaagcctcatcagaccttacaagcaagttaaatgaagacatacaaggacaaaagaccataaagacactgcttagagagaaggaaaaccttgaagagttcaaggcaatatctgcaaggtacaaaagacgcggcaagcactcaataacaatgcaaagtttgtatataccgtcgcttgccttcctaggttccatcgccacagcttttatacttaaagatggtggagcggcagccatagtcggtaccttgacagtaggtacgctctttgccatggttcagtactcgacagagatctacgagcctattaggcagcttgcctcagtactaactgagcttatatcgatgcaagcctctatggagagagtaaacagcatacttgaagcagacgtagaagtctacgacacgaaagagatagaagaggtctacggcgatgcacttgaggcacctaaaaagtcgcttccacagatgaagggcgagatcgagtttaagaacgtctcctttgcatacaaggacgaggactatatactcaaagacttttcacttaagataaaagatggcgaaaggcttgcactagtcggcgagacaggcggaggtaagtctaccatcattaacatagcgtcacgcttttacgagccaacaaagggcaaggtctttatcgatggcattgattacacacagatgccgcttaagtgggtgcaaatgaacctaggctacgttttgcaaacgccatacctttttagaggcagcatacgagacaacattctatatggtagagatggtgcgacagaagaggatatgcttagagccgctgaagtggtcggcttagatgagatagttaagtcattcaaagatggctacgacacagacgtcggtgaaggcggaggaaagctttcacaaggcgagaagcagctagtgagcttcgcaagagccttgatcaaggatccggctatactgatactagacgaagcgacatcctcagtcgatacttaccaagaaaagaggatacaagacgcaatcgagaaacttcttgaaggaagaacctcaatcaccgttgctcatagattatccacaatagttactagcgacagaattttgtatatacatcaaggacgcatagcagagatgggtacgcatagggaattgattgctaaaaagggactttactataatttgtataggaatcaatatattgaaagtcaattagaaaatatataactctttctataaaaattgcgccttctgctagtttcgaattattttgtcgctgcggagtgctcttgcacacctcactccaaaaaattctgtacaacgcagaatgcatcaatttttcctacgaaagagaagcgaaataaatgaaataaggcgactcttctataaagacaatcacatttgctccaaaaaatttatttgcgatggattgtataagagaaaaaactttttcctacgaaagagcagcaaaataaaataaaacttcttgtaaagatgcagttacttaaacagtagctgcatttttttgcaaaaaagtccatttgtgataaaagttagttgacgctaacaatagcttgtgataatatatacttgaaaatataattaaaagtatatttatcgataaagcagtgaggtgtttatatgataaaaatttcaagtttgcataagtactacggcacaaaagataatagggtggaggtacttaaagggattgatcttgaacttgaagacggcaagattatctgtgtcttaggtccatctggctctggtaagtcaactttattaaatattttaggcgggattgaaactattgacgaaggtgatgtcagtgtatttgataaggatcttaaatctatgtcaaagaaggcgcttgaaaattacaggcgcgattaccttggttttgtttttcaattctataatctaatcagcgacctcaatcttcttgagaatgttcaagtgggcgagtatctatcgaaggagccgcttgatatagatgagcttctaaaggacttaggacttgatgagcacaagtacaagtacccaaacgaaatttctggtggtcaagcacaaagggcatccatcgcaagagctatgattaagagtccaaaacttcttatctgcgacgaaccaactggcgcacttgattatgagagcgcaaaagatgttttgtgtttaatcgaaaaacttaatcaaaaatacggcgcaacaatcatcatcgcgagccacaacacacaaattgccaagatgagcgacgtaattttgtccttgcataacggcagcatcaagagcgtagaagtaaatacagagaaaatctctgcaaaggaagtgacttggtagatgagaagtcctattaataaacgtgtttacaggcagtttaaatacaagcctttaaaagtcatacccatcttgctagcacttacttttatagttgtcttcgcatcgtcattcttcatctcgcaagagtcagttgaaaagctttataataagcaaataattaatggaaaagttgaagatggcgagtttgaagcaatttatgcgcttagcgatgaggcaaaagatgagataaaagatattggtgtaaaactttatgaaaattattattttgaagaagaagtagctagtcgtaaagttttaagaatttttaaaaatagaaaagatataaacgaggcacaaatatttgaaggtgctttgcctaaaaaagatgatgagataaacatctctgctaattatgctagaaataataaaataaatataggtgacgagattactattaaaaataaaaagttcaaagtttcttctctagcatccttccctgattactcctcagcacttaaaaatagaaacgatcttgttatggacacaggtcacttcggcatagcgactatatctgaagaagcctttgacgatatgaaggacgctaaagtgaaatatctttactcttatcacacagatgaggctttaaataaaaaagatgcgagagaaaaattaaaagatatagtcaagatagttaacaaggataatcttgtggttgacgctgtcacacgctttgacaataagtgcatcaccttcattgcagatgacatgagtggcgacgtacctacaatgagcatagttacagcacttctcttccttgcaatcgctttcatttcgagcgcagaagttaaatccatcatcgaagaagaagcgccaatcatcggaactttgcttgcttcaggctataaaaagagagagcttcttttaaattacatggcaatgccactattcatagtaataattgcgtcaatagcgggaaatgcgataagttatcttcatgtgtataaaatatatgcaaacgtttattatcaatcctatgatttaccagtatttgagccatatatcacacttcgctccttcttgataacatcgattatgccactagttttgtatcttgtgatcaactacatcatcatagcaaagagccttaagatgagaccagtcgatttcttgagaaaaaactttaaaaaggcaaaaacaagaagtagatttaagctaaaaaatatgaattttataaataaatttaaattaagagttatatttgcaaataaatttagctacgtttccttgctttttggcgtttttatagcaaatttattactcatctttggtgtttcggccaaacccatatttacaaaatatgctgatgatatgcaaaatcagatgaaatacgcccacacctacattgtcaagagcgatatggatgatttagatgcgagcaagataagcttagtaagcgttgaactagttgataaaaacgacgaaaaagtccaaacttatggcatagacgctgatacaaaatatgatgagattgatgtaaaaagccttaaagatgatgaggtagttatcagtctcggtctttcaaagagatttaactacgaaataggcgataaaattaagattagagagccatacaatacagaagaaaaatatcttgtggtcaaggacatagataggaccaataattatttccaaatttttacaaaaagagagattttaaataaaattataggcaaagacagtgattattacaacgcttatcttagcgataaagagctaaaaattactaaagaaaatctacttacacatatagacagaaaagaaatgtcaagattcatgagacactttttagattcattctcagcagttttcatcatgattcagctcgttgccgtagcattcttctttatattgatactcatggtaacagagctcatcatagacaaagccaaactcaatatgacctatctaaaagtttttggatataaagataaagaagtcgcgaaattttatgtaaatacaagctttgccatgctaataatatttcaaataatactaattccaatcctagataaactcgttaaatatttttattttatagcaatgcaaaaatttgacgcatatttagaagtaacagtaccagtgagagtttttgttacaagctatttgatgacagttgtagtctttatactttgtcaatggattgagagaaggaagattgctaggattgatatggtgaaagagttgaaggtaatagcaggataattatataagaggccttaagtggtctctttttattgtagttagaatacccccagttagactgggggtattctaactacaaagaaatcggataaaaagcaatccgatttttttaggaagtctttatcatcgccaccatatccatatcagaaaagaggattaacacaggtaaataagaaagagttagaggtataaaattcgaataaaattaaaataatagtatgatactaaacgaatttttgagtgaagaaatatgaataaatattgcgtgcatggtgaaaaattaatattgacattttgtatataaagacatataatttatacgtaattttgtgcttaaaattagatatacgttagtatcattattgtactttaaggacggttgattttggagaaaatatatagaagaagcctagttgcgtttatttataatttaataataatgatttttggagcgcttgttgcatttttaatttccggagtaattggaggatataaagttgcaattattatatcatctatcatcattattttggttgtaataagtatatttaggcaattgagaactaaaataattataaatggaaatgatttatcgataaacgatgggaaaaaggaatttaactataatctaaatgaagttcatatttcttcagaacaaagaaacaatgactcgtttttcttatatatttatacagaagatggtaataaggaaatgtttgatttatcttcgctaggaaaaagaaaatataatgaacttattgaagatttaggagtggttggagtaaaaagcaaaacaattaaattaaatgatgttaataaaaataattaaaaaggagaatgaaaatggagaagtatttagaagcatttttttcaatgggagtatatgcctatgttgtgattgcaatttttatattagcggctgttttttcgtttgtgtcaattaaaatgaacaaaaatgccttgactaaatggttagctgtacatcctaatgcggtgaaaattgagctttcttccggaaataatgtaatcactcaaaaacaattatatgctagagtaatcagtggtgaagctgctatttttaatgaaaaagcaaaatatatagtttgtgcagatccaggagatattgttttagaagtaacttacacatatactagacctggagtgttatataaaaacgttactacaacatggggacctgcaaaagtggagcttaatgttgaaagaggaaaagactatttactaagttttgataagaaagaagagcaatttaagttatctagtaaataattatttgattgacttgagttgaagaaatagctatcgttcaaaaattttgtattaaagatagttattatttaatattatgtatcggtttaattaacagcaaatcaaacaggtttgctgttttttgctgttcaaaataaggcgtcaataaataagaaaaggtacttgacaaaacgcttcatggggagagtttccagacgttgagggctgtcatgcgcaaggcgacactatagatgaaattattgaagatgctactttagctctagagcttcacttatccgaaatgcttaaagatggcgaaaagcttaatccgccaagtgacattaagtctataaagacagacaagaactcttttgtgagcataattagagcagatgttaaccttaacaaaggtaataaatctgttagaaaaacacttaccatcccatcatggttaaatgacagagcagttgagatgaatatcaacttttcaaaaactttgcaggaggcgttggctagaaagattatataagagaccttaagtggtctctttttatttatttctatatatgggcaatagtgtaaatatatttgattaatttcgtgtaaaatcaattatctgcttaaaaactattgacctttactagttagcgttgtataatctacttgttagcatagactaataatatcattttcaaaaagaagatgacgattctgaatcgatcatcactagtgaaagatacaaaaacatccaaaaggatatgaagggaatcatgaagaagtcttctgaaaagaagcttagcttctctgataaagttgacagagttgttacaaacagattcctagctatccctatattcttagctattatgtggtttatatattatgtatcaatctctactttaggagattactgcataggctttattgaacaaacttttgaaaaacttggcgagatcataactactaagctacctgaactaggtgcttctgaagttgttacatcgcttgtaaatgatggtatcgtccaacctataggttcgatattcacattcgttccacaattaatgctacttttcttcttcctatctttactagaagactcaggatacatggcgagagttgcatttatcatggacaagttatttagaaagttcggactatccggtaaaagtttcatacctatgcttataggtacgctctgttcattccctggcgttatggctacaagaactattgagtctgacgcagacagacgtatgactatattactaacaccgtttataccatgcggagctaaacttcctatctttgccatgtttatatccctaatattcaatggtaccccttggatagctccaatgatatatctaatttctatcgctgttgtaattatagccggcataatattgaagcgtactaatagattttaagggccctgctcctttcgttatggaacttcctccatatagagttccaacactaaagaatgttattattcacatgtggaaaaagggtagaagctttatcatcaaagcgggaacagttatcttacttgcttgcttaacactttggttcttacaaagtttcaacttctctcttgagttcttaggtgactctatcgaagactcaatgcttgtgaagattggtagcgtgttaagatatgtattcgttccacttggctttggcgattcgtgggcacctgctgttgcatctataacaggccttgttgctaaggaagttgtagttgctacgtttgcaacagttggttctaaggcacctatctacttcagctacgttagcgcttttgcattcataatattcactatgtttgcagctccttgttttgcagctatcggcgcgatgaagagagagcttggtaacactaaagacacattatttacagcaggcttccaaacaggtcttgcttatgtcttagctctaattgttaaccaagttggaaacttgatcttccgcggtactaagtttactgaaaaagtaatgcttgactacggtgccgctgaagaagcctcagaagcaatcgacgttaagggtaacctaattatatatgttctaattgctctagtagtaattgccgttgttggtgcacttattgcaagaattcagcaaagacaaaaatataagaaggtgatataatgagtcccatcgatatagctatagttgttcttgttttaatatttgtattttttggtataaagaagacagtatactcaataaagaatggcaagtgtgcttgctgctctgaaaagtgcgagtgcaacaagaagaacgcagagcttcaaaaggctacgaagagtggcttaagaagaaaaacgagaaaaaagaagctaattaaatactatagatgaagagccggttcgtgccggctttcttcatataatcattttgttattcggccgtatataaaatttatattgaaagagggaaagataatgaagaaagaagtattacaagcattaaacgatcaaattaactttgagttatactcaggttacatttatctaaacctttccatcgctatggaaagagaaaactacaaaggctatgcaaagtggcttgctaatcactacaaagaagaattagctcacgctgatcaattcatcgagtttattcaaaaacgtgatgctaagccagaacttatgcctatcgagatgaaagatttcacggttaaagaacctctagaagtagcaaagatcatcttagatcatgaaaagaaagtaactgaaaagatttacaagattcatgacatcgctaagaagaacgatgactacgcaacagaaatctttatgcatcaatttataagcgaacaaatcgaggaagaagaacttgctctagatatcgtagataacttcacacttgctggagataacatcgcagcaaagattactatagatagagaactaggcgcataatagttttatttatacggcttggatatatcggggggacttaatgtccctccatttttaaatgagaatttcttgtaaagttattgcaaaataattgtcttcgcggtataattgttacgagagatgaaatatttattatatataaaggaggacaatatgcaaaaatcaattactaaagatgtgcttatgaagtttaaaaagtcttacgacgaaggcttcagcaaggcagcacaaaatatgatagcatctgctggtatcttagacgcttccataaactttacgaagcttaacaagaacccagatgtcttcaagaaaactgtcaagatcggcaagatgactaatcaaagacaatccggtagatgctggatgtttgcaggacttaacactgttagagttaatctaatgaaaaagtttaagcttggcgacatcgagttttcacacaagtacctatacttctacgacaagcttgaaagagctaatcaataccttgaagatgttatagcgcttaaggataaggaccttgacgacagactaacaagagacgttgtcttctatgcagcagacgacggagcttggtggacaacattctctagactaatcactaagtatggtatagtacctgagtatgcttatccagacacagccgatgttatgagaactgacagcctaatctacgtacttgacaagagacttaagatcgctgcaaaagacattagaaaggcaaaaactgatgaggccatagacgagattaaagaaaaggcacttaaagatgtctacaagatcacagctatctcactaggtgtgcctccaaagagattcgaccttatcttaagggacaaagacgacgaacttatcgagagaagaaacatcacagccatcgacttctacagagaattcatcgctgacgatttaagtgaatacgttgagctaggcaactacccaggcaagggcaaggaagaaaacaaagtttatgaaagagacttcattcaacaaagacttggcggctcacttaagtatctaaacgtttctatgcaaagaatgaaggacatagtcatctccatgattgatgatgacgaagttgtatggtttgcatgcgacgtaggtaaggactcttcagtatcacgtgacggagcaggaacaggccacctagtatacaatctacttgatagagacagcttatttaacatagatacaaagcaaacaaaggtagaacgtatggaaacttgcgagtctaatgcaactcacgccatggtcatagttggctacgacagaactgacgatggacttaagttcaaagttgaaaactcttggggcgaaaaggcaggcgtcagaggctacttagttatggacgaagagtggttcgataactacggcttcgagatcattcctaagaagaagtacctaaatgaggaagagctaaaagcgcttgacgaagagccaataaagctaatgccatgggagctataggaggtagaagatgagacaattaagcacagataaattaaatttattagaacaagaattcttgtcagataagaaaaacatcgttgcaatgaacgcagcagtacaaagcggcattagaaaagttgcaacagacattaacaaagttaaagaaaacccatataagttcaacctagacattgaaaacggcgaagtatgcaaccaaaaggcatcaggcagatgctggatgtttgcttcactaaactttatgagaaacgtaatcatcaaaaagtataaattagaaaatttcgaactttcacaaagctatccattcttctttgataaactagaaagaagtaactactacttcgaaacagttattgaaaaggcagacgagcctatagaagacagagttatgcaataccttatgggcgacccactatgtgacggcggccaatgggacatgttcgtaaacatcgttaataaatacggtctagtaccaaagtacgtttatccagagtcagtagcttcatcaaacacaagagagcttaataagtacctatccaagatacttagaaagaacacagttacacttagacaagcagttaaagaaggtaagagcaaagctgaagtaaacgcacttaaagaagctgctctacaagacgtctttaacgtactaacagcaacactaggtaagcttccagaaacattcgatttcatagcacacgacaaagaccataaacttatcgaagaaaagaacctaacagcacaatccttcttcaagaagtatgttggacttaagcttgatgacttcgtttcaatcacaaacgcgccaacaaaagataaaccatacaacaagacattcacaatcaaataccttggcaatatcgtagaaggcaaagaagttaagcaccttaacctaaaagttgaagacctaaagaaagccatcgttaagcaattgcaagacggcatgccagtatggttcggctgcgatgtaggtaaagatatgttcacaggcgataaagacgacaagagagcaacccttgccaaaggagtcatcgattacgaaacactatttgacctagacctaacactatctaaggaagatggccttaactatggctactcactaatgacacacgccatgacattcacaggcgtagaaatggaaggcactaagccagtcagattcaaagtcgaaaactcatggggcgacgaattcggctacaaaggccacttcgttatgagtgatgagtggttcgacaacttcgtctaccaagccgtagttaataagaagtacctaagcaagaaagaacaagaagattataataagaaagcggtagtgttgaagccttgggatccaatgggatcactagcataggattttgcgttaaaattgcatcttgcgcttgttccttccttagcaatgctcgagtacatttgtacactccgcttgcttcgtcggtccacttcgcgcaatatatcaatttttccagcaaaatcagtattacgattgttcgttgacactatacaaatatcatcagagatcaaagttaatctttggtctctttttatatgtgtctgtgtgatctaatacgggctgcgccttatccagcatagcgtaaaggttcatgtccatttatggacagggttcttcttctcttcgcatagcgcaaaggttttaggacgtatagtcttaagttcttcaatcagtttgcgatggtacgttgacactataaaaaatagcaaaaaataccattagagagcaaattgagttttgctctctttttgtattttagccacttcaatgttacaagcgtgttacataacgcttaaaagcttgattattattagtaagaggtgttatactagacttaggataaagatatattcacatttataaaggggataaaaaagaaggaggacattatgaaaaagaaagtactaggactcttgttagcacttatgatgcttgtgacaatgagcgcagatgcagcatatgcactaagcttctcagaggtaaaattgtcagatgcaaagggaatttactttgaagacgcaaatttaaatcctgacgagctagatccaaatctgaaactagatgaggacatagagccagtgaaggtagtagagccagaagcaaaagtgcttgaagaagaaaacaatcttgataatgcgggcgacacacttgaactcggcgaagaaagagaacctgaggcagtagctacaccagcaggctttagtctagattcaataaacaccatagctaaagaccaagatggtaattgctatggagttaaaacttatggcggcgacagggataatgttttaacaaaatatttttacaaaatagacgaagcagattataatactttatctcaagactttttaatgacttttaaaagaaaagatggacagcctttcaaagtttacgactctaagataagcaacggagatataagtgaagcaacaccaagttatagcgatattaatgcagtgtttacggaactacaatttaaacatcaatctgcttatgatgtagtggtttctggaaattattctcctgtcgatagaattccagaacaaggtaatctcacttggattattgaattaaataaagactgggatattaaagcaacaccaggctttacagatagatctaatactaggtcaatttatatgaattacgatgtggaactagacggcaagaatcataaaattcataatacagataataaaagtgaaataattcttcagcttggatcaggacatagtggagccagtgcaatagtcagaacagctacgcttaaaaaccttactatagatggaaagggattcgatgaaaatgtactaaataggtgtataaaagtttatgataagggagtattaaacttagaaaatgttcaaattataaacggcaatactgatcaagtaaatgatggcgctggtataactctaggatctgaaggaaagcttaacatggacgcaaaatcctcaattaaagattgcttggccatccgaggcgcagctatcaacgcagatgacaatacaattttaaatataaatggctctaaatttataaataaccttgcagacctaggtggagctatatgctctttgaataaaaagagcacaattaacattaaggatgcgacttttgttaacaatcaagcaattttattgtcgtttgatggttatgcaaatggtggagcaatttacactcaatctaatacaagcatagaaaattctacctttgtaaacaattatgctcaaaagtctggaggagctatttatcatataagcgcacctaagtttgatataaaaggatctacttttaaaaacaatggtatattaaggattccacaaggcacatactttactaataaaggtggagcaatttatgctaatgaagtgaatatatcagataactgtacctttgaaggcaatatagctgattatggtggagcacttattaataatgaaaaagcagaaatttctgactctatttttaaaggtaatcaatcttctagcggaggatctatatattcatttaaaaatctaataattcatgacaagtgtacttttgagaataatgaagcttaccatggtggagcaatatatgctaacaatcttactataaataaaactgaatttaataacaataaggcttataagatgggtggagccatatatgcaaaagacaccgtaaaaattattggttcaaactttaaagaaaatacagcagcgcagcagggaggagccatatatttgttaaaaggtggatctgaaattaaagattcaattttttataacaacggctcaaatcttggcggtggagcagtgttaattgctaaagatagtaatggcattacaagtattcaaaaaacttcttttattcataatttttcaaacgaattaggtggaggagttttactaagtgctaatggtaaattagaaatcaatgagtcaaagtttatcgataatgatgcatcttacggagcggggatttctagttcagctaacggaaatgtagataaaaatttaaataatataaaagttacaaactctatatttgatgataacacttcatatatgggtgctggtatcttcacagctttcccaacagaaattaatagctacacatttacaaaaaataaagcagcacttaaaacaggagatgatgaaaagaatccacatgtttctggtgtgggtggagctgttgaagttattaataacacaactattatcaaaaacactacttttgagggaaattatgcttatggctcagggggagccctaggcattaacggtgttgaaagacatgataatgaaaataaagatatatcatctattaaaaataatataaaagtagagatttctgaaggcacaaaatttataggaaatacttgtggtgtcggacaaggtggagctatatatactataccattcttatacgatttagaaggttatggcactagcgttaatgaaaacactcttaagcaagaagggtataaaaacttaaaaataagtcatgatactttatttaaggacaatttagcgtttagtggttttgctgatccaccagataattatcaaaattatgtttttttagactttagtaaaaatacttttagtgagagaataaatgatcaaataactgcaaaatcactactaaataactatgatgtaaactataagaatgaaaagataagtgcttattttgatcctaatggcggagaatttacaaatgaagctaatccaaaggcaataagagtagttaaagaagataaagttaaaattagtgatgaagataaaggcgcagaatttattatattgcaagcaccaaagagagatggctataagttcttaggatggaaaggtacaagatatgtacctggagctaatatggaagaaagacttaagctagcgattgaaaaagcaaaagcagaaatacattcatttgaaaggatatacaatcctggcgaaaaagttacattaaagtcaaactttatattcactgcgcagtgggagaaggcgtctgcacctagtactcttattcttactttagatgaaaactacccacatggcaagattactgactacgatgtaatgcaaggcgagtttatagatccatatctatatacaccgcgcagaagaggatatgtctttgaaggatggagctacagtagagatcgtatgcgcgaagtaagaaagggcgatcaagtatatactaacacagtgctatatgcaatgtggactaagaggaaggcaaaggcagaagaagcacctgagccagaagaaataaaaggacaagaacacaaagcctacatcttcggctacccagatggcactgttagacctaacggcaagatcacgagagccgaagcagcagctatgcttgcaagacttttagacatcgaagcatatggatcagcagatgcaccaatgttccctgacactccaagctcgtggtacaacaaagccatcaacgcggtagtgactagaggcataatgcaaggctacccagacggaaactttagaccaaacagccctataacaagagcggagttcactaagatgatagccgtgatagacaacaagccttacggcacagcgccattcgcagatgttataggtcactgggcagagcgtcctataggcgctgagtaccaagcgaaaagaattttaggctacccagatggcacatttagaccagacgctcacatcacaaggtgcgaagcagctgttatattaaacaagatatttgaaagaaacttcgatgctatgtcattaatcaagtgtaaaaacccacaaatgattaagtacttcacagaccttgatatatcgttctggggttacaatgatatggtagaagcaactaatactcatgaatacattagaagaactaagaacagagttgaagaagactggttattaattaaataaatttctcaatggatacatgtcatgtgatatgtatccattttttattgatacttcatagcgagaaaagtgattttcatgagtagaccagcaagcgaaggaaaacacttcttgcattaaaacttaaattaactagttgtgaacacaaagaccagttcataaaataaaaataaaatttcttataaactataaacaagaaggcatcgtatgatgtcttcttttttgctcatatgcgaaattattgacaatcaacacatcttgtgataatattgttgtgaggtgtaatatgctattcatcgatcaactcgaccgtataacaagtaaatatcttgacaaagtagccatcgttgacaaagagaagtccatcacttttagtgagcttcgtgcgagggctatgagtcttgcaagcgagatacataaggtgcatccacaaacgaagcgtcccatcatggttgagactgacaggctacttgagactataatctctttcttcgctgttctttacagcggcaacttttacgtgcccatcgatgcggctatgcctcgtgagaggattgagactatcaagaagcgtcttgagagcactctaggcatttatcatacgaagaacattttcgaggattatgctcttcactatgaccatgaccatgattatggctgtgacgatcttgctcttgatgatatcagagctaagatgatagacacagatcctgtttatgttttattcacatcaggcacaactggtgagccaaagggcgttgttatcagtaatttcatgctcgttgacttgcaagattggctttacaaaacactaaagataaacgaaaacgataggcttgcaaatcaaacgccactcttctttgatgcgtcgcttaaggagctttgtctatttactaagactggagctactctataccttatggatccaaaggactttttatttcctgttaaggtggtcgactacctaaatgaaaatagaattacggccatactatggtcggtgtcggcgcttaatatacttgcaaattcaaatgtttttgatatagataaaccaaaatacttaaggctagttacttttgctggcgagcaaatgagcgcgcaaaagctaaacatctggcgccaagctgtagaagctgagtactttaacctatatggaccgactgaggcgacttgcgactgctgctattacaaggttgacagggactttcaagatgatgagatcatccccataggcaaggcttgtgagaatatggaggtcatgatacttgatggcgagcgtgaagctgacgagggcgagcttgttatcagaggtagaggcgtttcatatggctactacaacaagcttgaccaaactgagaaagctttcgtgcaaaatccactaaacaaggcatatagagagattgtttacaggagcggcgactttgttagaagaaataagtttggcgagatagaatttttggctaggaaggacaatcaggtcaaggtctttgggcacagaatcgagctagacgagatagaaagacaggtatacgccatgggcatacacgaggcgagcgctgtttttgataaagaaaatgaaattataattttgttttactcaggaaaggaattttcgaggaaggagtttaaggactttatccttgaaaggctgccaaagtacatgcttccatcgaagtttgtgcatatggatgctcttcctaagacgcaaaatactaagattgacaagaagaggcttttagaaatttatgaacgtggagaagtttaaatcactaaaggagcttgagattttaaaatcttatgagggctccatcacaaacgattacatgaacacttctctatatgaagctaatatcgataggctctactacataaaaggcgatatgaatttctatgtcctaatcaaaagagaaggctattacaaactttattattatataaacgatatcaatgaaaaatttgatgcgaaaggaacttttgtgagcgaaatcgtttctaaacaaatggatgagacgcttgaaaatatgggctttgagctatacaagacaagagtgagactgcgcttaaatcataaggagccttatgaatcaagccgcgtgaattatatggatgatgcggacttcatatatcatgcacttcaaaattttgatgagtactcaggtgagagacttgacttagatgaggtacgtgagcgcatagaaaaaaaacttttcataggcatagacggcgctggctttatcgaatttagtacagatgcgtttaaggacagtatcgagcacttctacatagacccggctaaaagaggcgagggactcggcagcgagatcttgcaccattatctaggaagcgtgtctaagaagaagcgcgtcaatgtgtggactgatgaaggctcgagagcgataaaactataccataaatttggctttaaagaggacggacttaagtcctacgtatatatttggaggtaagactgatgaaagaaaaaattaaagaaatcatcgaagacgtcactggtgaagcagttgaggacacaacagagatcatcgaagaaggcatacttgactccttcgacatagtgactttagttatagaattaaatgacgcttttggcgttaaaatacaagtttccgagctattgccagaaaattttgcaaacgttttagcgatagagaaactaattaaatcattgcaatgagttttacaagcttcactttcatagtattcttactatgttcctttattgtgtttaaggctactaagtataggtggcaggcgcttttactcatctctttagcttattatgcaagctttagtgtaaaggccttcgtctacttaatctttgtaattttaagcacttatttttctgccatttatctagagaagcataagaataaatttattttggctctcacactcattttgaactttggtatgctaagcttagttaagtttacgagtgtcaatatcttcgaaaacttcattccgcttggcatttcattctacatcttcatggcgagtggctacgtgattgatgtttacagagcaaagtacgaggcacaaaagaacatcttcaagtactctctcttcgtttcattcttcccgcaaatgatgcaaggacctatctcacgctacgacgacatctcacaaggtctctatagcggggcaagcgatgcaaaggacatctcttatggtcttatgctcatactttatggattctttaaaaagcttgtcattgcggacagggcagcagtctttgtgaacaaagtttttactgagccagatttatattcgggcatcttcgtttttattgcaattatattttattcaatacaaatttattgtgacttctcaggcggtatcgacgttgcaagaggcgcagcgtacctttttggcgtaaagcttgatcgaaacttcaaaaggccattctttgcgacaagccttgcagacttttggagacgctggcatacaagccttggcacgtggatgaaggattacgttttttacagcctttcactatcaaaagccttcgtcttcatcaacaaagcttcgagaaagcacctaggacgaaagtttggtaagtatctaacacttagcatagcaagctttattgtctacttcatcataggtatatggcacggcgcgggactaaacttccttgccttcggtctatataatggtacgataatcagcttgggacttatattcgaagagcacttcaaggcactaagaaccaaaattggcttaaaagatacttcacttgcctatagactaacaaagatatgctcaacactgatgatagtctttgtaggaagatactttacaaggtcagcaagtcttagaggagcactgcacatgatgaagaagacccttgtcgacagagccttcaggtttgcagatacaggtctaagtacacttgactacgccatcatacttatctcgcttataatcgtcttcatcgtttcatacagtgaagaaaagggcgtcgatgtcaaagagaaggtgcttaagaccaagactagctacctatgcatgggccttttcatcttcatggcattcgtagcctacttcggagtctttgcgagcggctttacaaaagtagactttatatatagaaattattaggtgatcatatgaatgaaaagaaatttataaagatatttttcatatcaatcttaatactagctttattgatagcggctctaaaccttatagtagatccgtttaatgtctttggcgacaaatttacaaagtggtacacatacgactttacacaaaatccaagaacagcaaagatcgagtatatcaagggcaaggattaccaaaatttcatacttggagcgagcggtgcttcatccatacccataaagtatctagaagagtatacaggcaagaagtatttcaatctcttttcctacggtgcagacctttatgtagtggagaaaaaccttgactacatcctaaagaattatgaggttaagtccataatcctgccgctttctataccgtcggcgtcgaagtacaacgagccgaggacatcactaaactactacatgaatccagacgtttcaggcgagagcaaagcacttttctactcaagatacacactcgctaatccgagaaatgccgtggagaaactcatcagcatgggcaagaggtcgcacgtgcaaatgaattttgacgccttcaatatagacggctcatacgacaagagccaaagagacattgaatacatcggtagtgaagaagagtacatggaggcgagcggctttgcaaaggattactcacctgtcaagctcaatcacatggacgaggcactctcagccatacgccgcatgaaaaaggcatgcgacgaggcaaatgtcgaactaacaatgattctttgcccaatgtacaaggatgagaacgcaagatatgacagaaaagaggtagaaaagtactacgaagagcttgccaagatcagtccgttttgggacttcacgggcacaaaatatgagaacgacccaagattcttctacgacccgtcacactttagaaatgcccttggcaagatgatgcttgagagcatatatgaaggacgcaaggactttggtaggtacgtagacaaggtagaggcgcctacttacacagacgaaaagacagacacaaggagcttctacatctttgaactgcaccacgtcgacccagaccctgccaacgagtacatcataacagaaaaaaagcttgagagcctaatgaagtttttgaagaagaacaagatagagacagtctcatttaaagatatatataactatgtcaatggtagaggcacacttccagagaagttctgcgtcttgacctttgacgatggttacagatccaactacacaatcgtctacccagtgcttaagaagtatggcttcaaggcaagctacttccctataggcaggaccatgggtctagataagtacccagacagtggagaggcgatgtttgttcactacagtgtagaagaagctaaagagatgacagacatcatcgagtttggcacacacacatactggatgcatcagtcatacccgaacaaaaactacactttccgcagaacagcaaagaaacttccaaaagagagtgaggacagatacattgaagcatttaaagaagacactgcgaagttcaagcagctctacaaggaatttgcatcaggagagcctctagtctttgcttatccagagggcgactacgacaagcttagcgagctagtcagtgaagaagttggctataaggtcacacttggggttaagccaggcaagaactacatcgtaaagggtctaccagagacactcaagaagctaaagagagtcaacatagacgagaagacagaccttgatcagtacaagtaagatgatacaagtcatagatacattagctcaagacccatctagcctagagattaaaggcacacttcttttaaaagtgaagacagactcatcacagctagaggattttcaaaagtacttgagcagcacaaatcttgcagagctagatgagattaaaaacgagcaagataaacttcgcttcataaagacaagaggcctggttaatatgctttttgcgcatgataattgcggcgcagaagccatatggaagagaagtaaatacgctaagccatatatatctggctgggacaaagactttagcatctcgcacagcacaaagatatccatcgtgggagtgtcagcaaggcatgtgggagtagacatagaagacatagggcgcgatatagacctaacaaagtttaaaagaactggttttttgaacttcgatgagggtgcttatgagagtaaggaagaattccttatgcgtttcacagcccttgaagcctaccttaagtatataggcagaggtttttatcatgatgccagagatattagcgtaaggaaagccagtggcagtatagtgattgaggatggcagcttaatcaaagcagaaacgattagggatggcgactataccattagcatggttatgggataaagaataaaacccatcgaaatcgataggtttagaaaaaagaggcaaaagatggacagagaaaaagtaaaagtattatttgataaatacacaaaaaagttacgcatagtgcctgagtgggacataagacttgaatttgtcgaagaccccgaatggaagaagacgggcgatttcaagatagatccaacagacaagaaggctgtgcttatgctaaacgcggtaaatccaaaggacgagaacattgaagaaaccatagttcacgagctaatgcacatcaagatgtatccactagaccaagtatgcgagtcgatgattataaatatgttcgacgaagggagcaaggcacaaaactttgcttatcaagagttcttcacgacgcttgaagtgactgttgaagagcttgcaaagtgcttcctatacgagtttggcgagaacaaagagctctcatacggaaggatgaaaaagatcaagtcctttaatgatctttatgacggcttaaatagtattgaataaaacacgcgctctttacttatggtagagagcttttctttgccttgaaaaatgactttgctagtgatataattaattaaagaggtggactatggcggatattatggagttcaagggcaaacttgaactaaaggatgatataaaggcgcttagggaagagcttgtaaggcttgtagaggagcgcgacaatttaatatatacgacttgtcccaacattaagatgaggtacatgatagaggtgggctaccttgaatacaagctctacgaactaagtcttaagtatcaaaggctcaagaggaagaaggaactcattcaggcaaaggtctatagagatgaaaaagttatcgtcatagagatagatgagatgcttgacaaggagtttgagaggtatcaagaagagcttgaagagaagcttaaggaagtaaacgagtcaatcaagaggagcgagggcgaatttttatcggatgtagagagcgaagaccttaaggatatgtatagaaaagtagttaagaagctgcacccagacattaacccagaagtcactgaggctgagaaggaacttttcattagagcagtcgaagcatataaggcgggggacgtctctagtatgaagcttatatatgtagtatctggcgcggatgaagagacaaaggacgatgagtctagcttaaaaacagttttggactttgccgaagagaaggctcgccttgaaaagcttattgaaaatattaaaaagaacatggatgagatcaagagccgcttcccatacacacttaaggtctatcttgacgatgtagagcttaggaagaagaaaaagaacgagttagaagattcaataaatgattataatcttgcaataaaggatgtggaagaagctatagcaaagctattggaggagaaagatgagtgatttagttaaaaaagatgatggcggcggtcttttaggtgtcttgcatggcactagtggtcttgtggtgccaaagccattcgaacgtgagatatatctattcacaacgcatgtcgcaggtacaacgcacgttgacaatattttaaagatagacaagcatttggatattgacgataaattgttattcttcagagaagagaatcctcacgacgaaaaggctatacgcatagaaactcttcgaaaggaaaagattggctacgtgccaagagttgacaacgtggtattctctaggctgatggatgccggcaaggagctctatgccaggatcaagggcaaagagtttattgacgagtggctcagaatagagatagacatctacctaaaggactagggtacatagcaaagctatgaaggaggtaaagatgaaagataaagaaaaaagtatgcccgtcttcggagttgggccgctatttgttgtaacaacagttttagcaaccgtagtcgcagtagttttgaatagaagcggagcccttgtcaacacgagactcggcggagcgaagtggatttacatcgcagttgaaatcattttcatagcgctgggcgcctatctatggctagcctcagtcatcggttcaaagatcaacataaatgcaaaagagggtaaactcatcactacaggggtctatggaatcgtcagaaacccagtttactcggccttcctagccatatctacaggcataatcataggcgagaggagcgcggcgctcttagtcgtgcccgtggtattgtggggttttctcacagttcttatgaagaagacagaagagaagtggctttacgagagatttggcgaagagtatctagcatataaaaaccgtgtcaatagagtgataccttgctttagaaagaaataaatagataaaataatccccgatacaattacgtatcggggatttcttaaactatctgtcctttttaattaattcttttgtctctaagttgtactcgtactcgatgtctttgccacttgcatcttcaagctctacatcaagcttagtaaaatcgccaactgtttcatgctcaaggctgaatgagtctaagtggtatccttctccagcctcacttagtgaagaagctactagctcatctatgttcttgattataaagagtataatgtgatataatattgatactaaaaggaggcttatatcaattatgaacgcattaattgtattagatgtacaaaaagggattttaaagaaaaaagatttttcaaacactttaaaaaatattaaactattaataaatgattttaagagcaaaggcgatgtcgtagtcttgacacaacatttttcagacgatagcgatagtccgttttataaaggatccagcgatgtagaattgttagatgaatttagagaagctgctgattatgtgataccaaaatcatcatgtaatacatttcataatacaaatcttcaagaaatattaagtgaaaacaaagtatcaaaggtttatatctgtggttttaacacggaatattgctgtttatttattagtatattgtcttctgatagaggttatgaaactatatttgtagaggatgcctgtggaacttttggagatgaagaaatatatgaaatgccaggactagatattaatgattttattggctcaatacttaattggtcaggtgaagtagaagtactatatacagaagaatatttcaatggtgtaagcgaggaataaaatttaagcaaatagaaacatgatgatagatgtcaagagataaaagtacttggcatctatttttatgggctaaagagaatattatgtgatataattaaattagtgaggtgtgaatattgaagaacggaaagaaaactatgataggcatcatacttaaggaactatactagacaaaagtataaaaaggagaaatatatgttattagaggatggcacaatgaatattgatttgaaagaattggatatatttgatactgagtatattaatttggtcaaaaagacttgctttatatttggaaataatggaacaggcaaaagcacatttgcaagtcatttaaaaaacaatttaggtgattacgatgttagggtatttcaaggatttgacagcgttgtaaacagtaatgatgaattgaacgctgttgtgttaggagaagaaaatgttgaaattgacaacaaaatagccaatattaaattaaagattgaagaaataaatgtagatataaaagataaagaaaagctagttgatgaaaataattcggatgagaataatctatattcaaaaatgaaagctgctgagacaaatttcagagaattagaagataaaattgaaaatttttattctaaaaaagcatctataataaaaaatatagatcctaaaattacgaaaactacttataataaaaatgattttaaaaatgacattaatatggcaaatttgttgtcaaatgaagaacaagataaatataatgatatattaaaatatgatattaaaaatgctaagaaaattgattttgaaaatattaactttgataatgaattaaatagagtcaatgaattattgacaaagagtgtacaaccatcaaaaaaaatatcgagattagataataatgatgagaaacgagagtttgctaaaaaaggattaaaaatacataaagaaggtgaagtatgtagtttttgtgggaatttaatatcccgtgaatgtttcgatgaattgaaacagtatttttctggagaggatataaaaaagtttgaaaatcaacttcatgaagaggaaaaaatattaaatcagaatagagaaaatataaataaaatcaatctagatagtgaaaatttttacgttcaatattatgagaaagttatagatttagagaagagttttttaaaattaaaaaaagaaattctggaattttatgaaaaattaatagatattatttcaaataaacaaaaaagattatttgaacctatggaacaattaaatataaagacgcctgataatttagaggaaatattgaataattataataaattgtgtgatctgaataacaatacaaatatagaaaatcaaaaagatgatgctaggaataatctaagattacatatggtaaaagagagtttgctagaatttgagcacactgaaaagaaagatgaattaacgaaactcgaatttgcatatggagtatcaaaagtagaatttaataaagttaaaaaagaaattgaaaatctaaatactgaaaaatcaaatcttgataaagaaatactagagcttaaagcaagtagtaaaaatgaggaaaagctagcaactgaaataaataaacgtttagctatttatgttaattttaacttgcttcattgtaaagacggacaaaacggatgctatcgggtgaaggataaacagactggcaaagtaagagatgtgaaacagttatcaacaggagaaaagaatataatagcgtttttatattttttagagaaattagaagaactaaattccggtatagctaaaaagaaaaaagtaataatttttgatgatccaatgaattctaatgatataaatatgcaatatattataattgatgaactaaataaattaatagaaaaagcaaataaaaatgattatatagaaaaattgataataatgactcataatcatcacttttatataaatttagctggatttccaaagactagatacagagtttgtgatcatttgcgttttgtatcaaacggaataaatacgaatgtaataactattgccaataaaaatgaagattttaaatcaagttatgattcattatggcaagatctgaattttgtttatagttctaaggaagggagtgctggtctattgtgcaatatttctagaagaataatagattcatttatcaatttcaattctatgacaaaaaatgatttttataaagataatggcgatgcgaaaaaattgtttgatgtaaattcgcacgagttatatgattttgatgctgatttttttggactagataaaaataaaattataaaaactttatataaatgttttgaaagtaataatgcaaaagagcattttaaaaactattttaatacagaagatatagaggaaattattaataattaagattaaaaaaattatctaaatataaagtagttttaaatgacataaactttggggaggaaatatatgataggtaaaaacttacaagataatcttgatataaaagttaacagtaaaaagatggagaaacttaaagatgattttcctgagtttttcacaaaagaaggagattttaagcttgattcatttaaagattttttaaaagaggaagaagttgagctaacaaaagaagcttatgaactaaacttcttaggcaaatcttatgccaaataccaaagctcattaaatactgaaacatatatttcgccagaagttgaacacaatgaaaagcctgaaaacaaaaacagtgaaaacgtttatatagttggagataatatagatgcactaaaacatttattgggttcatactctggaaaaatcaaatgcatctatatagatccaccatacaatacaggctctgacggttttgtttatcctgataattttaaatttactaatgaagatcttgcggaaaagataggcataacagaagaagaggcagatagaattttaaatcttgaagggaaaagctctcatgctgcttggttaacatttatgtatcctagattattattagcaagagacttattagctgatgatggcgttatttttattagcatggatgacaatgagcaagcaaatttaaagttaatgtgtgatgagatatttggtgaagaaaataaagttgggaatttgccaacaataatgaatttaaaaggtaatcaagacgagtttgcttttgcaggtactcatgaatataccgtagtttatgcgaaaaacaaagctgatttaattataaaaaatttagagctagatgaagaggaaattttatcggagtggatgattgatgatataggatattataaaaaaggtgcttctttagtatccactggagttaattcacctagagaacatagaccaaatttatggtttcctattttatttaaagatgataagatatttttacctgacaaagaattgttgaatgcattatatgatatgaaatctaaaaaatttaatgatggagtgttagaagaatatattgattcaaagaaaaatgaaggttataatgttatattaccttatgtaaacaaacaaaaagcaaggtggcgttggagttataataagctaaaaagagagttaaatgaggttattataacaaaaacacaaaatggaatttcattaaataagaaacagagaccagatttattagatatacctagtaaaaaaatgaaatctttgctttataagcctgagtattcaagcggaaacggcactgcagagttaaaatcgctatttaatattgatagactatttgataatcctaagccaaagtcattattgatggatttaattagcatctcaacaacccaaggctcattaatcctagactttttctcaggaagtgcaacaactgcagatgcagttatgcagcttaacgcagaagatggaggcagtagaaaatatattttagtacaattacctgaagctataaaaaaagacaaaccagcatacaaagcaggctacagaacagttgatgaaattggtagagacagaattgaaagagcagctgcaaagataaaagatgaaacaaaagcagatatcgactatggatataaactttactacttagaaaaaccaagcgaaaaaacgctgctagacttagaagagtttgagccagaaataaaactagtttcagacgacatgatatcagtttttgataataaacacgctagtggtaaagaaaatattttagcaacatggctaaatgaagacggctacggtttaacaaaagaaacaaaagattacaaattagagaactatacagcacagttaatcgaaaagactttgtacattatagatcaaggactaaagtcaaacgacataatgaaacttataaagcaaattgaagatgatacattagatataacaagattagttatatatttgcattcaatggaattcaatgttttaaatgaattaagaaagaatataaaagttttgaagaataataagaacgtaactttgattgaaaggttttaagtatgatagagttaactatattgccacatcaaaatgattttttgacagccataaaaaaagcctttgatggagtagttataaaaaaatcaaacgatgtgtacgcgaatccaattattgatttgcatgatgaaaaaataaaaaataatattaatgagttatggaacggatatgaagaacttccaaatattcctcaagtttggagaaaaagtgatggaaatgactatctaggcttagatatcaagatggagacaggaacaggaaaaacatattgctatacaagaatgatgtatgaactaaatcaattgtatggttttcataagtttattatacttgttcctacaactgcaattagagaaggatctaagagttttttaactgctgattatgcaaagaggcattttgcggatctttatccaaataaaaaactattcttagcaagtttagaggctcaaaaaaatcctaagggcagaaagctttttccagcagctgtagctgagtttgtaagaggaacaagtttagagaaaaacaaattttcagtattacttatgaactctggtatgttattatcagaaagcactatgaatactgattatgatcaaactgttattggtacatttactaagccatacagggctcttgaagctacaagaccagttgttattatcgatgagcctcatagatttaaaaaagctaattcagcatacaaaacacttattaaaggaattaatcctcaatgtatcattaggtttggcgctacattccctgagcttaaaaataatgaaattgattataataacttaattttcaatctaaattctgttcaagcatttaatcaaaacctagtaaagggtattgaaacgtatatgatagatgctgaaaaagagaatgaaagcaaactaaaactaatggattttaagaaaaaccctaaagtatgtacatttagagacgagataaataagaaaactattgaattcaaaaaaggcgagtctctagcttcttttggtaatgacttttcaggactaagtgttgatgaaataggaaagcttggagacgatgggattaagagcggcgtcagattatcaaatggtcaagttctttctttgtctgatattatatatggtggcatatatacagatacttatcaagagctcatgcttaaacaagccttagtgaatcatttcgaatctgaaaaagaaaattttatgagaagtaaaaaaataaaaacgcttagtttattttttatagactctgttagttcatacagagatgaaaacggtggtaaaggtagtttaagactgaagtttgaagatttacttaaaaagcatctaaaacatgaaataaataatattgataaagagcttgataatagacaagatgaaaaattgttagagtacaaagaatacttagaaagttccttagaagatattagtaaaactaatggtggatattttagtcaagataatgcatcctctgacaaagaaattcaggaagaaattgataaaatactaaaagataaagattatttgttaaattttaaggacaataaaggcaaatggaatacaatgagatttattttttcaaagtggactttaaaagaaggttgggacaatcctaatgtattccaaattgttaaattaagatcttctggatcagaaataagtaagcttcaagaagtaggaagaggattaaggttaccagttgatgaaaagggtcaaagaatttctgatgaacaattttatttaaagtatttgattgattattcagaaaaggattttgcaagcaggcttttagatgaaataaattcagatcaacctaataagcttatgaatgttaaaagcgtactacctagattgtcgacacttatgaataaacctcaagatgatatttttgttgatatgctaagcaaaaaatatattgatttagatggcaatataaagacagaaaaacttgatgacttgtatcaagattaccctgaagcaatcaataacttaaaaccaagtaaagttattgatggtacaaagaagaaaaatgttgtaaatattagaaaagataaatttacttctattagaaaactttgggaaaaagtaaatcaaaaatactatatgaagtttgaaagtattccagatcaagaacttgttgatgcattgtataaaatattagattcagatgtgtataaagatactaatatattaacgaaaacagaaagaattgaatcagtagatggagcggtagttttaaaagatagagtaagtaatttcttcacggttgatgaaaggttgacatactcagaatttcttatgcagttgaataatcaaattgcagttccaataaatttaatacatcaggcactttgtaaatattacgatgcaaatgcaagcattgatgagaggttgttcacaaaagtaagcatacaagcagttgttagcgaattcaataagtggcttgatgaagagttattgaagaagttttcttataaggctttagatgtagatatcaaagaaacaagtttgactgattataaaggtgaggttgttgatagcatatcgcaaggacttctaggagtatacagagatgacaactgtagtgtacctaagaaatttatatatgatgctgttgtatatgatagtcctaaagaaaaagagacattaataaaaagtgacattgcagatgtggttgtttttggaaagattccacgtaagtcaatacaaataccactattcactggaggaacaacgagtccagactttatgtatgtgattaataaaaaagacggtgagtcacaaataaatttcatagtagagacaaaggatatgaaagatgaaaaatctcttagaagtgaagaggatttaaagataaggtcagcagaaaaatttttcgagactatgaaggaagatggcattaacgttgtatttaaaaagcaattaaagaacgatgacattgtttctatgataagcaacataattaaagaaaattaattaatccacacccaataaagactatcgcttgatagtcttttcttttgtctcacctaacttatcacgctccacctctcttgtgcttatacatttttatgcttttggtttttctcgttaaattgcttttgcataagtatagatttttcttatagcagctatcaactttttgtgatataatatttgaggaatattttacatagaggagattaaaatgaaagattacactgaattattgaagaaggagctgatcatggctcttggatgtactgaacctatcgcgatagctcttgctgcggcgaaggctaaggaggttcttaatgctgacattgttaaggctgagattatctgttcgggtaatatcattaagaatgttaagggtgttactgttcctaacactggtggtatgaagggtgttgaggctgcttcggctatcggttttgttgctggggatgcatctttgggtcttgaggttttatctaaggttaaggatgaggacatcgcgaaggctaaggagcttcttaagagggacatcatctctgttggtttgaaggagggtgttgagaatcttgatattgagatcaaggtttgggacaaggatggcaatgatgttgatgttgagattaagaacaagcacactaacattgtcaaggttgtgaagaatggcaagcttttgcaagttgacaactgttacactcactcgactgatgacaagctttatgaggacctttctttaaggggtatctatgattttgcgactaatgttgacttgtcgggtcttaaggatcttcttgagaatcaaattgttttgaactctaggatttctgatgagggtttaactggcaagtggggtgttgctatcggcaagattttgatggatgaggacaagtctttaagaagtgttgcaaaggctagggctgctgcgggctctgatgcgcgtatgagtggctgctcgcttcctgttgttatcaatgctggtagtggtaatcaaggtatcacttgtactatgccgcttgtaacttttgctgaggcgaagaattactctagggaggatttgtacagggctttgattgtatcgaatctaactgcgctacatattaagaggtttattggcaggttatctgcgttttgtggtgtaacttctgcgggggttgctgctggtgctggtatctgttatatggaaactaaggattttgaacttatggagcacactgtttctaatgctttgatgattgcatctggtatgatctgtgacggtgcgaagccttcttgtgctgcgaagattgcaactgctgttgatgcgggcatttctgcttattacatggctaagaatggcaagaatttcgaagctggcgatggtcttcttaaggattctgttgaggaaactatcagaagtatcggttatgttgctaaagagggcatgaaggaaactgatattgttgttttaaatactatgattagcaagtaaggggtgttacatatgaagaaacctatagttggtatttcgggttccatcatcatcgatggtagtggtaatttccctggatatagaagaagttatgttaatgaggactatgtaaagagtgttatcaagaatggtggtattccatacataatcccgatgaactctgatgagtctgttgttaaggagcaaattagtcatgttgacgcgcttatcttaagtggcggtcacgatgttactcctcgcttctatggtgaggagcctcacaagagtcttggcggcattcttcctgagagggacatctttgactttaatttaatcaagtatgctatggagaaggacatccctgttctaggtgtatgcaggggctaccaaattatgaatgtttactttggcggcagcttgtatcaagatgtgggtctaaagaaggacacttatgtaaaacataatcaagttaatttccctactatgactagtcacagtgttgacttggtagatggtagtaaattaaaagagctttttaaagaagataccataatggtgaactcgtttcaccaccaaattgtgaatagagtggctgagggctttttggcttcggctatcagtaaagatggtgttgtggaggctatagaaaagaaagatcacaagtttatgctcggtgttcaatggcaccctgagatgcttcatcaaactgaggagaagatgaatcttttattcgctactttaatcaaatctgctatgtaaaggagtttttaaatggataaagctactaagaaattaggtttttggtcgattgtattattgaccatcaactctgtaatcggttctggtatattcttatcaccgggatctgttgttaagatgtcaggtaaatatgcgcctgtaatttatcttgctgcagccatctttgctgcggtactagctatcactttcgcgtctgctgcaaagtatgtatctaagggtggagctgcttatgcttatactaaggctgcctttggtgacaactggggtctatacataggtataacaaggttcttctgtgcggctatcgcgtggggtgttatggctactggtgttgttaagactgtattaaatatattcgcgcttgacagctcaaactttgcttatatcacaactggttttattgtacttatgggtgtattattcgtaattaatatttgtggtactaagattttagagtttgtaagcaatatttctactatcggtaaattgctagcacttgttactgctatacttgctggcgttttaatcgttatcttcactggtcaaaacaacttctctgaggttgaaagtgttactagcgaagtaactagtaacatggatgtacaatcgattgttatggcgatcatcgctgctttctatgccttcactggcttcgaaagtgttgcctctggttctgaggatatggaaaagcctgagaagaacttacctaaggctatacctctaggaattttagttatcgccttcatctacatcggcatagttctagtttgtatgatgatagaccctgttgctcttgtagagactaaagaggttgttgcgcttgttgatgtattcaaaaacaagattattagaaatgtaatcctatacggctctctaatatctatgttcggtatcaacgttgcagcatctttccatacaccaagaattatcgagtctatggctaagcaaaaccaagtgccaaagattttcgcaacaagaactgacaagggcttcccaatattctcaatgatagtcactgctgttttagctatcgttctaccaattgccttcaactacagcatgggctctatcatgatcataagtgcgatcgcaagatttgctcaattcatcatagtgcctcttgcaataattactttcttctacggcaagaacaaggaagagatcgttcaaggagttaagaagaacttcttcactgacgttatcatcccagtattatcagtattattaacagtactactactagttaagttcaactgggtaaaacaattcacaataaacactgacggagtattgactccaaactatctagccatagtatctatgatcataggctacgtatttatacctttgatggtgtatttatacaacaagagaaaataattaatatttggtatttataaagctctatatgcggtgcaggtattgacctgtgccgctttttattgcaaatcatcttgcaaaaaaaagagatgcctatctaagcatctctcttttgtatattgtcttgtgtatattaactttgtgtattacttaagtccttctagtagtatcttctctagcttaagtggctctacgtactcatcagctttgtatgcacgcatgttgccgcctgagatctcgtctatcaaggcaactttgccatctatcatgccaaactcgaacttgatgtcgtatagctcaaggtctttctttgcaagctcatcttttacaaactcgcctatctctttagcaagacctactagctcgtcatactccgctcctgtcatgatgccaagtatctctagtgcgtccttagtaataagtgggtcgtttctgtcgtcgtccttaagtgtgatctcaacgtatgaaggaagcttcatgccgctctctgcgtattggccgtagcgtctgatgaaggagccaactgctctgtatctcacgatgacttcaacgccgttaccaaagactttcgcctttctaactacagcttcgttcttgtctggatctgctgaaacgaagtgagtatttaaaccctttgcgtttagtttttcatagaagaactttgttaaaaggcatgcactgtgtcctgcgccttccattgtaagtccaacttggttttggcctgggtcgaagacaccgtctttgccagttacgtcgtctttaaattttaataatacttctttgtcgtttaactcgtaaacgtcctttgtttttccttggtatatttttttcattaactttacccccccctaattattatatattatcaagcttttgctcatctacgttaatgtttttgagtgcgcttacaagacccaatactagccataaaactacgatgatcctgtagatgtagactatgtgctcaaacattgcgtgtgttagtatgccaagtgttgcggctaaaagtcctgctgcaaaggttttgacctcgctgctctttgccttgtagattagctttatctcttgggctatggctgttatgattataagcacgaagcttataaagcctgtgaagccgccttcggccatcatctcaaggtaggtattgtgcgcgtggaagattggcatacttcttatatatctttcgaagacgtacttaaatggcttgtgtccaaagccgactccgactactggatgatccttgatcacatctttggtaattgaccagattttgaatctgtagcttgttgacgagtctttcacgttcgatattgacatgatacgccttttgatgttctcgggtagaaaacttagcgccaagaggaagaacggcagcgcgacaactataagtggtcttgcttggaagaagaggaagactagtgctgcaacgcctagtgacataatgccgcctcttgagaatgttagcatcaaagaaagaagcatcagtccaactatgcataggtagacgaacttcttgaatgcgtctttgtgtgcccagaaaagactcacgactataggcactacgagtacgatgtactctgcgaagacatttggattcataaatactgaatatgcacgcttcgatatctgtcctgcgacttgactgtcgagccactcacgcctaactgtgccgaagaacttgtactgaactataccccaaaggcagattagtgctgcgttgatggcaaggctagttgcgattttgttgtagtcatctttgtttttaacagctatatttacagataagaatattgcaagtcctgcgaagttcatggctaggtctctcatagagccaagcggcttaaccgatgttacagtgcctataattatcatgattacgcctaaagctacggctacgaagcttgagtttatccttaagctttcctttttatatatatacacgtccactagatacatggctaatatggcaagtgcgccagcgattgagactatgtccggaagaaagttgtagccaagtatgaagaggtttagcatcagaaactttctcttcgcaaagaagggaagactgattaaaagtagcacaagtgcgagtgcaatcttagtagagacaaacttatatgcagctaaaaatgctgccgcagcaagcactggatagagtagattgtttttaatcttgtaattttctataattgctttcatctttttacctctcaagtctgtatgcataactgaagaacttgtatactagagagctctcgtagtacttgttcttcactatcacttggaagaattttgccagtatacaaagtattagtagaactaaagtcctttttatactaaagccaagcgcaaagtttgcgagcaatatggctacggctgttaagacaagagtgtgcatatcattgtccaggtatagagagtttaaaacatttgatgatgtagtcgttttggtaccttgcgcctctagcttcttaattagctcatatgactttgtatcagctaagacatctgtatccatgagctttcttactatactagactttgactttttatccttcatcttgaaagtcttataagtaagtgatgagaagtagcttctctttaaaaacgcgtatatacttgtgattaatcttacgaaaaaactactcttcatcaacatcaagtcctattaagaaggattccatgcttatatatttagttttgatactgtacttaacgccggctctaacttgttcgcccatagcccagtatgcgttggcatcgtctttaagagttgcttcaacagtgatagctacgtcatacttaccagggacaggtctaaatacccagtctccatccttattaagagcttcttggtgagatattgtttcaagcttagtgatcttaccgataggaactgatctgtcagtccagaataggtcgtcgccttcgtgtagcgacttaagtgttatgtcccttacgtcttgtatctcaaaagttagatttgcctttctcatcatcttactttcatcaggctttataaagtatctcttagctgcaaagactatcgcaaagactaaaacaactatgattaataagtcaatgatatttattaagccaaacaattttccttttttgtcaataatgttcattatgtgcctcctagttaaaatttatcgttaatattatacattatatgcacttaaaagtaaagatgtcatggcgtttcacaagaaaaattatgcagattagatatatttacatgcactttacataatttttatactattttaatggctttagtgatataattatgacaatagtgatataggaggtaattatggatactgttatagaggtaaggggtcttgttaaaaaatacaaggagctcactgctgttgacaatttggatttggacgtaaagaagggcgagatacttggtcttcttggacccaatggtagtggtaagtctactaccataaactgcatattgtcgctgcttaagaagactagtggcagcgtaaagatatttggcgaggagatgaaagctgatgcctatgacattaaaagaaggataggcgttgtttttcaagacgtggctgtttatgacgagctaagtgtttacgagaacatcgactacttctgcggtctatacattagtgataaggctgagaggaaggagcttgtacaaagggcaattgaccttgttagtcttaacgatttcgtgaaatttaaaccgaaaaagctatctggcggtttgctaagaaggcttaatattgcatgtggcattgctcacagacctgagattatcattcttgacgagccgactgtggctgtcgatcctcaatcaagaaacaatatcttggaagggattaaaaagcttaacgatgagggctcaaccatcatctacacttcgcactatatggacgaggttgactttttgtgtgatgatatagtcataattgataagggcaaggtcattgcaaagggcacttctgaggagcttaaggacatgatcactatgaatgaaaaaattagctttacatcgaaggaacttaatgaggagctcattacaaagatcaaggctcttgataatttgcttagctttgagaacaaggacgactctgttaaactaagcttctctcatggcgatggctacctaatgaacttaatcaagcttcttgatgagaataaaattcactacagctctctaaatgttgaaaagccaagtcttaatgacgttttcttggaattaactggcaaagatttgagggattagtatgtggctgcactcatttaaaaatacatttagataccttttaaggcagagggcaatgttattttgggctttaatatttcctatagttctaggagtattctttaagcttgcctttggtaatatcacacagatggataagttcaagaccatagacgtggctgtgaatgaaaaccttatgaaggatgagaattttaaacgttttatgaaggagatggaggacgaggaatatttccatgtgactgaagctaaagacaaggatgttttggacgaaaaagatgctcctaaggcctacatcgaatcaatggacaagatttatactaagcgctctggcatttctgagactatagttgagacgataatgaatgtgtattcacaaaagttctctatgatagctaggataatgcaaaaggatccgactactgatttaagtaaaattgtgggtgtggatgatcatataaaagatgtttcgcgtaaaaatatggatatgacaaacacgtttttctacacgcttcttggtatgacggcaatctatggctacatgtggggtatgtttgttatttatcaatacgaagcaaatctatcgactaatgcaaagcgtaatgtaatttcgccaacaaagaagagcactatgctatcggcatcgcttttggtcagctggattattaacttcgtcataatattgatatttattatttatttaaaatatggtctcggggttgactttggcggtagagcccttccacttattgtgcttagcttactagcgtcactaagtggtgttgcctttggcgtcttgcttggcgtttcaaataaggcaagtttagacacgaagattggtttaggcatcgccataactatgcttatgtcgtttttagctggtatgatggtatcggacttaaagataattatcgctgagaaggcacccatcatcaacaagttaaatccagttgcaatagtgactgatgcagtttattcgttatactactacgattcgatggcaaggtttaattgggatatgattaatctagctttgattactttgttattcgtagtggcttcactatttttcatgagaggtaaagaatatgaaagtctttaaaaattattttaaaatagtatgggctcacaagacagccatcattctttatacaatcatttttgctgttattatgagttttagcacaaagggtacaaaagaggcctcttataaaagtattgatgtaagaatatatttaaaagataacgccaagacaagtctttctaaggcgctttgtgattatttaaagacttgcacaaagcctatcgacatggacgaatctttggtagaagacaagcttttctacgccaatattagctgcgcaattgaaatacctaaggactttgatcaaacgaagaaagttttatttaaggcggcaccagatgagatgtacggcatgagcgttaaggagaaggtcaatatctacttaagtcaagtagatgcatacgaggcggcaggctttagtgaggatgatgccattaagtatactaaagaagatttggataaaaagtttgatgttgagataaaagaaggcagcgtcgatactaagagagataattcacgcatttactttaacttcctaaattatgttttacttgcgcaagccatcatggttgtagcgaccatagtcaaagtctataggaaaaagcctatacttatgagaaaccttgtatcgcctatgccaagaacgaagattaattttcagatgatgctcggccacatcgttacgggactgttcttatggctactatatatgatacttttcgtgcttatgtataagtatgactttactaagacgcacgtcaacctcatgatgcttaactcatttatatttacgattacagtagtagccatgtcggtgatgatagcaaatctaattaagagcgaaaatgccatctcaggcgtgatgaatgtagtctcactcggctcgtcattcttgtgcggttcctttgctccgcaagagctgcttggtgatacagccttgacattaggaagagtctttccaggcttttactacattcagagtaacgacatgcttatggagaagccagagtttagcactatgcttccgaatgtattaataatggtaggttttgcagtggtatttatagtggtgagtatagtggcaagaccaaaagcaaacgacaacgtaaactaatttcacaataaaatgcgcccttgagctcgttccttcctcggcaatgctcaggtacattcgtacattccgcttgcctcgtcggtccacatcgctcaatcatcacagtgcgaagtaccaaggttcacgggacccatccaaagcttgctttgatgatgggtgtggttcttcttttctccgtgaaattatgcgtatataagaaattgaagagatataagagaaaaaatttcgctttcaataaaatatcttagcgttcacagcaatattgtgggcgctattgttttgtgatataattaagacaaataagtatatcaatgcagagggaggtattattatgggacaaataaaagtaacaggcaagggcacattatcattaaagccagacactattgtcgtaagatttacatcaagcgcggtctacactggctatgctgagaccatcgccaaggcgagcgaggcgactaaggacttgaaagctgtcattgcaaaggcaggcatcgatggcgagcttcttaagactgcaaaacttgatgtaagtccatcgtatgatacttggtatgacgataaagaccatagacatagaaagtttattggctacgagtacactcataactcgaacatcaagatcgataatgacaacaagctcttaggcaagcttttgtatgaggtgagcacttcgccacttgatgtggaattcgatataagctacactgttaaggacatggagaaggctaagaatgatttgcttagagaagctgttaaggacgcgaaggaaaaggcggaagttttgagcgaggcggcaggtgttaagcttaagggtatagaggacattagctactcgtggggcgagcttaaaatatattctcagccgctaagcctagaagcgtatagcttaaaagctgcaccatcggagtcattcgatatagacatagacgctgatgatatcgacgtaaacgacactgtaactgtagtttgggagatagactagtgaaattagttgagatagatgaaagctatttaacacaaataaaggctctttacgaagaatctggctggagtgcttatctaggcgatgacgcaaagcttagtagggcgataaaaaattcattgctaacacttgcgtatatggatgaaggcgagcttgtgggctttgtaagatgcgtaggagacgctgaacacgttgtcttagtgcaagaccttgtcgttaagaaggcatatagacgcaagggtcttgcgaaaaagcttatgaaggaagtttttgaaaagtacaaggacgttcgctggatacaagttaataccgacggcgaagatgaagtagcaaatgctttctacaaggccatcggcatgaaagatatcagtgaagcgggcgtagtgagttattttatatagaggtaagaaatgataatcatagaaattttatactttttaataatgttttcaattaaaggagtctctagtccagactctatgctattttttactacaccattgattgtttttactgtctttggtctagcagaatttattctgtgggcaagtaaaaagtttgataaggatagcaagtcaagcaaaataaaacttgtattttatctcgcagcaaccatgcttatgatatacattaatgtaacattagtcgcaatgagcttaaatccaagagcttaaatgttttttagggttagaccagtggtctagctctttttttatacagcttatataattttaaaatatcagagaaaaatatatataaaaaaatcttatacaaacggctgaaactattgaaaaatctaatttgtaatgggctcactcttgtgctatacttaagtcgatagtgatatcgacataaacacgaaagggagggtttattatgaattcatttgaaagagcaagggaatttgcaaagaaatacattgatcccgttgcaaaacaattagacgaagaagcaaaatttccaaaggaaatttttgataaactaggagaagaaggtttctttaaggtaatgatacctaaggaaatgggcggtgaaggcggtactataaaggaccactcacaaatctgtatggctcttgctgaaagctgtgcatctgttggtttatgctatatgatgcataacgtagcacttatgtgtatcttagctaatggtaatgacgagcttaaaaataagattgttaaagaaattcttgaagataaaaaattatgtgcacttgcatacagcgaatttggcacaggaactcacttctacatgccagagatgggtattgaacacaaagaaaactcttgtgtattaaacggttctaagtcaatggttacttcagctgaatacgctagctactacttagtattagtgccttctaaaaaagaaggagaaatcgataactgggtaattcctatagataaaaaaggcgttcattttgaaatgaaagcttggaacggtatgggtatgagaagcaacgcatcttgtccaatgcttcttaaggacgttgaacttgaaaatatgtatagaattggcgaatggggtagcggtcaagcacaagtattctcagttgttgcaccatacttcatcttaggtctagcaagtgtttactcaggtctaggcaaagccatctctacagcagctaacgaacacgctatgaagagaaaatacccttcaggacaatctcttgcaaacattgaaacagttcaaatacacttagctaagatttacaacagaactcacgcagcagaagcatttacaaagcttgcagctgaaaaggctgaaagaggcgacgctgatgcagttgttgacatcatcgcagctagagttaacgcaagtgaagcagctattgagacatctatcgatgcaatgagagttgctggcggtaagggctataacaaacaaaaccctatagaaaaatacatgagagacgcatatgcaagtcaaatcatggcaccatcagtagacgtgcttacaatttggcttggtaaattgatcacagatcaaccaataccataggaggaaagatgactaataaaattaaagttggagcagttctttatgatccaaaagttagtatcatttgggatatgatccacaaattttttgaagaaagaggcatggaagttgaaggagtttacttcaaggactatgacttacaagtagatgctgttgttaacggcgatattgatatcgcttggaactcaccattagcttggttacaaactcaaatcaggactcacggaaaaagtgaaaatggtcctatgagagatacagatagagacagaaagactatctgcctagttaaaaaaggctcaggcataaaatcttttgaagatcttaagggcaaaaagataggcttcggcgcatttgatagccctcaagcaagacttattcctatctattatttaaaaactaaaggcttagaatatggcaaagactacgaagaagtaagatttgacaagggtgttggccttaacggagaccatgttggcggcgaacttgacgctgtgaaagcacttgaggcaggcgatgtagactgcgctttcactattgatttaaacttcaacgcttggtcaaaggacggcactatcgatgcaaacgctctagaagttttaggcgaaacacctcacttcgatcactgtatattctcagctcgcgtaggcttcccatcagaagacttcaaagcttgggctaagatacttcttcaaatggactataatgatccagaacacaagaagattatggaccttgaaggccttagagaatgggttgaaggcagaactagtggttttgaacaaatcactaacgccgataagtatttagacttcttcggcaagtatcgtgactagggcattctccacttcacttataggaagcatgccaagaaatgaagatatattaagggcccttagaaagagatctaagggttctctaagtgaagaggattttattaagttaatagatgctgaggaagaagccgtcctacgcatgcaagaaaaacacggcatcagctacgtcacatcaggcgaattatcaagagataactacgtttcatttatatcgacaaagttaaatggcgttaaaatgatgtcaatgtctgagatgcttgagtacatcgacgataaaaaagcatttgaacaaatactttctatacttgacgttccagccataagcataaaaaacgcaatatgtacaggaaaagtctctcgtaagaccaatatcgtttgtgacgaactaaagagactaaaggcaagaactgatcacaaggtaaaaatcactttgccaggaccctatctagtaactcgctcaatgtggctatataacttatctagcaaggcttacggttctaaggaagagcttggcgaagatgttatcaagatttataaggaagagatagaagagcttcaaaagattggcgttgacataattcagtttgatgaaccagttttaactgaagtcgtatttaccgaaggaaagccgcgtaccttcatgtgtgcagcgctttcagaaaagaaagatccgacagaggagctaaaatttgcgactcacctaattaagtcatgcatggagcatatcgataggactaagtcgatacgcgcgcttcacgtctgccgtggcaactggtccaaggacgagagcattttactagaaggaccatatacaccgctaatcaaattatttgaagacatagatacagacgcactattccttgaattttcaacaaagagagcaggcgagctaaaaagcttatttacttcagacaaaattagaaaaaattatatcctaggtcttggcgttatcaatccaagaactgatgagattgaatcgcatgaggatatggtcaagagagccgaagaagcgcttggctatattgacaaagaaagattattcttaaacccagactgcggtttcgctacttttgcaaatagacctgtatcaacacttgaaataattgacaaaaaattagcagagcttgagacagcagttaaagaattgaaggaaaaatatgagtagctacggtaattttaatagtacggaagagatgggccgctttgattttacgatgagagcgacatcgaacgacatcaaaaccgttaacagctacggcgacatggccttcatatcgacagaccaagagctgccatacgataacgagaaaaaagaattatcgtcggtggagatatttttggcaggaattttggagtcgatgatgctcacaatcattagagaagccaaaatcaagaagctttcactagatgagatagaagcaaaggcagaagtaaagacgacaaacccacttcgtacgctaaaagtagttggcgttgatgatgcaccgcgcatagacgagattaagatcaaagtgtattattatatagacgatatcacaagagaagaagcagataagtttatgagagatgctttggatatggatatggtttatagcggagtgaaaaagggatttaacatagagacagaatttatatatgagctatagaaatcaaaatagtaggggcagatgctccctactatttttttatcttataatacacggcaaaactataaatatattcaatatcaaagccatttgctaatgggtaatacataatcgaagagaataaaaatatataaatggaggtaattttatggattttaacaaagaaagagaattaaatggtgctatgaacaaagagctagtcaattcagcgccagaaatcatgaaagcctttggtgacttgcatgctgtttacacaaaagaaagcgctgctacactcattgaaaaagaaatggttgctctaggcatctcaatcacaatcaagtgcataccatgtatgctagctcacatcacaagctttaaaaaagcaggcggcacaagagaacaacttgttgacgttatcaaaacttgtatcttgatgaatggcggtccaggaactgcgtatggggcaaaggcgttagcgatgtatgacgaactagactaaatttcacgttaattttgcgttaaaattagcccttgagctcgttccttcctcggcaatgctcatgtacgtttagtacattccgcttgcctcgtcggtccacgtcgctcaatcatctaatttttcctgcaaaattaatacatagtgaataaaaagatttagatttcataaaacagatttaaaagtcttgtggcaagtccataagacttttttcatgcttatgggtatatataattgaaagaatatatattaggaggtacttatgttttacgattataaagttaagaacatattaggtgaagaagtttctatgtctgagtacaaaggcaaggtagtgcttatagttaacactgcaagcaagtgcggctttactaagcagtacgaaggtcttgaagaattatacgaaaagtataaggaccaaggctttgtgatcttgggctttccatgcaatcaatttggctctcaagagccgggagacaatgctgagataaaaaatttctgcacatctacatttagcgtgactttccctatgatgtcaaaggtcgatgtcaatggtgagagtgcagatcctttgtacaaatttttgaaaaaggagcaaggcggcatacttggtgacgagattaagtggaacttcacaaagttcttggtcgatagagaaggaagggttgtagatagattcgcttcacaaaagacacctaaggcacttgaaaaggaagtagaaaaactattgtagcagtaggactataatctatgtagcactcatatatatgggtgcttcttttttttatgaaaagctttgtagcaacttagcacttttcttgcttaagtaagtaaacctattgcaagttggcggttcatatattgcatatgatactcacaaagtagtattgtatgcacatatttgcaaatttttatataaaaatttcaaaaagacttgtcttttataacataaagtgctataatatataaaagagcttccacttgataaagtgtaacatagctatcgtgactattagtaacgccattaagttaatcaaggcggaggagttacttcacgagattaaggctctttgaattataacttaagatccgttgaaattatcttaagctaagaggacattaaagtacgaggaggttttatgatgaaaagagtacttgcgatgttaatcgcgctaattatgatgttttctctagtagcatgtaacaaaaacgatgcacctgctactgacgcaaacaagactgaaggcgaaaaaactactgaagctactgatggcgaagctaaagacggcgaagctactgaagctagtgattttcacatcggtgttgtaactggtactgtatcacaatctgaagacgaacaacgtggttgtgaagctatgatcaagaaatacggagatgctaaggaaggtggacttatcgttcacaagaactatcctgacaacttctctgctgaacaagaaacaactatccaacaaatagtttctcttgctgacgaccctaagctaaaagttatcgttgttaaccaaggtgtacctggtactgcagcagcatttaagcaagttaaggaaagacgtcctgacattttctgcttcgtatctaactctcaagaagaccctaaccttatcgaaagcgcagctgacttagttatcgacccagataacgttactcgtggatatttaatcccactagctgctcaaaagatgggtgctaagaaattcgttcacgtttctttcccaagacatatgtcaatcgaactattgtccttaagaaaagatatcatggaagcaacttgtgataagatcggtatggaatttgctatggaaactgcaccggacccaacaagtgatatcggtatcccaggcgcacaaaacttcattttggaacaaatgccagcttgggttcaaaagtatggtaaagacacagcattctttgcaacaaacgatgctcacactgaaccaatgcttttaaaaatcgctgaattaggcgcattattcgtagaacaagacttaccatctccaatacttggatatccaggagctctaggacttgaccttaaagacgctgctggcgacttccctaagattgtagaaaaagaagaagaagtattatctaagaagaaccctggtagaatgggtacttggacttattcatacggtttctctacaactcaagctctaatcgaacttggtaagagaatggttgaatctggtaaagacatgatgaacactgacgacgttgcagctgtattatctgacatgactccaggtgctgcttggaaggcaactgtttacaaagacagaacaagcatggaagaaagaaagaaccacttactagtactacaagacacttacgtatttggtaaaggtttcttaaagatgactgatgaagaagttcctgatatctataagatgctagaagattttcaatctaagaaatagacatatttgattaatggacggagcggcttcatgctgctccgtttaacattattggaaggcgaggtttttatgggcgagttattagagtttagaaatgtaggaaaaagcttctccggtaaccatgttttaaaggatgtttctttcaaacttaaagaaggggagattctaggacttgtaggagaaaatggtgctggtaaatcgaccatgatgaacatactctttggtatgagtttcattaaagagactggtggctatgaaggagatgttcttatcaatggtgaaaaggttaacttcaaaaaccctatcgacgcactaaatgccggtatcggtatggtgcatcaagagttttcattgattcctgaatttactgcaacagaaaatatattgttaaatcgtgagattactaagaagaatccaatctctgctatctttggtaagcaattggaaacattagagagatctacgatggaagagaaggcaaaagaagctatcgaaaagcttggagtagatataaactcaaagactttggcaaaggatatgccagttggtcacaagcaatttttggagatagcaagagagctttctaaagaaaaagtaaaattaattatcatggacgagccgacagcggtactaactgagtcggaagctgatatactgattgacgcgatgaagagacttgcaaagaaaggtatttccatcatcttcatctctcacagacttcgtgaaatcatcgatgtttgtgacaaagttatagttcttcgtgacggagaaattattaaagatactgaaaacaaagaccttaatatcatggagatagcaagctggatggttggccgtgatatgtcaaagaaggaacaggctaaggagcttagacagatcggagacgaaactatcatgaaggttgaacacctttatgtagatatgccgggtgagtcggttcgtgatgtttccttcgaagttaagaaaggcgagatacttggagtgtgcggtctagctggacaaggcaagcttggtataccaaacggtatcatgggtctatatccatcaggaggcagcgttacttatgaaggtgagccgttagatatcgcacatacaaaggaagttttgaagaagaacctagcctttgtatctgaagaccgccgtggtgttggcttacttcttgacgaaggtattgactggaacatagctttcgatgcaatgatggtcaacgatagattcactaagaaagttggtccatttaagttcagagacgacaaggcgatgaaagaagccgcacttaaatacattgacgagcttgaaataaggacacaaggtcctagtgaaaaggcaaagaacttatcaggtggtaatcaacaaaaggtatgtttggcaaaggcatttgcccttgaaccaaaattcttatttgtatcagagccaactcgtggtatagacataggtgcgaagtcactagttcttgaagcacttaaaaagtacaacagagaacacgacacatccatagtcataatatcgagtgagcttgaagagctaagaagcatagctgacagaatacttgttatatttgaaggaaaagtttttggagagctattacctacagatccggtagagtactttggactaatgatggccggaactaaaccggaggaggtgtagaatatgagagaagaaagttttgttaaaaaagtaggacttcctagaataatcattttctttttcatagtaggacttttcatagtaggatcctttataggtgttgaccttaagagatctttcatagacgttctaacacgtttcggtatgaacgcaatactagtattatcaatgatacctatgatacaagcaggctgcggacttaactttggtttgccagttggacttataggtggtatgctaggcgcagttttatccttagagttaagactaacaggatttggcggcgtaatgtttgcccttggtctaggaatgcttttcggagcaatctttggctgggtatatggtttaattttgaatagagttaaaggcgacgaaatgattatcgcaacatacgttggtttctcattcatcgcactaatgaatatattctgggtagtacttccatttagaaatcctgaatcagttatgggtttcaacggtgaaggtttaagaacaactatatccttaaaggcatactgggagaaagccttctctcgtatacttggtatagaactacaaacagcaagcgagctaggagacaaattacttataccaacaggtatgttcatagtcttcgcaatatttgcatatttagtttatttattcttcaaatctaaaaaaggtacaacaatgacagctgttggctcaaacgaaaactacgcaagagcagcaggtgcacacatcaacaagacaaggatgctagcagtaatcctttcatgcgcaataggcgcagctggtatggttatctacgaacaaagttacggcttcgttcaaatgtataacgcaccacaattcttcgctttcccaagcgttgcagccatactacttggcggtgcatccattaagaaagctaatataaagaacgttttgataggtacactacttttccaaggtatacttacaatgacaccaacagttattaatacagcaatcaaggttgatatatcagaagttttaagacttatcatatcaaacggacttatactatttgccttgacacgtaaggagggtggaaaataatgaaaaagcgtaataaattctttacagtaaatgaatacaccgttcctgtgatgttcatcatcatatgcgcgataggtataatatttagtagattcacaccacaatttttgatctcacaagtagttataagatttgcaagaaacgcctttttggtactttcattactaatacctatagttgccggtctaggcatcaactttggtatggtactaggagccatggcaggacaaatcgcacttatctttgttgagaactggggcataacaggactaccagcaatactaattgctgcactagtttccatcccaatctccgtagttttaggtttgttcgcaggtggcgtactaaacaaagcaaagtcaagagaaatgatcacatccatgatactaggtttcttcatgacaggtatctaccaattcttcgtactatacatctttggtggtatcataccatttggcaacaagagcctaatactatcacgtggttatggtgttagaaacgcaatcgacctacaaagtcaaaaaggactagataagttattagatagaatcgttggccaagacctatccatattcggagtacaactaccaattgctaccttcatagttatcatactagcttgtcttttcatagtttggtttagaaagacaaaactaggacaagacatgagagccgttggagccgatatgaagatagccgaagacgcaggtatcaacgttgacaagacaagacttaaagccatcgtcatctcaacagttatggcagccttcggacaaatcatctacctacaaaacataggtaacctaaacacatataacggcgcagaccaaacagcactatatgcagcagcagcactactaataggtggagcgagcgtatcaaaggcgacaatcaaaaacgcccttgttggtacagtacttttccacttgatgttcatagtaatgcctacagcaggtgctaacatcacaggtaactcaatgataggtgagtacctaagaacattcatctcatacgcagtcgttacagttacacttatacttcactctataagaagaaagagcgaagcacaagaacaaatggaaaaattaaaagacgaagaaagcaaaaaataaatttcttctttaaataataccgaagatagggtgctgacatgtgttggcactctattttcttttgcataaaactcttgacatatgagttagcgtatgctaacatatactcaatattaatgtttttaaacaaaggagggctattaatgaggttttctatgaaaaaattacttaaaaacaaaagttacttaagttatttttttgcaagcgctttgtcgatgggtgcgtcaaatattttgcagtttgctttggctctatacatcttggatatgacaggttctcccttgatttacgcctctatactttctataatcataattccaaggataatattgacacccatagctggtgttttaggtgacaggctaagacgtatagatataatgaaggttttaaactttgctcaggctcttcttatgctaatatatgcgatatttgcaattttttacaaaaatatttctcttattgcggtttacgctcttgtagttcttcttgagatgattgaggttttttacaatgcggcggaaaattcaatactcgctgagattattgatcaggatcttatggaggaagctgtcgctttttcaaaagtggatgatggcattgtctatgtgactacacctatgcttgcggcatttatctacaagcaatttgctttgagtggatcttttattttggtttgtgccttgatgagtttaacatttattttgaatttcttcatagaaacgccttttgaagtcaagggcaatcacgacggggaaaattcttttaaaggctattttactgattttaaagaaggtttagttgagctaagcaaaaataaatttgcaaaggtctttgttgttgtagctcccttaataaatttttcttttgatgcagtttgttcagtaattataacttatgtttttttagaagtttttaagcttgatgaatatgtttatggcgtctatagaacgataactgcattagtgagcataactctaccatttattatactacctgtagttaaaaaatttaagccgctaaaattattgaagtgtgcttctttatctatagccacatgcatctttttaatgggagcagctgtttactacggcagcttggatttggaaaataatgtgattattagcgttatcttgataacaatttttgactgcttaataattagttcagttatgccgcttaatatagcgacacaggtttttttccaaaagaatgttaaggatgagtacagaagtaggattttatcagtgcttagaatgcttgttctatcatcgatacctcttggcaatatgttttatggatttctagcaaatacatttgaggctcatatatgtatctttgtcggcagtttggcagtttttataacatatccacttattttatatctatcgagagaataaaaacgcttgacatattagttagcttgtgctaatatattcttaagtcgttagcccacgctaacgctttgtaaatatttatagagaggaagagtgccatgtgcgaggtgaagtttgagagcatcttagcaaatcactgctcacctgtccttatggggactaagctatcgaatttaatatctgtttcgaagcaggacgcaggtcatggcgatgagcttctcaagaagtacaaaagtgcatttaagacttatggcattgccatagaaatgctttgtgagtgcgacgagagaatgcaactttttgtctacaatgaagaaaggcttaggaggcatctacataaggagagtatagcgagctttcttatggactacggttacagtagtagtgacctaagtagctgtctagctgtgcttaaggctaagcttagacactttgaatttcctcacgagattggtatctttttaggttttccgctagatgatgtcagaagctttatcgaaaatcaaggacaaaactacatctactgctcttactggaaggtttatcacaatcccgaccttgctaggcgcaccttcgacctatatgacaggctcagagcctttgttaagtctaggctcgatgagggtgactctatcgaggtagtaatgcgcgatgtttacaagagttctaaaggactacacgatttattgaatgcttattaatactttgtgggtagagagatctatccacttttttcttgctattatcacgaattcattatataattatcttgaggtgttcttatgatattgatagttgaagacgataaagacataaacaatttaattaaggagctcttaggagagcgtgggtttgaaacgaagcaggtctttgatggggctgaagcggttgactacctaaagaataatgaggtggacttgatgcttttggaccttatgatgcctaagcttatgggtgaggacgtgattaactatgtaagaagccgtggtatgaagatgcctatcatagttttatctgcgaagattgacaaggcgactaggcttggctgccttgaccttggctgcgacgatttcattatgaagccttttgatactgatgagcttataagtcgtgtgagggctcagctaaggcgctctaatgcatacaacagactcggcgagaaggctgtgcgcttcgaggacttctaccttgacaatgacaacaacgtcataagctttaaggaagtgccccttaatttaacgcgcatggagtacaagctattaagactattgattgaaaatcctaaaaaagttttcacaaaggagaacctgtatagatctgtttgggaagatgacatctactcagacaacaccatcaacgtgcatatatcaaacctcagaaataaactaaaggagattgacccggatcataagtacataaagactgtttggtccataggttatatattgaaatgataaattattttgaaaaggcaagcgagatacttgacgggctctatggcacggctaagcgcaagcgtgacatgactagcaatgagaacatgaagaggcttgtggagatttttgggatagatctaagtaagcttaacgtgattcatgtcgcaggtactgttggcaagggctcgttttgcataattttggacaatattttacgcgaggcgggactcaaaactggcctctatgtaggaccatcgatagagggtatgaacgacagaatacgcataaacggcgccttcataccaccagaaaagttctacacttacctaaaaactatagttgacaagattacagagctcgagatcaactgcatctacttcgaggtagtcactctcatcgctcttatgtactttgctgacgaaggagtggactttgccatcgtcgaagtgggggttggcggtctatatgactcgacaaactgcttttctacaaaggctgcggacgtcataatgaaggttgactacgaccatcagaatgtgcttggcaacactttggaagagattgccttcaacaaggcaggcatcatcatgccgtttgatacggtctacgtttatcctcaaggggacaatgtcatagaagtcattaaggacgaggcgaagaaggttgatgcgaaggtaaagcttatgccagctgatgtagatgtagaaaaaactgatacaaagacaagctttatatatgatggcgaggagtacactgtaagccttgcaggcgcctttcaagcgacaaacgcggccatggctgtgtgggtagcaaaggaccttgccacaaggtttagactcgatatagatgatgaggctataaggaagggcttaggcgaagtaaagtggccttgccgcatagagactttgaaggaaaagccatacatcatcatagacggcgcgcacaacgagataagcgctgctgagctaaaaaactacctaatgagtcttggcaagagggtcataatgattacttcgtttttgaaggataaggactacaggaaggtcttccaaactttcgagggtttgaaggcagactttatactaacgagccttgtcttcaaaggcagagactttgagttcgaaaagcttgaggaggccataggcgaaagagacggcatctactttatcaaagacaacaaagaggcatacgagaaggcgcttgagctatatacagatgactcggtgatagttgttgcaggctcactctaccttgcgagcgttttcagagatttaatcacaggagaaaagcattataattaacgaacctgggtatatagtctaagaaggggtgattagatgaaattagtatttttgataggctcacaaagagagggctcactgaataaactattagcaagggaagtagagaaggaatttggtgattacgagatcgttgagtactacccaaacgattttaaaatgttcaatggggatcttgagaagccagaagaagcttggataaagaagattagagaggacataagagaggcagaaggagtcatcatcgcttcacctgagtataactactcagttccaggaacagttaagaacatgatagactggctatcgagaccaaatgatgaaggtaagtaccttataggcggcaagaaatttgctctactaggagtgactatggggcttgatgcaacaaggcttgcacaaaaagaattaacagcaattcttcatcaactaggagcacatattgatactaagaatatgatcagcgtgccattcgccgatgcacaaggtaagttcgtagaggagaacaaagagagaataaagaacttcgctgataagtttaaaaagtttattaaggcttaaagctatgcatatagagctgcgcggtgcggctctatttttatatgagaagtgacaaagttctatgcaaattatttattaaaattatgtaaaagaggtgcaaaatatgttataattaaacatagttaattaagcctaacggcacaaaggagacgaatgaagtgaaagacaaaaagctgaatatagttttcggcatcatatttttaataaatgcaattttttattacaacgtatatatatacaaggtagctttggaattaagaccaaggcttattttattgctcgcagcagtagtactaacatctatgatagacatatcagtcctacttgccttcaagagtaagacatataaggtggtagtcgcctctcttatagggctactaagagttgcagcaagcatattctacgcagagtttgcgaattttgacatactttctagaacaggtcaagccaaggaacttaagggtgttggcacagagatcatgcacaagttcaacatcttcctacttatcatttgcatacttacactagtaaacatatatttgataataagcgcgcgcataagaaagagagacgaaaagtataaagacactatatttgagatagcgtttaggtgcgttatctcacttatcatagcaggcatacttgtagtcgtaccgcaaagctttgccaagggcatcttcggtacagagctcttctcaagcatcgctctaagcaatattaaaagagagcttgcagagaaagagatgcatgatgagggtattgaggacgacatagccctacaatttagcaaaagagagtttaaaaataatgagttcactggcattgccaaagataaaaacatcatcataattcagtgcgagagcttgcaaaataccttcgtaggtagagagtataacggccaagaaatcacaccatttatgaacaagctcatcaaggagaagggcagcatctactttgacaactacttcgaacttctaggcatgggcaacacctcagacgccgagttcgtctcaacaaacggtatattcccgtctctgaacggacagtcatacaagctcttcgaagacaacgagcactacggactactcaagtcttcaaaggattacggctacactagcatggcgtttcacggcaatgttggaaagttctacgatagagagcatttctacaagaagatgggcatagaaaaaatctatcttggagaagacttcaagcaagatgaaatcatcaacatgggtctgtcagacaagtcatttttcaagcaatccatagaaaagtacaaagaactagcaccaaagaatgagaagttcttctcactcatggttacgcttacaacacatacaccattcatactgccagatgagctctcacatatcaagccgaaggcaggcgatgaagacgacttcgtgtataagtatgcaaagtgtgcaaggtacacagacgaggctatcgaagactttttcaaggacttagatgagataggtctactaaaggattgcgtcatcgctatatatggagaccaccatgcaatgtcagttaagaacccagaccagctaaactcaattacaaagtggctaggtagagagattgactacgacgagatgatgaacatcccattattaataagagtgccaggacttgataagaacgttcaaaggcacaacataggaagccagctagacctatatgcaacacttttaaacctactaggctgggacagaactaagtatccaaacatgggcatagacctacttggagatgatgaagagacagaaaataacgtcgtcttcccacaaacacacttacttaaaggaagcttcattactaaggacaaactatttgagtatccaagagacagagtcttcgagcacggccgctatattaacagaaaaacaagagaagtactgaatgtagaagatgcaagagagctttccaaaagagcggtcatcactacagattactcatacagccttatgaagtcaaactcacttatgaacctaatcaaagcaccagagaagcttgcatcagataaaaccatactcatgggtggaggcgagctagaaggtcttgcaagaagcaacgtccttgacgccttcgagtacaactacaaaagaggaaaacgtaagttcgaagttgacctttccaagaccacagacggtaaatatgttggactagaagactgggacggcatcataagaaggttcttcgttactaaagatacaaagatgccagaagtcaagagacttagctacgaagagtttaaaaatcttgtgccactacgcgatcgcaaagccatcgacctagatgtgctagcaggctttatgaacgaaaaacaagatacagaagtcttcatatgtacaaaagacgataccaaagagctacttagctatataaaagaaaactacgaaggacttatgaagcgcttaacagtagaagttcacagtaaagacgagtacaagagtgcaaacgattttggctttaaaaacattgtctatagcctagaaaacgcaaaagacatagaccttgagctcaaagagataaaagacttcaagctcacagccatcgctttggatgcatcaaagctagatgaagagactgcgaaaaaattagtagcaagcggtcacaaagtctacgcatataaagtcaataccaacgagctagcagagaaattattcactcttggcatcacagccatatacacagataagctataagcttaacaaaatcttaacaaaattataaagagtattgaaaaacattgtaccttgtaatataatatgagagtacaaaaggagaatgattatgagaaagaaatttgtcatttccttcatcgttgcgcttatagcattcagctttgttttttacaaggcacaaaagaagctagacagcggtgcaggacttaataagaatatagaaaacacagaaaatgaagacgcacacgaggagaacaaagagagcgaagaagagctaaaccctgtcttccccgacgaccaaaaagtgcttaaagaagagcacggcaacgaactttgcttcatacttatgggtatagacaaaagagacgcaggacaacaagagatgaagggacaaagatcagacactatgatgctatgcaaagtaaacttcgacgacggctcaatcaagatgctaagccttcctcgtgacagcatagtaaaaattagaggcaaagacgataaattaacacacgctcactcatacggaggaccagcactaacacttaaagcagttagagattggttaaagctcgacgttcgttactacgtaagagttgactacaaagcagttgaagagctagtaggtatagttggaggcgttgagtttgacgtgccagtcgatatgaactaccacgacacaacaaaaggtaacgaactacacatcaacattaagaaaggcaagcaaaccatcaccaaagacaatgtcataggtctactaagatttagaaaaggctacaacgacggcaagtatggcgtgcaagactatggtagacaaaagacacaacaagactttttgaaagcacttgcaaagaagatgcttagaccagaaaatatattgaagataggatcaatttggaagacaatcaacaaaaatgttaagacaaacatcccaggaggaaccatcgcaacatccatcttgcaagccggcataggtagagtacacgcagataagatggaaaccgcttcacttataggaactgaaggtcatattggaaagcttagtgcacaaaaaattcctcaaaaagaaattgatgagaaggtgtatccttggtttggagattataagtttagataataagaaggcgagagagccttctttttttgcgcaaaatatatttaaagttttcatcgcttcatcacataaaaatatatgaacaaatcttaacaaattatttatattttactattgtcatctgccactatatgtagtataataataattgcaataaggagaagcaatcaaaatattgtggaggtaaaagatgtatatattcaagagaagcggcgaaaaagtgccatttgacgaatctaagataattgtagctattaaaaaagcgatgaattcttcaacaggggtgtacgaagaaggtcttgctgaaaagatagctgatgagatcaaaagggaagctgttgtagctgagagacctctttcgatttatgatatcgaagacaaggtttactacaagcttatcgagaacaagaaccctgctactgctagaagttacgaaaactacaaggctgttcaagcgtttaagagaaggataaacactactgacgagagcattattggtcttcttgacagaaagaacagtgacttaatgaaggaaaactctaacaagaacgctcacattgcatctactcaaagagatttgattgctggagaggtttctaaggacattgctagaagactaatgattgatgatgacttacttcaagcgcacgacgaaggctccatccatttgcatgatatggactacatcattcaacctatgttcaactgctgccttgttaatatgaaggacatgcttgacaacggaactgttgttaatggcaaattgattgaaagcccaagatcattccaagttgcctgcaatgttatgacacaaatcattgcgcaaatcgcatctaaccaatatggtggtcaatccatcgacataaaatgtcttgctaagtacttaagacgcagctatgaaaagaacatgaagcttgctaaggaaatgtttgaagatgagacaaagcaagacgaacttgcaagaaaacttactcaaagggatcttgaaagtggtatacaaactatacaatatcaaataaatacacttatgacttcgaatggtcaagcgcctttcgttactcttttcatgcacatggaagatgatttcgagtatgcagatgagcttgctatgatcatcgaagagattttaaagcaaagaattcaaggcatcaagaacgaatgcggtgtttatgtgacacctgcttttccaaagcttgtttatgtgcttgatgaaaacaacgttcacaaggattccaaatactactacttaacagagacagctattaggtgtactgcaaagaggatgtaccctgactatatctctgctaagaagatgagagaaaattacgaaggcaacgtttttgcacctatgggctgcagagcattcttatcgccatggaaggataaggacggcaactacaagtttgacggcagattcaacatgggtgttgtttctctaaacttaccgcaaatagctatcgttagcggcggcgatgaagataaattcttcgaaatacttgacaagagacttgacctatgcagaaaggcatgtctactaagatacgatatacttaagaacgttacaagcgattcatctccaatacactggagacacggcgctatcgcgagacttcatgagcacgagtctatcagaccacttcttcagaatggttacgcgactgtaactttgggctacataggcctatatgaagcgacttatctagtacgccatactactcatactgacgagcatgcgactgattttgcactaaaagttatgagaactatgaacgaaaagctaaactcttggaagagggaagatggcttaggatacgcactttacggcactcctgctgaaagcctttgctatagatttgcgaagaaggaccttgaaagatttggcgagataaagaacgtaactgacaagggttactatacaaactctttccatgttgatgttagagagaacatctctgtatttgataagttcaagtttgaagctcagttccaaacactttcaaaaggcggctgcataagctatgctgagataccaaacatggcaaataacttggaagcacttgaaactatagtagactatatttatgacaatattcaatatgcagaattcaatacaaagtctgactactgtcacgtttgcggctatgacggcgagatcataataaacgatcataacgaatgggaatgccctcaatgccacaacaaggatcaagcaaagatgaacgttacaagaaggacatgcggctaccttggcgaaaacttctggaacgaaggcaaaactaaggagataaagcaaagggtacttcacatataaatgaactacgcgcaaataaggaagtacgacatcgcgaacggccctggcgttagaacaacaatatttttaacaggttgcactttgaactgcaagaactgtttcaacaaagagtatcaaaactttcactttggacatgtttttgatgaaaaggcatttgaggaagttattagttgcttaagtgatgacaatatccgcggcctatcggttttaggaggcgagccctttgacaaccttgcaggccttaaggacttcataggaaagctcagagagaagacagataaagacatctggatctactccggctacacctacgaagagctcttagagaaggacggagccaaagatgttctagataagatagacgtccttgttgatggacgcttcgttgaagagctaaaggatttgaagctaaagtttagaggctcatcaaaccaaagaatcatcgatatgaagagaacacttaaagagggaaaagtattactcatggacaaatatatgaaggaagattgactagtcagtcttcttttttttaattaaaatattaaagtacttgacttattattgtaataatgtataatagaattaagaaacaaatcaaggagggttttaaatgaagaagaaaatttcattattattagtggctttaatcttaatagcgtttataccacaaatgacagcacaagccaagaatgttacagctttaaagtcaaatcaaaagtttgcttttacaagaggcgtagcttatggaagagatgacatagacataagctcttattctattgaaggaagcaattatgtgaaacttcgtgatgttgcagctatactggttggagagttttatcaatttaacgtaggctatgataaagagagaaacttagtaattgtagaaccatatattcactacaataagtcagaatcagacttaagtaaaattacaaataataaagcgaaagccacagtgagcaaaaagccgattttaataaatggcgaagaaaaattagtgaacatggcatatattaatggcaataattatatgaagctaagagatatagcaagcttgattggttttcctgttaagtatgaagaacaaagtaaaacagtattgctggctatggatactgaagagggtcaggaagcaaaagttatagagacatatgatttagctgatgatatggatattgataagattaaagatatttttgatgcttttattgagaacaacgaagcaaaggcagaaatggctggagaatctattgaagggtttaacatagatattagctttgaaattcaacgtgaagatttatatgaaaatgctgagaaattaggaatcattccttcaaaaaattacaataaagttaagaaaacagttataagaaagttgtcacctggtggatttagctatagcgatgaaataaattatgaattcgaatatgatgattatacaggtattaaattaactttatatgattatggagtaagagattatcagttattttatataaatccatatagaaaataacaaatagatcagaaatgcaaaaggagagtaaaagcgctctcctttttttatgccatatcgttgacaaagcggtgcctatggtgtagactaaagatagaattacattggaggtaaatatatgaaatataacgctataatacttggcacggatcacaactcatactcagttgcaagaactttttacgaagcatatggcgagaagccgatagttgtaggagcggctctacttgtgcctttcgttgcaagcacgattgcagaggtgcacatcgtgaaggacttttcaagcgatgacgatgtttttgtaaaaactttaaacgaaattgcaaaggcaagaagtgaggaggacttcatcttcttcgcaccgactgagcactatgtcgatcttcttgtaaggaatgaggacaagttcgatttcaaggcacatgtgccatatccagatccaaaggaagcggaaaagctcatacttaagtctgagttctacaagatccttgaaaagattggcgtagcttatccaaagacttttatagcgaagaaggataattacaaagaggtaaatatcgagggcgaggccttcctaaaggctgatgaatacaatgacttcatagagtcaaatgcgacaaatattcaaaagggataccacgcgatgaataaagacgagactttagctatacttgacgagatttacaagagcaactacactggctccatcatagttcaagactacatctatggcggacaaggaactgagtactcgcttaatggctacaggtcgcacgatggcaaggtgtccatggtcttagcaagaaatttattatcagacatgaggcctatgtgggtcggcaatcacttggtgcaagttgaccactatgacgatgagatgtttaatatagcagaaaaaattacctctagccttgattataaggggctcttcaattttgactttaagaaggatgcaaagacaggcaaagtttatacgcttgagatgaatattagacaaggtagaactttctactatgcgactcttggtggggtcaatctaatgaagattgcagcggatgatatgatacttggtaaatctgtaagtgaaagaacaaagagagcttttatgctcacagctattgacaaagatatttgcagagagcaccttgataaagaacttttaaaggacttcgacaagaaagaaagacaagaaaacacagctatacacatagtgaattcaaaggacgctgcgcctgagaggctagagagggttatgaacgctcttaagcgtcaagcggatgatttgtataagtagacttatggagatagagggatctatctcttatttgtaaaaaattcttgacaaagaggagaatttattatatactaacaaggtaaccttgctctttatttagtaaagagccatgagtccaaaaggaggtggaaagatgaaaaaatatgaagctatgtatgttttttatcctgaaacaagtgaggaagatagaaataaattccttgataggataaaagcagttatcgaagcagaagaaggtaaagtaactaacactgatgattggggactaagaaaattagcataccaaatcaaattcaaaactgaaggctactacttcttagtaaactttgaagcaaaagaagaaacaattttagaacttactagaattgcaagaatcacagacgttttactacgtcacatgatagtaacagacgaagataaataagaggtgaaaagatgaacgtatgtagtttaatcggaagattaacaaaggatcctgagctaagatatacacctagcacaaatcaagcagttatcacatttactatagctgttgataagggtttatctagagaaaaaagagaagagatggaagcaaagaacatgccaacagcagacttcatttccatagtagcttggggtagaactgcagagaatatcagtaattttgtttcaaagggcaacatggtaggagtaacaggtagaattcaatcaagaacatacgaggctaaagatggtactaaaaggtacgttacagaagtcatagcatcatccgtagaattcttagaaagaaagaacattacttcacaagcttcaactcaatcacacgaagactacttcagtaatgaagaagacttctcaaatgtagatgaaggctttgctcctggaagcaatagggatattccattttaattaaaggagggaatataatgcaaagaagattcagacctagaaaaaaggtatgtgctttctgccaagaaaaaagcgaacacatagattataaagacgttgcaaaactaagaaaatacatcacagaaaagggtaaaatcttaccaagaagaatcacaggtacttgcgctaaacatcaaagagagatcacagcagctatcaagagagcaagacaagtggcgctattaccttatacacaggattagtacgtttatgtgctaaaattgcggtatagcaaaataaataaattattaaaagctttcactttggtgagagctttttttgatgcttatctcaaagctccacgagtgtagcgtaaaggttctcgtctgtttactgacgaggttcttcaatcatcttggcgctttgcgataaggttcccgggtacccgcccgatgcgaagcatcgtggaagggtggggttcttctttcttcaaaaaatcactataaattttgtgctttcttagaaaatataaattaaaaaactttaaaagctttcacttttgtgagagcttttttaatgctttattacaaatttgttaaaaatcacgaaaatccatttacttttgattgaacgggtgtataatatatataggtaaagtaataaaaagtgataaaaggaggtttattatgaaaaagtttttatcatttgttttagtatttgtgctagttttgtccatgtctgtgaacacttctatggcgaagcttcttaaaggggagatagtagtatttgcaactgaagtaggaccagaagatgctactatattaatagctgacaaaacttatcctgttaagaattgcactgttttatctataaacggtgaagtaattcctgaagctgaggtaattatggacgcaggcaaggcaatgctacctctaagaattattgctgaaaagcttggctacgaagttggctggaacggcgctgagaaaaaggttacgcttaaaaaagctgataaaaccatagaaataagtgtagctaaggatgatgcagctaagcttatcaagaattctacttatgtaagtccagcttttgttgaaaagaatcttgctgaaagcgctatagtgactgaaagacttggcgatgactcaaaagaattttatgataccaagatgcctataactcaagataagactattgaaagaagcttaagaaatgtcatcattgatgaaaagcacgagtataaggacaatctaagctcggatgacgcgatgaagctagtaaaggagaaatgtcttgaaggtctaaagaattttgcgaagactttgaaggaaaaaactaaggaagaaccaggtaggtttgacgatgacataaaattaatcgaaaaagatatcaatagaatgatatacattggcaaagtatctaagttttacagatacacaataggaccttacgatgttttatatgacagaacagatggcaaaatctacttccaaatatattcatcaggaagttatattaaggaaatggatgtgaatgatccggatttgtatatgtcaatttttatcgtgggttaaagaaatttcaattaagctccattaatttggagctttttccatgtctacacaatttgcaaaaatgattttttagtattataatataagtaagtttattagtggggtgtcaaaatggaaaaccttaataaaacaaagtcaaagagcaaggtaagtaagatatataactacactgttttaggcatatatgttttggttttgctagcatatacagtttttaagcttatgggtgctgatgaaaagacgggcagtatcatccttaatgctgtgctactaagcttattatttgcgttagtgggactaatatttatcccgaaaaatactcttacatggataaacattatcttgcctgtggtaatcaatctaccatacttcttaggtcttgtagcatttacgcgtggtttggattggctcggtgttatatcttactactttgagagggtaattacttcgccaataaatttaataaaggcgtttttctagattacgcataaaaatgcagctacattatgtagctgcattcgtttttatctaattacttgcggatatattatctatggctgttctatctgaaatctcgctaatgtctatcgggctcgagtttgactctggcatatcgtcgaacttgcctttccaggctggttttatttgaacgtttaagttctcatctcctagttcgattcttatatcgtcaatgctgctatcaccattacctgaggacacacaaaagtaggataatgtatctttactttcgcttaggccgatgtcgcctctaaagccgcctgctctagctactcctactggcacaatttcatctgaacttagctcttttgtaaagtctttgtttggataataaaacttgacgtctgacataccatagtcatagtcttgataaactataagtagtgggtagtctaaattgtttagctttacgagtgaatatgtgtaagtgcaattaaatccatcatcttttgtagctggattaaatttctctgggttcatattgtccaaaacacttgtgtatacttgctttactttttcaagattctcatctttttgagctgctgcgttttcttcagcatctttactttcttcgttgtcttcgctttcttcattatcttcgcttgatttatcgtttgcactctctgtaagattcttatcttcaagtgtagttttttgttttgatgaacatgctgttaggcttaagataaatgtaaggctaattagaagagctattatttttttcatcataaggtctactccttttcatagatattttatatatcaattctagcatatttttctttgttttacaataattttgtatagagaaaaccctcttcaccacgtggcaaagagggcatatctttatattaaattacatctttggatcggcttcgtaatgtgtgtgcaaaagttcgtgtgctaattcgccgccaacttcgccaaggtactctttgtaaagttgtatgatttttggattggcgtgtgatttccttattactttacctttatctatattatagatggcttcagctcttctcttaagtattgagatgtcgccgttatgaagcggttgaccgcctccgcctatacatccgcctgggcaagccataacttctatcgcatcgtattctttttctcctgacttaaccatgtttagtagttttcttgtattgccaagtccgtttgctacggcgattctgatttctcttccatctatatcaactgttgcttccttgatgccgttaaggcctctaagtgcagtaaattcaatctctttaagctcttttcctgttatagtctcgtaagctgttctgcatgttgcctcgataacgccgcctgtagctccgaagattgcgcctgcgcctgttgattcacccattgggtcgtcgaagttctcgtctttaaggtctttaaagcttagtcctgcttctttgatcattgcgccaagctcattagttgtgataactatatcaacgtcgctgtggcccctgctcttaagctcatctcttgctgattcgtattttttagctaaacaaggcattactgatacgactaccatatccttaggatctatgccaagtttttgggcaaggtatgtctttgcaactgctccaaacatttcatgagggctcttgcaggatgatggtatatcgatcatatctgagaattgttgctccataaagtttacccaacctggacagcagcttgtaagtattggcattttgccgccctttgtaagcctttgaacgaattcgtttgcttcttcgactatagtaaggtcggctgcgaagtttgtatcgaatacttggtcgaaacctagtcttctaagtgcgctaaccatcttaccagtaactatagttcctggctccatgccaaatagctcgcctagagcaactctaactgctggagctgtttgaacaacaacgtatttctttggatctgcaagtgctttccatacttttcttgtgtagctcataccatgaagtgcgcctgtagggcagactgtaacgcattgaccgcagaaagtacaagttgtttcgaacatgcttctattaaatgttgatccaacatgacagtcaaaaccacggccaacctcagcaagtgcaccaactgtttgcacttcgttacacatagtctcgcatcttctacatagtatacacttttctggctctctaaccatagacaaacttctgtcgtctataggtatatgtcttctttcgcctgcatatgggatttctctaactccaaggtcttgtgccaatttttgaagttggcagttaaggttctttgtacaagtcaagcagctgtttggatggtccgaaagcaatagctcaactatagttcttcttgcttgaattgcaagagcggagtcagttagtatattcataccttctttaacaggagttgcgcatgaagcaagtagtttaccgcttttcttatcttcaaccatgcacactctgcaagaagcaagtttatttacaaattttatatcatgtaagtccatatggcatagtgtaggaatctttacgcctatggtcttagcagcgtcaagtactgatgttctttcctcaacagatacatttacgccgttaatagttaaatttatcatcttagccataagtaccctcctataccaatactactgccttaactgggcagacattcatacagttaccacacttgatacacttagctgtgtcaataacgtgcttttccttaaccttgccactgatacagttaacagggcagtttctagcacattttgtacaaccgatacacttgtcagtgatgaagtagttaagtagactcttacacttcttagcaggacaagtcttgtgctcagcaacgtgcgctagatattcgtctctaaagtatgttagtgttgaaagtatagggtttggagaagattgaccaagtccgcatagtgatgacttgctcactatgatcgatagtgtttctaatttttctatatcttcctgtgtaccattgccagaagttagcttttcaagcaattcaagaagtctcttgttaccgattctacaaggtgtacatttgccacaagactcatcaactgagaactcaaggaagaacctacatacgtcaaccatacagtcttcttcgtccataacaaccataccgcctgaacccatgatagatcctatagccttaagagatgcaaagtcaaccttagtatcgaagagtctctcaggaatacatccgccagaaggtccacctgtttgtacagccttagccttctttccaccttgaatgccgccgcctatgtcaaaaactatctctctaatagtagttcccataggtacttcaacaaggccagagttttctaccttaccaacaagtgagaataccttagttccaggagagtcttcagtaccgatggacttgaaccagtcagaaccgcgctcaatgatttgagcgatgttagcaaaagtctcaacgttgttgataacagttggcttgccccaaagtcctctctcggttgttctgtattccttgtttcttggcataccacgctttccttcgatagactccataagagcagtaccttcaccgcatacgaaggctccagcacctagacgaagctcgatttggaaagagaagtctgttcctaaaatattgtcacctaataaattgttttcgttcgctttttggatagcgactttcaggctttctacagcctttggatactcagctctaacgtagataaagcctctttgagcaccgatagcgtaggcacatatggccataccttctaatacactatgcggatccttctccaaaacagatctgtccatgaaggcacctgggtcaccttcgtcagcgttacaaattacatattttatgccttctggctgagcaaaagcagcctcccactttttaccagtagggaaaccagcaccgcctctacctcttaaaccagaagcttttacttcactaatgatatcttctttttgcatattaaggaccttctctaaagagaaatatccacctaatgctatgtattcatccaacgatgcagaatcgattacatcacagttcttaagaacaatacgatgctgcttttcaaaaaattcgccctttttagtaatcacgtcaccatcaatattaaaagagccgtcctttttaagtctatcaagaagaagatccttagttttcttttgaatttctaatagattttccttattcatttactactccttatacttattaataatttctgtaacttgactttcttttacatgttcataaacatcgtcaccaacagttataacaggtgctagtgcacactcaccaacacatctagtctcaacaatagagaacaagccatcagaagttgcttcacccttagctacatttagctcctttaagaaatcatcaagtagtttgtccgcacccttaacgtagcaagcagtacctaagcagatacatatagagtgcttaccccttggtttaaaagtgaattgactgtagaaagatgcaacgccgtaaatttcgctgctatgtttatttaatttaagagccataaagtctacaatctcttcaggtatgtatccaaagagtctttgtgcttcttgaagaacaggcattacagcgcccttatcattcttcttatcttcaacaaattgtaagaactcgtcgaacttagcacggtctttgttaaaacaaaaagccataatttacctcctttaaaaaataaaaatagtgccatttccattctaatataaaaagcatattttgtcaatgagataaatcaaaaaagtagtattaaattatttagcatccaaaagcaaagaaaaggtatagttaaaattaattttccgcgtgcgtgtaatgagtcgaaaaccattttaaacgagtgatatataaggggcgaggtagtatatgagaggcgaggtgatatatagtgagcgaggcaatatatgagaggcgaggtggcacataagaagtgaggtagtatataagaggtgatatatgtatacattagtaggcattataaaagaggaagcctacgcatagaaaaaaaatattaagctcaaagacgcttttaaaagttaaaaatatatatagctatatataatataaaggaagaaaaaaatttaataaaaagaaaaatatttttaaaaaagccttgacatagccctgcatattatgtataatatatgagtgcttaaatcaaatggctatgactaagaaaggttgcgcatcatgttttttttgttgcgtgatgtggtaatttccctagttttatgcaagtctactcactttaagaagtaggcgattgattggcatattttatttacacttagagaaaacgcacggctgcgtgtgtaagagttgactctctaggaagtaaaaaatattacatggaggtaattaaatgtcaagcaaaaaacaaaaaatcagaattagacttaaagcttatgatcacacactattagatcaatcagctcaaagaattgttgaagctgctaagaagacaggctgtaaggtatcaggaccagttccactaccaacagaaaagcaaatcataactattttaagatcagttcatgtaaacaaagattcaagagaacaattcgaacaaagaactcacaagagattaatcgatatccttgaaccaaacgacaaaactgtagacgcacttatgaagatgaacgtgcctgcaggtgtagatatagaaattaaactataatctataagattttatttaaaatccgctgtaaattatggaggtgcagttaatgaacggaattttagcaaaaaaagttggaatgactcaagttttcgaagaatcaggaaacttagttccagtaactgttcttcaagccggacctatggtagttgtacaaaagaaaactgttgaaacagatggttacaacgctatcgtagtaggttttggagaaatcaatgaaaagaatgtaaacaaacctcgtaagggtcaattcaagaaagctaacgctagctacaaaagataccttagagagtttaaagtagaagatgtagaaaagtacaacttaggtgatgaaatcacagttgagatcatggaaggcgttgaatttgtagacgttatcggaacatcaaaaggtaaaggtactcaaggtgttataaagagacacggcttcggtagaggtagagaatcacacggttctaagttccacagaatgccaggtggtatgggtgctgcaacatggccaggaaaagtatttaagggccacagaatgatgggccgcatgggtaatgaaagaacaactgttcaaaacctaaaagtagtaagagtagataaagaaaacggaattatcctaatcaaaggtgctgtaccaggaccaaagaaaggtttaattactgttagaaaagcaataaagaaatagcgctaaaggaggattaaaatgccaagttataaagttttaaacatggaaggtaaagaacttgagacaattgaattaaatgatgacatctttaatcaagaagacaaccctcatcttatttaccaagtagtagttaatcatttagcgaacaaacgtcaaggaactcaaagcactttaacaagagctgaagttagaggcggtggaagaaagccttggagacaaaaaggaactggtagagcaagacaaggaagtacaagaagccctcaatggaaaggcggcggagttgtattcgcaccaaagccaagaagctacggctacaaacttcctaagaagttaaagagattagctttaaaagttgctctttcaaacaaagttcgtgataatgagcttattatagtagatgatataaaattacaagaagttaagacaaaatacgcttttaaagcactacaaaatcttaacgcaaagaaagcatatatagttactaaagataacgataaagatacacaaagagcttttagaaatataccattcacaatgattagtgaagcaagaaacataaacgtatatgatatagtaagacatgatagcatgatacttacaaaagcttctttagaaactatcgaggaggtgttcaaataatgcttaatccacatgatataatcataaaacccatagttacagaaaaatctatgagagatatggaagaaggtaagtacactttcaaagtagacagaagaatcaacaagtcagaaatcaaaaaagcaattgaaaacatttttgatgtaaaggttgaaaaagtaaacacaatgaacatgctaggtaagttaaaaagacaaggcgctcacgaaggaagaagacctaactggaaaaaagccattgttacacttaaggaagattcaaagagaattgaattctttgaaggcatggcaaattagtgataggagggaaatttaatggctattaaaacatataaaccaactactccgtccagaagaatgatggcatcacctgcttttgagcttatcacaagagataaaccagaaaagtcacttgtagagagcattaagaaaaactcaggtagaaacaacactggtagaatcacatctcgtcacagaggcgggggagctaagaagatatacagaattatcgactttaagagaaataaaataggcgttgttggaaaagttgctcacatcgagtacgatccaaacagaacagcaaacatcgcactaattcaatacgaagacggcgaaaaaagatacatccttcatccagtaggattaaatgttggagataaagtagaagctggagaacacgtagacatcaaggtaggtaacgcacttaaattaagagacatcccagtaggtactctaatccacaacattgaaatgaagccagaaaaaggcggacaactagcaagaagtgccggatcatacgcacaacttatgggtaaggaaggcaaatacgcacaacttagattaccatcaggcgaaatgagagtagtattactagactgtatggcaactataggacaagtaggcaaccttgaccacgaactagttaacctaggtaaagctggtaagaagagattaacaggaagacgccctcacgtaagaggttcagcgatgaacccagtagaccatccacatggtggtggtgaaggtagagcaccaataggtagaccatcaccaatgacaccttggggtaaacctgctctaggacttaagactagaaagaaaaagaaacattctgataagtatataatcagaagaagaaacgataagtaggagggtttaaatggcaagatcaattaaaaaaggacctttcgtagacgaacacttaatgaaaaaagttgaagctatgaacgaagccaacgataaaaaagttattaaaacatggtcaagacgttcaacaatcttcccagaatttataggacacacaatcgctgtatatgacggtagaaaacacgttccagtatatgttacagaagatatggtaggacacaaacttggagagttcgtactaacaagaactttcagaggccatgttgctaaaggcgataagaaagcaactgtaaaataatagaaggaggatataaatggaagcaaaagcaatagctaaatatattagaatttctcctagaaaagtacacttcatatgtaacgaagtaaggggaaaacatattgatgaagctctttctattttaaaatttacaccaaagaaaggcgcaagagaactattagcagtacttgaatctgcaatagctaacgctacaaataattttgatttagatagagacaaattatatgttaaggatgcacaagcaactgatggaccaagaatgaaaagatatagaccaaaggctcacggttcagcttatccaatactaaagagaactgcacacctttcagttgtagtttcagacgagaaataaggaggtaagaaatgggccaaaaagtaaatccacatggactaagagtcggagttattaaagaatggagctcaaattggtatgccgacaagaaaagtttctctgataatttagttgaagattacaaaataagagaatatttgaaaaaagagctttaccaagcaggagtttcaaaattaaaaattgaaagaacaagaaagaaaataaaagttactatatacacagcaaaacctggtatcgttatcggtagaggcggagaaggtatagaagcacttaagaagaaaatcgaaagacttactactaaagcagttttagtaaacgttgaagaagtaagaaagccagacttagatgctcaactagtagctgaaaacattgccttccaactagaaagaagaatcactttcagaagagcaatgaagggcgctatccaaagaacaatgaaagaaggagctaagggtatcaaaactcaagtatccggaagacttggtggagccgacatggctagaagcgaaggttattcagaaggaactataccactacaaacacttagagccgacattgactatggttttgcagaagcaaacacaacatacggcaagatcggtgtaaaggtttggttatacaaaggagaagtacttccagaagtaactgacgaaagaaagaaaaacttcaaaaagagaaatcaagacgacaagaagagagatttcaaaaagagaagaagaaacaacggtcaaaacactggttttaaagacagaaagaacggcgagagaaacaataacaacagaagaagctttaagccagaagcaaaagaagcacaaaacgctaataacgaaaattagtaaggaggaaaacatactatgttaatgcctaaaagagtaaagcatcgtagagttcatagaggcagaatgaagggtaaagcatactcaggtaacacagttacttacggagaatacggccttcaagctactgaaccaacatggatgacagcaaaccaaatagaagctgctcgtcgtgcgatgacaagatatataaaaagaggtggaaatatctggatcaaagtattcccagataagccagtaacaaagaaacctgcagaagtacgtatgggttccggtaaaggtgctccagagtattgggttgcagtagtaaaaccaggaagagtattatttgaaatgggtggagtttcagaagatatagcaagagaagctatgagacttgcagcaatgaaacttcctataaagactaaatttgtagttcgtgaagaaggtggtgaagctaatgaaggttaaagaaatacgtgatttaacaactgaagaattaaatcaaaaagaaaaagaacttaaaaaagaactttttaacctaagattccaattagctaccggacaattagaaaacccaaagacaatttctcaagttagaaaagacattgctagagtgaaaacaattgtcagagaaagagaactttctcaagtaaaggaggcttaaatcaatggaaagaaatcttagaaaagttagaacaggtacagtagtttctgataagatggaaaagacaataactgttgcagttgaaacaaaagttagtcatcctatatataagaagagagtaaacagaactactaaatttaaggctcacgatgaaaacaatgaagcaagagttggcgattttgtaaagattatggaaacaagaccactatctaagacaaaaagatggagactcgtagaaattatagagaaagcgaaatagtccttttataggaagggaggttaataaattgatacaatctgaatcaagaatgagagtagctgataactccggagccagagaggtactagtaattaaagtcttaggtggcagtaaaagaaagtatgccggagtaggtgacatcgtggtttgcactgttaagaatgcaacaccaggaggcgttgttaaaaaaggtgacgttgttaaggcagttatagttagaacaacacaacctattagaagaccagacggatcatatataagatttgatgataacgcagcagttatcgtaaaagaagataaaaatcctgtaggaactcgtatatttggacctgtaactagagaactaagaactggtggttatatgaagatcatatcactagctccagaagttctttaatgaagggaggttaaattatgcacgttaaagtaggcgacaaggtaattgttattgccggtaaagataaaggaaaaacaggtaaggtattaaaagcattaccaaagaaggatcgtgttattgttgaaggtataaacattcaaacaaaacaccaaaaagctcgtggacctcaagaaccaggtggaatcgttaaagcagaaggagcaattcatgtttctaatgtaatgatatataatgaatcacttaaaaaaggtacaagagtaggctataaggttttggaagacggcaagaaggttagatacatgaaagccgacggagaaacattagacaaataagggaggtagaacggatggcttccagactggaaacaaggtacaaagaagaaattgtgcctcaattgatggaaaaattaggatatgataatataatgcaagctcctaagctagataagatcgttataaacatcggtttaggacacgctaaagaaaatccaaaagttcttgaaaatgccttaagagaattagagctaataactggacaaaaacctgttattacacacgctaagaaatctatagctaactttaagctaagagaaggcatgaagatcggatgtaaagtaacacttagaagagacaagatgtactacttcttagacaagttaatgaacatcgctcttccaagagtaagagacttcagaggtgtaagcagcacttcattcgacggtagaggaaactatgcattaggtattaaagaacaattaatattccctgaaatcgtttacgacgaagtagatgaaatcagaggtatggatatcataattgttactacagcaaatactgataaagaagctaaagtattcttagagcttcttggtatgccttttagaaagtaaaaggaggaagtagatggctaaaaaatcaatggttgctaagcaacaaagaaaacaaaaatacaaggtaagagaatacaacagatgtaagatatgcggaagaccacatgcttaccttagaaaatacggaatttgccgtatatgcttcagaaagttagcatataagggagaaattcctggcgttaaaaaagcaagctggtagaaggaggagtgatgtaatatgatgacggatccaatcgcggatatgcttacaagaatcagaaattctaactcacaaaaacacgattcagtagatattccgaagtcaagaattaaacaagaaatcgctcaaatacttttagatgaaggttatataaagggctttgaagtcgtagaagacaacaagcaaggcttaataagagttgaacttaaataccttccaaacaaagaaagagtaatttccggtatcaagagaatttctaaacccggacttagaatatatgtaaattcaaacgaagtgcctaaagtattaggtggattaggtatagcaatactttctacatctcacggtcttatgacagataaaaaagctagagaagacaaagtgggcggagaagtaatctgctatgtatggtaaaattagctaggaggagtaataatgtcaagaataggtcttaaacctattacagtacctcaaggcgtagaagttaaagttaatgacggagtagttactgtaaaaggaccaaagggcgaactaaaagaaaacatctgtaaagatcttacaataaagattgaagatggtatcttaaatgttgaacgtcctaacgatgaaaagaaaataaaagctctacacggcctaactagatcactaatccataatatggttactggtgtaacagaaggtttctcaaaagaacttactattataggtacaggttatagagcacaaaagaatggtaataaactagccttaacacttggtttttcacatccacttgaactagaagatccagaaggaattacagttgaagtgcctgaacaagacaagattgttgttaaaggtttagacaaacaaaaagttggacaatacgcagcatacatcagaacattcagaatgcctgagccttacaaaggaaaaggtattagatacactgacgagtatgtaagacgtaaagttggtaagactggtaagtaggaggataattagatgataaacaaagaagcaaaaaaagtaagtcgtcaaaaaagacacttaagaatcagatctaagatttccggtactcaagaaagaccaagactatgtgtatttagaagtgataaacatatatatgcacaacttatagatgacgttaatggtgtaacacttgcacaagcatcaacacttgataagtctttgaacttagagagaacatcaaacatcgatgcagctaaagctgttggtacaaagattggtgaaatcgctaaagaaaaaggcatagaagaagttgtattcgacagagcaggttacatctatcatggtaggattaaagaactagctgacgcagctagatcagcaggtcttaaattttaacaaagggaggggaattgatggaacacttaattattgatgcagcaactcttgatcttgaagaacaagttgtttctataaacagagttgcaaaagtagtaaagggtggtagaaactttagattctcggccttagttgttgttggagacagacaaggacatgttggcgttggtatgagcaaggctcttgaagtacctgaagctataagaaaggcagtacaagacgctaagaagcacttaattgaagttgctatagttgatacaactataccacacgaaattaagggtatctatggtgcaggtaaggtattcttaaagccagctcctaagggatcaggtattaaggcatcttccgctatccgtgccgtatgtgaacttgcaggtatcgaaaacatttctgcaaaacgtcttggatcaaacaatcctcgtaacattgtaaacgctactatcaacggacttatgaacttaaagagagccgaagaagttgcaaaagcaagaggaaaatctgtagaagagttattaggataggaggtttaagttatgaacactattaaaattaaacttaaaagaagttttattggtaaaccttctgatcatataaaggtagttagagctattggtcttagaaagattggccaagtagtagaaaagaatgataccccacaaattagagggatgatacacaaagtagactacatgcttgaaatcgtagactaataaggaggtgtaaagatgaagctaaataatttacaagctcaagaaggcggcaagatcggtcaaaaggctactcgtagaggtagaggtattggatcaggcttaggcaaaacttctggccgtggtacaaaaggacaaaagtcaagatcaggtggaggagttagaccaggcttcgaaggcggtcaaatgccactattcagaagattacctaagaggggctttaaaaatatattcagaaaagaatatgcaacagttaacatctccagcttaaatatctttgatgatggtgaaactgtagatacacaaaagcttatcgatagaggcttagttagaaagaacttagccgtaaacggtgttaaggttttaggtaatggagaattagaaaagaaaatcaatcttaacgttgaaagaataagtgaaagtgctaaagaaaaggttgaggcaaagggcggaaaggtagaggtgaaataaaatgtttaagactctaaagaacgcatgggctgttaaagagataagagttaaaattttattcactcttgccatgttattcatttatagacttggaaactttattccacttccatttgtaaacagagatgctcttcaaagcttctttcaagcaaacaactcaagccttttaggctttctagatatgatggcaggtggagcgttatccagattaagtatatttgcatcaaacatttatccttacatcaacgcatccatcatcattcagctactaacagttgctattccaaagctagaagaacttgctaaggaaggcgaaactggtagaaagaaaattaacagatatacaagataccttactatactactagctgtaattcaaggtgttggtacagtatttggactacttagaggaacagttactggcggcacactagcaaaattacttatggtactttgcttagtagctggtacacaattcttagtattcctaggtgatcaaatcactgaaaagggcgttggtaacggtatttcacttatcatcttcctaggaatcatcgcaagacttcctgaaacagtaggacaatacttcaaattaactaaagctggacaatacaacttagttaacgttataattatgactatcgctatgatagctatagttgctttcgttgtagcaatacaagaaggcgaaagaagaatcggcgtacaatatgccaaaagagtagtaggtagaaagatgtatggtggacaatcaacacacatccctatgaaagttaatatggcaggagttatgccagtaatcttctctacatcattccttggagctttccaaacaataggaatgatcactggaggttcatttggtaagtttatggagacatatttaggatacaactcagtagcatttgcggtattaaatatcatactaattgtattcttcacattcttctacaacgaaatacaattcaacccaattgaatactctaagaacttacaacaaaacggtggtttcatccctggcatcagaccaggtagacctactagcgacttcttaacaaaagttgttagaagaatcggtcttgttggagctatatcgcttgcattacttgcaacactacctataatacttggatcagtattaaagatgcaaacacactttacaggtacaggtatcataatcgttgttggtgttgttattgaaacaatcaagcaaatcgaagctcaaatgatgatgagacactacaagggtttcttaagctaggaggttaatgatgagattattaattttaggacctccaggagctggaaaaggaactcaaagtgataagattgttgaacattacaaagtaaaacatatttctacaggagatatgttcagagaaaatattaaaggtggtacagagcttggtaagaaggcaactgagtacatggacaaaggacttttagttccagactcacttgttaacgatatggttatggatagattatccaaagacgaccttaaagaacatggcttcttactagacggttacccaagaaatataagccaagctgaagcgcttaaagacatgcttaaaaaacttgatatgccgcttgacgcagttatcaacatagaagtaccttctaaattcttaattgatagaatcactggaagaagggtatgccctaagtgccaaagaagttatcacatacaaaacaatccaccaaaggaagaaggagtatgtgattacgatggcgaagctcttattactagaaaggacgacaacgaagaaactgttaagaacagaatcgatgtttacgaaaaagaaacaaagcctttagtagatttctatacagctgaaggcatcatattgaatatcgatggaactctttctattgatgagacttttgaatcgataaaatctaaattgggtagataggtgaaacgatggaatctacaaaggatattgtagtaggacaactggttaaatctaaatccggaagagatatgatgagactgtttttggtctacggtgttgttgacgatgcacacgtgctacttgttgacggaaaactaagaaagcttgagaagcctaagcttaaaaagatcaagcacttaatcgtatatcatacaatagttgaagattttcaaaagaaagtagaagaaaattcaagattaacaaacagtcaaataagaaagtatctagaacctttcttagaagaggaacattaggaggacaaaatggctaaaaaagacattatcgagcttgaaggtgtagtagtcgacgcactaccaaacgccatattcaaggttaagcttcaaaatgaacacataattacatgtcatatctctggaaaattaagaatgaattatataaggattctacccggagatacagtaaatgtcgaactttctccatatgacttggagagaggacgtataacttggcgtaagaagtaaggagagataaaatgaaggtaagaccatcagttaagaaaatttgtgataaatgcaaaattatcaaaagacacggaaaagttatggtaatttgcgaaaatccaaaacataaacaagtacaaggttaataggaggtgtagcttaatggcaagaattgcaggtgttgatatccctagagataaaagagttgaaatatctttaacatatatatttggtataggtctttcaacttcgcaaaaaatattaagtgaatgtggagtagatcctaacacaagagttaaggatttaactgaagcagaagtaaacctaatcagagataaggttgatcacatcaaagttgaaggtgacttaagacgtgatgttgctctaaatataaagagacttcgtgaaataaactcatacagaggaattagacataaaagaaatcttcctgtaagaggacaaagaacaaagactaatgctaggacaagaaaaggccctaacgcaggtaataagtaaggaggtagagtaaatggcagttaaaaaaggtacaaaaactaaaactaaaagaagagttaaaaagaacatagaaaaaggccaagctcatatttcttcatctttcaacaacacaatggtaacaatttccgatatgcaaggaaacgtattatcatgggctagtgctggacaattaggctttagaggttctagaaaatcaactccattcgcagcacaagaagcagctgaaacagcagctaagaaggctatggagcacggtttaaaaactgttgaagtttatgtaaaaggaccaggagctggtagagaagcagctataagaagtctgcaagcaacaggacttgaagttaacatgatcaaagatgttacgcctatacctcataacggttgcagaccacctaagagaagaagagtataatttgaaatatacttttttagtctaaggaggggttaattgtgattgaaatagaaaagccacatgtacaagtacaaagtgctacaagtgacggaacttatgttaagatgattatagaacctcttgaaagaggctatggagaaacacttggtaactcattaagaagagtactactttctttattaccaggtgcagctgtaaacaaaatcaagatagaaaacgtattacacgaattttctactattgacggagtattagaagacgtaagtgaaataatattaaatattaagagcttagtgcttaaatacacaggagatgaaccgcaaaagcttcttatcgatcaaaaaggaccgaaggaagtaactgcaaaagatataatcgcatcacctgaagttgaagttataaatcctgatcatcacatagcaactataaatgaagatggaaaattaagtattgaaatggaccttgtaagaggcagaggctatgaactaactgatatatacagaactggcgacgaaactgaagctgagataggcatcatacctatagacgcatcattctcacctgttaagaaagttaatatatcgattgacaatacaagagtaggacaaataacagactttgataaattaacactcgaagtatggactaacggaactataaaagcagtagatgctgtaagctatgcagcaaagattataactgaacacatgggactactaatggaactatccgacggtatagacgatgttgaagttatgattgatgttcctaacaagaagaaagacaaggcacttgatatgcaagtagaagaacttgatctttcagttagaagctacaactgcttgaagagagctaatattaacacagttcaagagcttgttagcaagactgattcagaaatgatgaaagtaagaaaccttggaaagaaatcactagaagaggttaagaataagcttgcagaactaaacttatttttaaaggaagaagaataggaggaagcttatggcacaatatagaaaattaggccgtagaactgatcatagaaatgctatgcttcgtaacttggtaacatcacttataaaagagggagaaattaaaactacagttacacgtgcaaaggaaactaagagaatgattgataagatgatcactcttgctaagagaggcgacatgcacgcaatcagacaagcacaaagctacatctatgacaaagacgtaagtaaaaaattatttactgaaatcgcacctaagtatgcagatagacaaggcggctacacaagaatatataaacttgaaccaagaattggtgacggcgccgaaatcgcattattaagattaatataagttaagatgtatacaaagtgggcttgagatggtccacttttttaccgcgaattttaaaatatgaaagatttaaatagtaaaagaatcgtttccacttggaagggaggcacaacagaagagctttgcatagagccaaaagatgcctcgcttcaagagagaaactttgatttaaggatatcatctgcgaccatagaccttgagcgctcagagttttcagacttcacaggatacagacgctacctaatgaagctagaaggggatatcacacttttgatagatgacaaagaagtcattattaaagaagacgaagccttcgagtttatgggagacgaaaaagtcatctccataagcaaagagccatcaagagattttaacgtcatcattaaggaagacagaaaagcagatatatctataataaaaaacaaaacaaagggcacagatgagggtgcatatatattcgcccttgaagacgctaaacttaacggaaaaaatgtagagaaatattctttatacgaatcagagggcgaagagatgagcctagaaggtagattcatttatataaagatattcacaatggaggattaatatgaaaaattcaaaatcaatactagcgttagtactagcattaatgctaacaatgacattattcgcatgcaataaagcagacgaaaacaaagctgtagaagaaaacacagaaaagacagaagaagcaaagacagaagaaaacaaagaagaagaaaaagaagcaagcagtgcacaagaagcaccaaaggatgcacttacactagaagtgaagaaagcagaaagcttagacgctaagtatgataacgcctacgcatttatggatacagaaaacgaagaagaaaaggcaaagtatgatgaattatatccaaatgatccatacaaacaagaagtagaactaaaagacacagaagaacctaacaaagcaaactacattgcactacaagacaaactaggttacatggacagaatgcttgacgaagcaacagatgaaaagccatatgacacagcaagaaataaaggtgaaagagtccttaactatattctaagccaagaagatggcaaagacccagtattcttcgcaaacagatacctatacgattttctaggacttgaactagaaacaggcgacaaactaaaaattaaagactgggcagacaagatagatgagccaacaaacgttatacttggcttcaatcaaaaagacagatacgaactaggtaagacatacgaaatcgactactttggaagcaagcttagcatagttccagttggcgttgcaaaagaaggcgctaaatttgttaatggtaaaggcgaagaaatcaatcttgataacgccatcatcacaccacttaactacaacgcatcaaaagcaatgttaaacgaagaacaatgcaaagaaattaacaatactagtctactaatatcaccagaagcagataaggctatgtatgtaggtaattatcttagaggagcatataaggtagttcatctttcagacctaattttgcgttaaaatcgcccctaacacttgttcacttttcggtaatgctcgagtacacttacgtacgctccgcttacctcaaagctccacttcgtgttatgaatcgatttttccagcaaaattataaataagatgaatatattataattagtacagataattaataaataagagcatgtgggaaatatctcacatgctttttttgtaccccaagatatacaaaatttaagttttggaagtgagctatatagtagcaagcttctcatataatagcaagccttgctatgataagaagcctctcatataatgggagcctagctatatacacggcggcttttatacctatgcacgcctcttagatatagctaattagccattgctcacacaatttagcgtattattttgttttaataatctttctaatgggtaaacttaagcaaggtgattttatgaattttgatactattatagatgaagctcttaagaagaaggaagcgatgcaaggctctttctcgggtcctattaaaagacatgcttctaagctaaggtttaagacgataatgatgaagggtgaggcgcacttgcagcttgaaagttttgagggtaagaaggcttttcacgagaacatcgccatgcgtgatgcgaaggcaaggctaggcgctcttatgaatgagtacaagcagctcttcataactcttggctctgaatcttatcaagtttttaacaacaagggcaagttcaagcttcttaaggttaagactgaaagagcggcgaaggcgcaatctcataacaagaagaaaaattacatacttgaggaaggggaatgcattgactttcttatctacctaaaggttatgagtgaggacggcaaggtctacaagagctactacgacaagtttaagcagatcaataagtaccttgaaatctttgacaaggcgcttgagaaggtagatacaagtaagaagctacgcatacttgactttggctgcggcaaggcatacctaacttttgcagtttattattatctaaagaatataaggaagctcgacttctacatcgagggtctcgaccttaaggaagatgttgttcatgacttaaactccatcaaggatgcgcttcactacgaggacatagactttgtatgtaaggatataaaggactactccaagactgataatatcgacatcatgcttactctgcacgcttgcgacatagcgaccgacatcgccataaagaaggcggtggatctaaatgcgtcacttatactatcggttccgtgctgtcaaaaagagctattccctaagattaaatctaacgagcttgagggcattcttaagcacggcatacttaaggagagggtcgcagcaatcgtcactgactcacttagaagtctttacctagagatgcatggctacaaatcagaaatcatagagttcatcgacatggatcatacacctatcttatgatcagagccttcaaagacaaggctaatccattagccaaggctcagtacgatagtatcaaaaaactatttaatttagaaaatattttcatagaaggttagacagatgatagaaaaattaatttactttataaacagacctaacagaaacacgcgtgatgcgttatttagaaagaagactggttacttcgtttcaatcacgggtatcatctttaacatacttttaagtgcagcgaagcttacaatcggtatctttgttcactccatcgccatcatggcggatgcggtaaacaacatctttgacaccatctcgtcggtgattacacttttgggctttaagttatcggagaagccggcggatagggagcatccatacggacacggtaggctcgagtacatatcaggccttgtcatatccatcatcgtcatcatcataggtctgcaattcataaagtcgtcgtttttaagaatactgcacccagacatcgttaagttcgaccttgcaagctttataattatgctgctttcgatacttgtcaaagttttcatcactttcttgaacaagggtgcaggcgagatgatagactcgaaggcgatgaaggcaactagcatagactcacttggcgacgtcttcacgactatggttgtcattgtgccgatgattagctcacttttcacaactgtacaagtcgacggctacttcggtatactagtttcacttatgattattaagaatggtatagagatgataaaggagaccataggcccaattttaggcgaggagccagacagggagcttgtggagcttatacacaaagacttagagtctgagccattaatcaagaacgtgcacgactttcacgcacacaactacggtcctgataatgtctacatctccttcgatgttgagatgccagcacaccttaccattgaagaggcacacagcgttatagacacttgggagaggatacttgaggacaagtacaagatcaccatcatcatacacgttgacccttacatggctgaggacgagtgttctgagctttacaagaagcttgagaatgcggtgaaagatgacaaaaatgttgttgctttacacgattttagagttgtaaacagtaagtctagcaaggacatcttgctactagacctcgttttgaacgatatgcagggtaaggacaaacagacgcttgcggacgagatgtgtaaacgttttgaaagtgaagtctcagatgactacgactatagattaaggatagtaccgaattttacaaatataggagacgatttgaagtaatagtttgattttaggaggtaattatgaaggatatggattatgataagataggcgaaagatacatcgagatagtgaaggaggaccctgagaaatattataaggattataaaaagctcttggagaaggttgaaaagttgactgcgaagtacaagggtaagccggttcctgctatataccaacctttcttcgtatcggatgaggacgaggagaacttcaagtacatctctgagatgatgatgaggatatcagacaaggtgactaaggcttacgttgcaatatctgcttttagaaacagctttgacttcgatgacaagatgaagaagcttttgatacacaagccattgctttcaacatttgtaccaatctgccgctacgacatcttctacaagtcgcgtgatgagttcaagttctgcgagctaaacactgacggatcctctgccatgaacgaggacaatgagcttgcacctatgatgcttgagcttgaagctatgaaggagatggagaagcgctacggctacaagttctcatactacgaactgtttgactcgtgggttgatgagttcataacgctatacaaggaaactaatggcgaagaaaatttcaaccttgccatagtcgacatcatgtcaagcgcatcaacagaagagttcgaacgcttcaagagagcctttgagaagagaggtatcaagaccatcatctgcgatgtaagagacattaagcgtaaggacggtcacatatactcaggagattttaggatagacgctgtctacagaaggcttgttaccttcgaagcagttgagcactgggacgagatacaagagtttgttgatgcataccttaacgatgagttcgttatgataggttccttcaagagccaagttatgcacgacaaaaggatattcataaagctcttcgaagacagagttaagaagttcttgtcaaaggacgagcttgagttcatagaaaaacacataccatacacagccatgcttacaaagagcactgttaatgaagttttggataataaggacaagtacatcataaagcctgttgacctaaacgcatcaaggggcgtctacgttggcaaggaccactccgcaaaagaatttgaagaaattttgaaaaagcatgcagacactgggtatatattccaagaatacatcgagctatacaaaagagatgttgtgatctttaacgataagggtgagctagaggtgaaagagcttaagtccatagccggcctcttcatatataacaagaagttcaagggtctctacactcgctatggtgaaggcaatataatttcaagcttgcaccaatattaccttggtgtaaacatcagagcaaaggagtcttaaagtgaagaagaaattaattttgatgcttgctatgttaatggcggccgcactagtattaacagcgtgcaagaaagacgtaccaaagaataatgaagcaaaagaaaatactgctcaagaagatagtaaagacgacgctaaaacagaagaagataagaagaatgatgagtacgctgagcttgttaagaagacgaagggcgtatcggaccttatagaaggcgacttagttatccaagatgtaaaggtttacaaggcggtagaagaaggagacaaactttcacttttagttaattatgcagagtttggatataagtacaacgaccacgtttttgaaaacacagccggtatgctaatgccgcttaagcttgtatatgtgaaaagtggtgatgaatacgagttaaaagaaaagattgatgcagaagatggcgaaggatattatgcttctttagttaagatggcagacggagatgaagagcttgccaaagaggtagctgtgcaaggcataaacccaagatacgacagcgttatgaaggagctttacaaagctgctcaaaaggcaggactaaaggacttcacgctagatattgacaatgcaccaggctacccaaaggatgagtctttattcatagaagacgttcctaacgagcctaagaacaccattgccatagttaataaagaagcttacgaaaaagcaaagaagaacgaagctaatgaaaattggccacatatagatggcttattgtatcacaaagatacaaagatcgcagttaaaaacattattgacgactttacaaaataatgtatactttagccttgtctataagatgaggctaaaatattgcattattacttgtaatttttgaattcttagtgtataatgactgtagggaaatagagaaagggagtgcgtgatgaaagagttagaactaaaagttattaaatctgaatcatcaaaaggcttatacatagaacttggtcagggagttgttgacttcacaaaagcaatcaaagctaagatatatatatctgtaggcgacaaaaaagtagaagctagtatgattaagttcccaaagggcttatatatagtaccacttaaagaaagacagttaagagtacttaaggtcgaagagggtaagacatataagttcaagatagaacacagaagatagctataagcattaaggcgaaacataagtttcgccttttatttttgcgtgaaataagagctagattgcataaaaattgcacaaaaaaagacttcacaaatgtgaagcctttaatcgatactcctatgtcttagttttgttttggagcatctactggacaaacactgctgcattgtccgcagtcgatgcatttatctgcatcaattatgtagatatcgccttcagatatagcgtcaactggacactctggtaagcattgtccgcatgctatacattctgaactgattacgtatgccataatatccctccttgtacttatattataatgaatgtagatacgtttgtcaagtgattagagtcacattatccatttaaataatgcgctgcactaacagctctactatcatccattatatctatacccaaatatgattgtctttaatcacgataaatgatataatatttataaggaggcatatatggacaaggtagcaggtacaaactattacatatatcaagacaaggacgacttttcttatggtatagacgcaatacttctttctgactttgcaaaggcgaaggaagatcacatagacctttgcactggtaacggcatagtcgcgcttagactttcctacctttacaagaagtcgaaagtggtcggagtcgacatagatgagaaggcgatagatttatgcaaaaagtccatagccgtgaacgaaattaatgacagagtagaggctataaggcttgacataagggaagtggaggagcactttaagaagaacgccttcgacagtctctctgtaaacccgccctaccttgatccaaaggataatatagcaacagatgactacaaaaggcaggaaatcctacttaagcttgatgatatagcaaaggcagcgagctacctacttaagccatttagtaaggtttacatggtgcatagaccatcaaggcttatcgacatcgtcttgagctttaaaaagtatggcatcaacactagaaggctcagagctgttaaaccatttgcggacaaaaaggcgaacatgatacttatagagctcgaaaagtcagacaagactggctttgaatatatgaatgaacttgtcgtctacaactcagacggcacttacactgatgaagtaaaggagatttactatggacatcaataaaggcactttatatatagtcgcaacacccataggtaactacgaagacataagcttacgtgcgctgaacgtattaaagagcgtagactacattgcctgcgaggacacaaggcactcaggtgtgcttcttaagcactacgagattaaaaagccgctctttgcctaccacaagtttaatgagaaggacaagacgccatatatacttgagcttctagctgatggtaaaagcgtcgcaatagtatcagatgcaggctcacctggcatatcggacccaggagttgtagcggctcgtgctgcaagagaagctggatataccgtgacagccatacctggagcgacagcctttgttacatcacttatggcaagtggcatagaccttagtcactttgccttcataggttttgcaccgcaaaaggatgcgaagcgtaagaagtttttggaaagctacagagcgtacaagatgccactaatcttctacgaagcgccgcatagacttatcgctttcttagaaacggcacttgacgtttatggtgacagagaggcctttataagccgtgagctaacaaaattatacgaggagcaccttcatatgcacctaagtgagttaatatcacacttcaaagagaatgagccacgtggtgagtttgttatcacgattttaaatgacgctgcaagtgatgaagatgagaccatggacataaacgaagctgcaagagcacttataggcgaggggatgagcataaaagatgctacaaataagttaaaggagcttggctttaagaagaacgatgcctacaaggctctgcttgagataaaggatgaataatatgaacgaagaattactcataaagattagagatataaactctttgcttagagaaaagtcgaaaattttcgatgagaagggcaaggaaggtataaagagtgagatctatggcgtgcttgcggataagtacatgatagaggacgaggtggatctagaaaaaattgcagacgaaggcggtttatgggcagttgacggctctctgaataggataggcgccttgtatccgcactacatcagtgtcatagacgcacttgtgatatcgacaaaggataattatgaaaagaggctcactacagtttactcgcctattgaggataggatcagagaggaagatgagttttcctttgagcaagaggtctacatcaagaaggagatggcaaggctagaagtaagagtgtgcatagaagccttgaaggagagaaagccaaagatgatattcatggacggaggcttcattcgctacatcattagctgcgaagacgacttcaacgagctacgaaaaatctgcgtagatgaaggcatcatcttagtcggtgtcatcgaagagatcaagacagccactatctcagaagcaataaaatttgaggcctacgacaaggagatattatactccctacttgattacaaggaagcgatgattataagggacgcatgcaacaagaaggcagagagcggcatagtgagcgcctttgctagaacatcgatgaagcctaatgccatcggcgtggatatatgcaaagagcaaagagattacatgcacatggttttagagactatacttaagctaacaccaaaaaactccagaggcataccgcttatacttgacatagttgataagaaggtcaagattactgaagaaatgaaagaagatgttcttgttaaagagcttgacaaggacatatatgatagatattttaacgaagtgaggaatttaagatgaaagttttaggtcttacaggaactagcgaggtatacatagcctcgaatacgagaaattttagaataaatgaatttttgcttatagaggacgagaagagaaactacatcggtgaagtcgttgaagctaatacctataaccgctttatgccgtttgagaaggagaaggactttatcgaccaaagcgtgattgagtcactgttgaagttgggctacaatgttgacaacgaagtagtctaccttgccaagcttagactcttggaagaagcgatgtatcctatcatggcaggttcaaagcttaggcttccaagctttgacgagattaaggatctcatcatcaagtcatcacctaaagctggtcttgtgctaggcatcataaagaacacagacgacctttatgagaaagcagacgaggagctaaagaacttagtctacacctttgaaggcggcacaagacttaagcaaaatgatctaccatacatctacgatgttggagagcttagtcagtatccacacatcggcgtcttcggaggctccggctcgggtaagtcatttgcacttagagtcatcatagaagagcttatgaagaagagaattccgactatagtcctagatcctcactatgagatggacttcaagcttaagacctacgacgaagcaccaagctacgaagcatactacgaaagcttccttcttggtaaggaagttggtgttgactacaaggacatcaacgtctcggagtttaagaaccttcttaatgcggctggcatgatgacagacgcgatggaggcggcagcagacgagattttcgttagaggtgaggaccacaatgcctttagagcgagacttgacgagatcatcgaagccatagacatgggggaagatggcattaataaggctatacaagacgagaacaacggtgatcctgatacggcagagttaattagattagaaagactaaaaggctattacaaaaagtatggcagaagacttaacacagcgagcctaaagggcattggctggaggttcaacagacttgttcaggacaatgtcttcagtaacgactcagaaggtatagagactgcacttagaagtggcaagctcatctcattaaagggaccaacaagactactagaagtttactcaagctatatacttaagaagttctactacaaaagaagagcatacatggatgcaaagcttcttggcatgggcatagaggactacttcccaccattcataatcataacagacgaggcacacaactttgcaccgaagggctacgagagcgcatccaagtccatactcaaagagcttgcacaggaaggaagaaagtacggtgtcttcctagtcttagcaacgcaaagaataacgctgcttgatgacacaatcactgcgcagcttaatacgaagtttatactaagaacagttagagagtctgacatcagtaccatcaaagaggagacagacatatcctccgacgatgccaagagactgccttaccttacaacaggcgatgcctttatctcgcaggcctccttcggtagaacgatattcacaagatttcgttatgcagataccaaggccatagacaaagtcaatccgttcctagagctaagaagtcaaactgaagacaagatgctctcagtttatgaagggcttaaggatagtctacctatcagcgactttaacttaacacgcgaggcagcaaggcttgagaagacagttggcacactaagcgccgaagagcttcttgatatacttgagcgccttgtagagagtggaaagcttgacaagagaaagaatccatttggacaagatgaatatatagagaaggcataagtatgaggatattttttttagcagcagaagtaagtcccttcgttaagacgagagggctagcagacactatgcgctgcctacccaaagaggtagctaaacatgataacgatgtctacgtctttataccactacacaaacctatcaaaagagagtatcagtctaagctcgagtttatgtcaagctatggggttatgatgggcgacggccttatatatgcgagcgtcttcaagtacgaagaagatggtgtaaagtacatcttcatagataacgaagactacttcaacagagacaggatatatggtgagttcgatgatgccaagcgctacatcttctttacaaaggcagttttggagtttataaagacctacaagatcaagccagacatcatacacgcgaacgactggcacacaggccttgtgcccgtgctacttaagcagtatgtcaagagcgacagctactacagagacatcaagacagtatttacggtgcacaatcttaagtaccaaggcgtattcaatcaaaacatcatagccggcatagtcgacacagaccttgaagttttgaaagatgagaattacgagttcatcgactccatcaatatgcttaaggcgggcatagtctcctcagacatagtcacaaccattagcaagtcgtttagagacgagctgatggataagcactttggcgagggattagatgaagtctttaaggagtatagctacaagtttcacggcattgttaatggcatagacacagataaatacaatccattgacagacaaggcgatctttaaaaactacgacgctgcgagctttaagcttaagagatataacaaagaagcggtgcaagactactacggccttaagaaagatggtgacaagccacttgtcgttatgattagccgtatgaagcgctccaaaggtataagcttagtcataggtgccatagaggagatgatgaaactcgactgcaacttcatcatcatgggtacaggcataaagagctatgaagagaagtttagagagttagaagaaagctaccctgacaagatggcttcaaggatctactacaacgagaacgaagcgagaagattatacgcagcctccgacatactcctaatgccatcagaggtagaaccttgcggcagtgcacagatgatagccatgcgctacggctcacttccattagtaaggaaggttggcggacttaaggacacagtcatcgcgtatcacgacgataaagagcatgcaagtggtttcgcctttgacaatattgatcagagggaaatgtacgaggcactcggcagagccttgaagctttattatcaagacgaagatgagtttaacagagtcttgaagaacgcgatgagccttgacaacggttggcacaagacagcagacgagtattgcaagctttataatgaactaagcgaagtatagataaaatttcatattattatatgagcctctttacaatatagtagagaggttttttatattgagagctttgctatgtagatagaggcttgccatgtagatagaggcttactatataacgagagctttgctatgtagtgagagacttgtcatgtattagtagccttgccatcttttaaaaatttgtaaaacttaaaatttatcttttataagtgagctcacatggatgcaaagaataagtaaaaaaatatttttgaacagattaatatatttctttcatatttatctcattaaggactgtgatttgagtcacaatgaattatccttcgtcttagcttgcaaatactttaatggattaaaaactttgctgcatcgtcctaaagctaagtgcttgcaagcttttcaattatgtgttagaattaaggtgtaattaaaaaacgggaggtaagtcatggaagacatcaaaacaagaatagaatcagactctattggtgagaaggaagtaccagtagacgcttattatggcgtacaaagtttaagaggaaaggaaaactttcatatcacaggtagacatattcatccagagatgataaaggctttagcagaaattaagaaggcttgcgctattacaaaccaacaatcacgccttatgtcaaaggaaaaggaagaagccatcgccaaggcttgcgacttaatcatcgaaggtaagtatcacgatcagttcatctgcgacgcaatacaaggcggtgcaggtacaacagctaacatgaacgctaacgaagttattgccaaccttgcaaacgaaattatgggtggcggacttggtacatatgaccatgtacatcctaacgacgacgtcaacatgtgccaatcaacaaacgacgtttatccaacagcaggtaagatagctgccgttaaacttgttaacaagactatcgaccagttgatggaccttataaacgcacttgaaaagaagtcaatcgagttcgacgacgttatcaagatgggtagaacacaattacaagacgcagtacctataagattaggtcaagagtttcacgcataccaaagcgcactacgccgcgacgttagaagaatcaaaaaagctagagacgttatcaaagttataaacatgggctcaacagccatcggtacaggcatcaacgttgatgttaattactatgttaatattactgagacacttgcaagagtgacaggactttcactaaagcaagccgacgatatgatagacggcacacaaaaccttgacggagtagcacacctatcagcaactatcaagacatgcgcaatcacactttcaaagatgagtaacgacttaagacttatgagctcaggtccaaaaacaggcttaggagaaattatacttccagctagacaaaacggctcatccatcatgccaggtaaggtaaacccagttataccagaagttgctagccaagttgccttctcaatcataggtaacgatatgtgcatcactatggcagctgaagcaggtcaactagagcttaacgcatttgaaccagttatgttctacaagcttttcgaatcaatcgaaacactaggtaacgcttgcgaaacacttagagtaaactgcatagaaggcatagtcgcagataaagaaagatgcaaagcactacttgataactcagtaggtatggttacagcgcttgttccacacatcggctacaagaagtcagcagctatcgccaaagaagcacttaagacaggcgagagcgtaacatcaatcatactaagagacaatatcttagatcaaaaagagatagacgagatcttcaatccattccaattaactaaaccgggtattgcagcgagggagttaatccaagaaaaaggcgattttgaagaagaataaaatttcgcattcaagcgagcccttgagctcgttccttccttagcaatgctcacgtacgtttagtacgttccgcttgcttcgttagtccacgtcgcccaatcatctcgcttgctctgcgaaatttactcggggtattagattattttatagattgcttacttcgtcagtctacttcgtcccattcatcacaagtgcgaagcaccaaggttctggggtacccattcaaagcgaagctttgtaaatgggtcaggttcttcttttattcgcaaaatttactcggggaaaaagatttattttatagatcgcttgcttcgtcagtccacgtcgcccaatcatctcgcttgctctgcgaaattaactcggggaaaaagatttattttatagatcgcttgcttcgtcagtccacgtcgcccaatcatctcgcttgctctgcaaaattagttcggagcagataaactattttaataaataaaacataaaactcattggggagcaaatgcattaaaatttggtgcaaatgctccccatttttatttgcaaatttatgctataatatatttataaagcagataaaggagtttattatgaactggatcaatgcatttgaaataatttgttacataatcgtcagtatatttttgcttgacgtcataaagaagaaaaactggaacgaagtatacatgtttatatcagcagcgattgcaggcttctcactggagctattagcagtgcggctaacagacatctaccactactcgaacctctactacataatgataggagtggagccgtatcaatttccattctttggtggacttatgtggggcgcagtagcagtctgtgcgtatagacttgcaaagaaatttaagctaagcccactaatgacagcgcttctatcaggcttcttcgttgtgtccatggacctgcttctagacgttgcagccataagactatcaggcggcttttgggtttgggatggaagagatataaatttagtcattgaccaccacagcttcatgtccgtaatatgggtaaacttcctaggctacatgttcgaaacaccgtcgataatatattattcagaagtctattggcgtcgcaatgaaaaatccatcataaaaaatataattgtcgccataatcatcggccttatgtcagttgcaacagttggtatcttaagctttatatcacttaaacttaacgatataacggacgaatggttttcctgcattgccttcgttattttgtggctgtatatatttataaggcttattagagaaataattataaagagaaagtttattaggataaaactaaacgaccctgcactgacaatcttttggcttgcactatatctttactgtttagcggggcttgcacacttgggtatattaggcgcaaaacctatttacgctgcgctttgcttggcgctatctcttggaacagtgctacttactttaattacttttagtgctgatgatgaagatcttagaaaggagcttcaagatgaagaaaaataataagcttagcgcaataatttgcgcgatattagcggcagttttttatgcgttaaatacaccattgtcaaaagttttattaaagaacatctcaccgacattcatggcagccttcctttatttaggagcaggcataggcgttggctttatgtacttatttcaatacaaaaaagaagacagctcaatgcgcttaagtagagaagacctgccatatacgatactgatggtggtcttagatgtcattgcaccaatacttttgatgattggtatatccataggctcatcagcaaacgcatcacttttaggaaacttcgagatagtcgcaacaagcatcatcgctttagtattttttaaagaagcagtttcgaaaaatctttggatagcgatagccttcataacagtttcaagtataatactttcattcgagggcaaaggagcatttagcttctcatatggttcgctatttgtaatacttgcaacgctttcgtggggacttgaaaacaattgcacaaggaaaatttcaaataaatcaagttatgagatagttacgatcaaagggatattctcaggattgtcatcattaatcatctcattcgtcatcggggagaagcttcctgaatttagatacattctctgcacacttttactaggttatgtggcttatggcttaagcatcttcctatacgtaagaagccaaagagacttaggagcagcaaagacaagtgcatactatgccatcgctccattcattgcaagttttttgagctttctagttaattcagaggccttgagcgcttcgtacttcataggcctagtatttatggtcttaggaaccatctttgtagttatggatacaatcataatgaagcatacacatctgcatacacacacaatagttcatacacacggcggctatacacatacacatatctttactcatgagcatacacacaagcacttgcttaacgaggaaggcaagagccacaacgactttttaaacagcgaagaacataaaagactgcataagaataatttatagatgaatgaaattaataaaaactatggggggagcatttacaataagatgtgcataagatgctccccccctccattttaaatattaaaaaaatttcatatatatgaagagaaacgattgattattgtttaaatatatgataaaattactttatcagaataaaaaattttgtatataagtttaggaggattgtaatgaaaaagagactactttcactactactagtcatgatgatgcttattacagctatgccacttgcagcagcgcaaagcacgaacaattacaaagttgactggttagtacaaaacaatatcgttcaaggaaggggagatggtgagctttcactaggcaaaaacatcactagagcagagttcactaagatggttttagccgtaacaggtgagcttaatcaagctaatctatatgcagctgcgtctgcatttaaggatgtaaacaatcattgggcgaaaaacataattagctacgcaacacaaaggggataccttgcaggttaccaagatggatcattccgtccgaatgcacatataaaactagatgagtgtatagcgatactagcaagactaaacccagactttgcagagccaaaggtaaagacaggttactgggcacaagcctacattgactatgctaagacaagcggaattttaaatggcattgcaaacacaaataaccttaagacctttgccacaagagagacagccttcaacatggtatataacgaagttcaagtctacacttttgttaataagaagatagctgaagaagctcgcagacttcttgaagaagatgcagcaaagaaggaagaagaagctagagaagaagaagctagacaagcagaagctaggaaagcaagagaaagaaaagaacgcagagaaagacaagagcgtagagaaagagaagaacgcttagatagatactatagaatagagtacaacgtttactttaacttaggaagcggatatgaatttaaagatagagtgatagcaaatactttctataaattacctctagcaccatcaattgcgccaagtggtaaaaaattcaaagcttggaatgtcaatggcgctgagtacatggcagaggcgtatgtttatgtagacatagacctatatataagcccagtgtgggaaaatatacctacgccaccaacaccagagccacctacgccaccaacaccaacaaagtataaagtaacagcaacaaaggcaacagcagaccctacagaagcagaagtaggagcagaagtaaaaatcaaagcagacgaggcagaagagggacaagaatttgcaggctgggaagtaacaggtataacacttgaagaaagtcaaaaaacaagcaaagaaataacaataacaatgccagcaaatgctgttacaatcaaagcgacatttaaagataaaacagtagtaccacctacaccaacaaagtataaagtaacagcaacaaaggcaacagcagaccctacagaagcagaagcaggagcagaagtaaaaatcaaagcagacgaggcagaagagggacaagaatttgcaggctgggaagtaacaggcataacacttgaagaaagtcaaaaaacaagcaaagaaataacaataacaatgccagcaaatgctgttacaatcaaagcgacatttaaagataaaacagtagtaccacctacaccaacaaagtataaagtaacagcaacaaaggcaacagcagaccctacagaagcagaagcaggagcagaagtaaaaatcaaagcagacgaggcagaagagggacaagaatttgcaggctgggaagtaacaggtataacacttgaagaaagtcaaaaaacaagcaaagaaataacaataacaatgccagcaaatgctgttacaatcaaagcgacatttaaagataaaacagtagtaccacctacaccaacaaagtataaagtaacagcaacaaaggcaacagcagaccctacagaagcagaagcaggagcagaagtaaaaatcaaagcagacgaggcagaagagggacaagaatttgcaggctgggaagtaacaggtataacacttgaagaaagtcaaaaaacaagcaaagaaataacaataacaatgccagcaaatgctgttacaatcaaagcgacatttaaagataaaacagtagtaccacctacaccaacaaagtataaagtaacagcaacaaaggcaacagcagaccctacagaagcagaagcaggagcagaagtaaaaatcaaagcagacgaggcagaagagggacaagaatttgcaggctgggaagtaacaggcataacacttgaagaaagtcaaaaaacaagcaaagaaataacaataacaatgccagcaaatgctgttacaatcagagcgacatttaaagataaagaagtagaaaaagtttttggtattgaaaaaataagttcaaacgttgggacatttactgtaagtttagatgatcaagatattgaaaaagcaaaggctggagagactataaaagttaaggccgatgttcctggtggatataaacttataaaaattagtgtagctgttaaagagattggcaaaagaatagaattactttccaaaaatgaagagggcagtattataactttcaaaatgccagattgtgatatacagatccaagttttgtattgtcctttggaatcaaaaatcaaaaatcaagtatttaatcagctaaaggaagcaacaagagaactaaaaaacaactttacgcttgatattgatttaacagaaattgatgttaaggactttgaaggtgaagttatggcggggtttaatgattttaatgcagtaaaggaaggaacataccttgatgctattttatctggatttagctatggaagtaaaaatcctgaagatcaaattaaaaatcatcattatatagatgtaaacctttcatatactcacacaaaagagcaagaagcaaaagttgataattatgtatctaaagttattagtgaaagaagaattagtgaagctgaaacagattacgaaaaggtaaaggctgttcatgattatattattacaaatgcagcatacttcaagctaacaagctcgactgacaagataactattgggttagtacaagaaggaaacgaaaagtttaatacagttaatggcgtttcagttcattcaccatacgctttatgcgatgatgataacgaaaagaatgttggtgtttgccaagcatatgcaggtctattccaaaagtttatggataagcttaatataaagtgccactacgcaacaggatatgcaggcgaaaaacatgcatggaatatagttgaaattggaaaaaaatattacaacattgatcttacatttgatgatccagcaaacgcttcaggagaacaacaaggaccaaaatcaggtcttgaaaattatgaatactttttgagaggagatagattttttaataacccaggtaaagatgacattccacatacaagaaataacttaaaagatatcaccgttcaaaatgaagattatgaaggcagagcaaaaggataccttgataaaacacaaaatgcaaaccaaataagtatagatccagcagcataaacaattataatatcaaaatactaagtagatgtacacaacgtgcatctacttttttatcaaaaagaagctttcataaaaattgtttataaaaattaagaaacaatataacatatagaatattttaaatatgttctgggtatatatgctatggtgatgatatgaaaaaaatagatacaaaaaaatatgttgatgaattttataaaaagatagccgaggacaacaaggtttcggacgaagagaagcaaagggcggttgcctactccttaggttacactgacgaggacatagagcttggaggcgacttgggtcttggctgcggcaatcccattcaaaatgctaagctaaaggatggcgagtggctacttgaccttggctgcggcaaaggtgtcgacgtcttcaaggcggctcgtgagttgcacggcacaggtaaggctgtaggcattgacaggcttcccgagatgattgagcgtgcgaatttcatccgtgacaagagaggctttgacaatgcggactttctagtctcagacattgacaacatcaatctgcctgacaataccttcgacgtcgttatatcaaactgcgttatcaatctattagaagataaggaaaaggtttataaagaaatattccgcgtgcttaaaccgggtggacgtgtttctataagtgacatcattcagataaagaagcttcctgatgatatcttggcagaccccatcttccacgcgacatgagtcggcggctccatcacttcagaggctctgaagagtatactagagaaggttggctttatgccatacacaattgtcgaagaggaattgacagaggagtacttaaacaagtggggacacgaaggccttgacgagtacattaaaagaggcaagatacttgcgataaaaccatttaattaatttaaaatttatatttatggatgtcttttattaagacatccattttcattgtaaaataatttaaccatttaacaaagtgacttgacaattagcttgcaaagtgatacgattgatacagtgaagaatttatgatatctgaccctccccgcaacctttttctacttcgtttgtgtggtggggcattttaattattcataaattttactaaggaggtgttgctatgaaagcgattcttaacacgtataaactagtacgtaagcatgcaggctccacatacatattcattttaattgaatctttaatcacagctcttgttagtccagcgataatttacgctacggctatggctgtcgactcgattcttaattatgtacatggagaacgtaatttatttccaattattttattaataattttatttgcttggggagaagtatcgaagttcattcgaaacattttagacataaagcttgagcaaaaacttgaacttaatttaaacacggctgtcatgaataagcttgataaaatatctttggaagagattgaaaagtcaggttttcaagacaagctaaataaagtaaaagatcgtccgcacatggcagtgatcgaattattcaattcatccatagccatagcagctattgtggtgaaggtagtgggtattgcctttgtgttctttacaatctctatttatcttggccttgcttatatgataagtgctgcgcttgatgttttcttcagcttcaaggcagtcaataatatgaataagatgtttgaaaacacttcgcacaatgagcgtgagatggaaaatattttaaggatacttaaggataagaacgccatctatgagataaaagtttttcaaatgaagaacttgtttcttaagaaatttaaaaaatattccgaagctgtttttgatgagaggcttaaaacaactattgcaagtcaaaaatatcttttgcttagctcttttataaatataatatggatgggacttgcaatactcttcgtcctactaaaacttattcaaagagcaattactgtcggttcgcttacagctgtcatcacatctgcgtcgactactttggatatggctgaggactttgtttatgaagcgtctagtgtagctaattctggctacatcgcagaaacacttctttatatcttggattatgatgaaaaagaagtcaaatcacaaatcgagagtggcgacaaaattgtttttgataaattatcttttaaatatccacaaagcgaaaatattgttttagatgatttatctttagagattgataagaacaaagttactgccatagttggcgagaatggcgctggcaagtcaactataattaagttaatagctggtctttacaagccaacgagcggtactgttaagatcaatggcactgagccatactatttatcgaaaaaagacttggcagatgagcttgcgatagtttatcaagacttccaaaactatgagcttagtataaaggataatgttttgcttggcgatgataaagatatttcaagtgatttacatttaatggagcttgataaatatgatgccaatactaatttaggtaagcttgaagacgacggcgtatacctatctggtggagaaagccaaagacttgccatagctagagccatctcaaagtcttctgattttctaatctttgatgagccaactgcatccatggatcctatgatggaagcaaaaatgtatgagggcataatcaaagtgcttaagatgcgcggcgctataattatcactcacagacttgtcttatctaagcttgctgatgaggttttagtaattgataagggaaggcttattgaacgaggcacgcatgaaacgcttatgaaaaagggcggcaaatatgcaaagatgttcactgagcaagcggcttggtataaggaggcaaaaaatgactaaggtaattaaaaaagtttttagcgtaacaccaatcgcgatcatatatgtcttcatctaccatataatttcaggtttctttgttgcagcaaagctatatgcttcgatgcatatcatacaaagcggctatgaatacatcaaaaacttttctgatataaacgtttttattaggtatggagtcatgcttttaatcatcatagcacttgaaagacttcttgagtacctatatgcgatagcgatgaatggctatttgtttgaaaaaactgacagctacttaaatagagagatggcagcaaaattatcaaagatagacttaataaactttgaggatagagattttttaactatagaagaaagagcggcgagtgctgttgacgacgaaaggttaagtaattcagtaaggctacttgctatggcactaggccaaggacttgaagttatcttgatacttgtaacactttggacttatagcccatacttagttgcactagcagccttaacagtagtgccgtacctaatcacaagacttatacgcggcaaagccttttatgatttaaagagcatagaagcctttgacgagagaaaactaaattatttctatagcatatttacagatactaagactaatagggagataaagtcatataacagctctgagtttttcttgagtaaatatactagcgtttttaaagatacaagtaaaaaatattttgatgagagactaaaagatgctaagtcactacttttctgcgacatattaggcgtcatagccttctccatcgccataataataactataaaacttgccttcgatggcaagatactcatcggtatgatgggtgctgcacttatggcttatcaaaatatgcaaaactcaagtaaggatatgatagtcactgtcggcaatttaccgagaaacatttccttcgcaagcgattactttacttttatggacagcagtgaagagaaaaaagcttatgatgtaaattttggcaaaattagtgtaaaagatgcttcatttacttatccaaagactgataacggtcttcatgatataagcttaagtatagacgagggcgagagcgtggcaatagttggctataacggttcaggcaagacaacatttacaaaggctttgactggggtctatgatgccagtggagaaatatcttttgctggagtaaatataaagggaagaggacttagctttgatgattacactatagttcctcaagaaagaactgagattaatcttagtatagctgagcatatcgcgtcaaatgaaacatatgacgaggcaaagctaaagtcgctgcttgattacgtaggcttagacaaattatataaagagcactcacttgatacaaggctcggcaaggactttgacggagtagagctatctggcggcgaaagacaaaggcttgatatagcaaggtctatgtataaggatgctaagcttataatacttgacgaggcaacatcggctcttgacccaatgcaagagagtgagatcttaaagaagttcctcgacatatcaaagggaaggacgtccatcatcgttacgcatagacttggtatatgcaaaagtgtagataagatagtagtctttaaagatggcagagtgtatagcattggtacgcatgatgagctattgacaaagtctcaatactatagagagatgtatgaagcacaagcaaaattttataagtaaatatattgacaagactataagtaagatataaaatagtattaaaattaataataggagcatgatatgaaggaaaagcatataaataatgatagcagtatgaaaaagccattaatatatgaagacttaagtgaagaagaatttgacaatgagataatgaaggcgcttgacgattttgataatggcaggacatatactagtgaagaggtcgagaaagagcttgataaaattttataagcaataaagaattaatcaaagactatatataaatggtctttgatttttttgtgcctttatgctataattaagggaaaaggagttgagagaatggaaaaatattatttaagtacaccaatttattatccaagtggttacttacacataggaaacacatatacgactatagttgcggacatgcttaagaggtacaaggagcttcaaggcatggatgtatattttgttacaggctccgacgaacatggtgagaagattcaaaagaacgctgagaaagctggcgttactcctttggaattcgttactaatattaatgaacaaatatataagctatgggacttacttgacataagatatgataagtatataagaacttcggataagtctcatgatgagatggttaaaaagatatttacaagactatacgagcaaggcgacatatacaagggcgaatatgagggactttactgcacaccatgtgagtcgttctggactgagtctcaacttgtcgatggcaagtgccctgactgcggtagagaggtgcaccctgcacacgaagaagcgtatttcttcaggctaagtaagtacaaggacagacttttgaaatactacgaagagcatccagagttcattgaaccagagtctaagaaggctgagatggttaacaacttcttcaaggaaggtcttcaagacttatgcgtttcaagaacatccttcgactggggcgttcaagtgccattcgatccaaagcacgttgtttatgtgtggatagacgctttgtcttcatacattgatgcggcaggatacttgcaagatgacgaaaagttcaaaaaactttggccagctgatattcacttagttggtaaggatattttgcgtttccacgtaatcatatggccagcactacttatggctctagatctaccactacctaagaaagtctttgcacatggctggatactttttgaaagcgacaagatgagtaagagcaagggcaatgtcatctaccctgagccaatagttaagctatatggcagagacgcgcttaagtactacgttatgagagagttcaactttggtagcgatggtaacttccaaagcaaaaagtttatggaaagagtaaactctgatcttgcaaatgaccttggtaacttagtttcaagaactattgccatggcagaaaagtactttggcggaactgttaataaaaagacttctgatgatgcaatcgataaggatttaattgatgtagctctaacaagaaaagctgttcttgatgaaaagatggagcaccttaacctatcagtagccattgatgaagtgtttaagctaatcagaaggtccaacaagtacatcgacgaaacatgcccatggactttaaacgatgacgaacacaaggaaagacttgaaactatcatatataatttactagaagcattaagaatatcatctgtattactaagcccattcatcccagatactgcaaagaagattagggaagcgcttggcttaagtgaagaaatgaaatatgaagaatgcgatgaatttggtaaagtagataaatacactgtaaagaagatagatacactattcccaagacttgatgttgataaagaagtagagagactacttgaggaaaacgcaaatttagttaagtcgagagaagaaaaggatggcaagacaaaggctgaggacgctgatgctaagccagctatagaatttgatgattttgcaaagcttgatctaagattaggcgaagtaattgactcaaaggaacatcctgaggctgacaaacttttgattaacacagttaagattggtgatgagacaagaactattgttagcggcatcaagaagtggtacaagccagaggacatcataggcaagaaggttgtcgttgtatgcaacttaaagcctagaaagcttagaggcgttgagtcgcaaggcatgatacttgcttgcgaaaacggcgatgacttatcactagttacatcgattgaagatatgccaagtggctcagtgatcgcgtaatggtattcgttgattcacacgctcatcttgacgacgaagcctttgatgaggacagagaagaagtcataaaagatatcttatctggaggaaactacttcttcaacataggctgcgaccttaagacaagctactcaagctatgagcttagtaaaaagtacgatcacgtctacgcagttgtaggcgtgcatccgcatgaggcgaagtactacacagctgaaacgcgcgaggcacttaaagagctacttactaaggataaggttatggcgataggcgagattggcctagactaccactacgatttgtcgccacgagatgtacaaagagaggtctttattgatcagataaaccttgctagagagatggatgtgcccatcgttattcatacgcgtgaagcgatggaagagacttacgagatacttgaaaagcacgcaaagggcatgaatgttcttttgcactgctatacagggtctatagagatggcgagaaagtatctaaaacttggctacaagctagctttaggtggagcgctaacttttaaaaatgcaaagaacactgtggatgttgcaaaggaagttgatttgaaagacctacttatagagacggactcaccatatatgacgccggtgccatatagaggcaagagaaatgacccgagaaaagtagtcttggttgcagaaaaacttgccgagatcaagggcatcagcacagaagaagttttagaagcgacaaagaagaacgcatttgaattttttggagtgaaaaatgattaaagaactcatagttgtcgagggcatggacgacatcgctcagattaaaaacgctgttgatgccgacatcgttgcaacacatggctataaaattaaaaaaacgctctttgatgagcttaagaaagctgtcaagacgaggggagtcattgtttttactgaccctgattatgctggtaagatgattagacgcaccataaatgaaaatgtcaagggctgtaaaaatgcttatctaaagcagtcagatgcgattaagaaagatgatatcggcgttgagaatgcttcgaaggaggcaattatcgatgcactgatgaacgcaagagcatcgacagaagagaggaccgtactatatacatcgaaggatttgtttgataatggtcttttaggcgcagatggttctagtgaaaggcgcgaaaaacttgcgagcctactaaaaatttctaattcaaacgcaaaaaagatgctcgacgcactaaactattatcaaatttcgagagaagattttgtggaggctatgaagaaaattgactgagaaaggtttatatagcatagcaagactcaaggagctgcaagaggacttcggctttgaatttaaaaaagcgcttggacaaaactttttgatcgatggcaatatcattagaaagatagcacaggagagcggcatcacaaaggatactacagttatggagataggtcctggcataggaaccttgacagaagagctagcaaagcacgcaaagaaggtcattgcctttgagcttgacgagtcgcttaaagagatacacaaggagacacttggacgctttgacaatgccacagtcatttacaaggactttatgaatgccacagaagacgagatcaaggcattgacgggaggacccttcaaggtatgcgccaaccttccatactatgtgacgacacccatacttacatttttgctcgaatcaaagctagagattgaatccatcacggttatggtacaaaaagaagtcgctcaaaggatagtcgccgatgaaaaatcaaaagactacggcagcatatcggtatttacacgtgcctatggagatgtgcgcatagcatttaatgtgtcaaaggactgtttctaccccaagccaaaggtggactcagcagttttatatatagaaaagaagaaaaaagatttggcaaacgaagagctattcttaaagataattagagcagccttcatgaagagaagaaaaacacttgcgaacgctttatttaatagcgaagtgggtatagataaggtgcacacaatagatgcacttaaagccattaagaaaggcgagaacacaagggcagaggagctaagcttcgatgactttgtaagtataacgagagacttggagggaatatatggaaagtaaagtattaacacaggaagaactggatgcgattaaaaatgataacatcgactacaaggtagttgagaagttagcagacattatgaaagcacttagcgagccttccagaatacaaatcatacacgcactgagcctaagcgagatgtgtgtaacagatctttcatacgcactaggtatgacacagccacttgttagtcaccacctaaggatactaagaaaccttggcctcgttaagtacgaaagagacggcaagcaacttgtctactcactagatgacgagcacgtgcttatgttatacaagcaaggcttggaacacgcaaaagaaaaagcttaatagtaatcgatatattatctgtcactataatggtggcagattttttatggcttgtatgtaaattagtctttaattagattaaataaatatgctacatacatccatcaatatgagtattaaccttgcattctaagttctgtagtgatataattatattgatatcgtttaagggaagttttaaaaacgcagtcgccgctgccgttggcgcatactgagtaaacacttatgtcactgttatttcatccataatgggaaggcgtttacaagggattaaagcgctagccggaaaaccttactttatcgagaaacaccttcggcaaagagaggttcttttccaaatcaatttgattttcaaaaggagtctttgcgtggggaaataaaaggaggaataatttatgagaaagaaaagtatcattctcatgagtctttcactaattttattgtccgcagacgcattcgcaatgcacatcatggaaggttaccttcctaaagagtggtgcgtaatctggggacttgtatctttaccattcatcatacttggtataagaaaaattgctaaagactctgattcaaacgagaagaaagttttacttgcacttgcaggtggctttatcttcgtactatctgctatgaagatcccttcagtagtaggtagctgttcacatccaacaggtactggacttggtgcaatactatttggaccacttcaaacatccgttttaggtttaattgttttaattttccaagctttgttattagctcatggtggtttaactactttaggtgctaatactttctctatggctatagctggaccattcttagcttttgccatctatcacttgttaaagaaacaaaatagaagccttgcagtattcttagcagcaactcttggtgacttattcacttatgttgttactgcaactcaacttgctgttgtttaccacgaaggaattggatttacagctgctttaggtaagttcttatctatctttgctgttactcaagttcctatcgctatagttgaaggtttactaactgttgttattgttaaccttatagttagatacaaaggtgagggggtacttacaaatgaaagattataagaagactaatttgattttaatcatacttgctatcttacttgttgtactaccacttgttttcgttcaaggcgaatatggcggatctgatgatgccgcaagtgaagagattgaagcattaaaaccaggctatgagccatggttcgagtccctttgggaaccaccatcgggcgaagttgaatccttgttatttggtcttcaagctgctatcggtgctggagctattggctacatcattggcagctggaagggagatgcaagtaagaaggaaaaagataaataaaggagcttaggtaaattgctactcattgatcagttcgcatataccaacggcttaaggcatatcaaggcaggatataaatttatattctgcctagctatgctagttttagctattggtcttgacaatatatatgtaaatttaggcatattcatcttaataatattcttagagcttgcatttgcaaagtttaaagtaagaaacgtcttatcatttattaaagttccgactatattcatattcttaggaacaatatttttgataattggtttttctaaagaaaatcattttgtctattccataaacatctttggcatatactttggagtgattgaggggcaagagatgctgtttcttaacgtgtttatgagatctcttgcggcgacctcttcggtcatattcttaagtgtaacgacacccatggtcgatataatcaaagttttcaagagcttgcatctgccaaacatcttcatcgagctctttatgcttatttaccgcttcatcttcatcatcatagaagaggcgcaaacaaacataaactgtcttgagataaagtttggctttataaacactaagacatcgtttaagtctatcaagatctttgttgagaacatggtcttaggtatatttaagagaaacgaagagatgattaatgctttaaatatcaagctatacaatggggaatttccggttaggtgattatatgttagaagtaaaaaatttagaatatacttatgagagtggacaaaaggtcttagacggagtaagcctctcgactaataacggcgccatcaccatgattataggtgagaacggtgccggtaagactactttatttaaaaacatacttgggctactaaagagggacaaaggcgagatacttgttgatggtgagcttcttcgctacgacaagaagagtcttttgaattatagaaagaacgttactatggtttttcaagacccggacaatcaaatcttctactcgaacgtgtttgatgacactgcttttacgcttagaaaccttggctacgacgaagaaactgtcaaggcaagggttgagatggcgcttaagaatgcaaacgcatatgagctaaaggacgagccggttcactttttaagctatggacaaaaaaagagggttgccatcgcttcggcgatcgccttgggtgcaaagtacatccttatggacgagccgactgcaggacttgaccctgtgtctatcggcatacttaagaagactatcgcttctattgcgaaggatagttcgcttctaatatctactcacgatatggagttttgttatgagatggctgactacatatatgtagttaaggacgcaaagattatcaaggaaggcaataagtatgagatctttaaggatgaagatcttattaagcgcgccaatcaagagctgcctatatgtgttagggttgctaatgctatgggtcttgacttctttgagaacaacgatcaaatgatagagagattaaaggcttatgctaagcatagctcttaatataaaggatagacctgttaccatagttggtggcgggtctgtcgctttaagaaagtttaaaacgcttcttagtgaaggagcaaagcttactgtcgttgctaaggacttcatagatggctttgcctgcgaaggagcaaatctgataaagggtgtttacaaaaaagaatacatagaaggagccttactagtctttatcgcgactgatgatgaagagcttaacgatagagttgcacgtgatgcgaaggagcttggcatcttatataacaggtgtgacaagaaggacgactctgaatttcactctatcaacatgaagaagcttggcggcatagacatctccatatcgacaggtggaaggcttcctgatctaaacaaaacgattatggaccagatgcaaagctacgctgtatatgatgatgagtttttagacttagcatcgaagctaagagagtgctacataaagtgccatagacaagacgagattaagaagataaagacttacagtaaagaagaaattttaagctatataaaggagtttgaagactttgaaactaaaggtgggaacgaggacaagtaggcttgcgctgaagcaagttgagcttgtatttgataaattaaaaaattactacgacattgactacgaagttgtgggcatagagacgcttggagatatcgacaagaagacatccatacgccagatgggtggcaagggtgtctttgtcagggcgattgaagaagcacttgttgatggcaagatcgacatcgctgtgcactcattaaaggatatgacttctgagcttgcgcctggtcttgagatcatatactttggtcagagagcaagaagaaatgacatagttgttcttaacagagtgcatagtggtaagacggctcttgagcgcagcatgaaggttgctaccggctccttaagacgcaagttcttacttgggcaaaaggacaatgactacatagtttctgagataaggggcaacatcgagtcgagagtagcaaagcttgatgagatgggcttcgacgctattatattatcaagagcggctatagatagactcgatttaaatgatgagcttaaaggtagactcatagacttagatgaggacgagtttttaccatcgccatgccaaggtgttatagctcttgaacttaactcgaataatcacgagctaaaacagatgctaatgtctataagggatgcgaaaactgattttgaagtagacatcgagagagcctttcttagtgagtcgggcgcatcgtgcaacaagccgcttggtatacatgtagtatcaaagggcgataaggcacatgtcaaggcctttatggcatcagacgacctaaagaggtacaagtatctagactttgatacggacaaagaaagctatgcgcgtgatgtgaaaaaatacactgaagtgattaaaggtgagatagatggctaaggtatatttagttggagcgggccctggtgatgagggcctaattactataaaggggctaagcttaatacaaaaggcggactacattatctacgataggcttatcaattacaacttgctcaatgaaaagaaggaaggcgcaaatgtattctacgtcggcaaagaggggatgaagtcctcttggaagcaagatgagattaatgagcttctgcttaagtgcgcacgtgatgaaggcaagatcatagttagactaaagggaggcgacccgcttgtctttggacgcggttctgaggaagcactctacctaaaggagcacggcgttgatacagagatagtgcccggcatctcatcatcgataggcggccttatatatgcaggtatacctacgacacacagagaagtcgcaaggagctttcacgtctttactggtcacactatgaacggacctgcagagcttgattgggaaacccttgcacatatggaagggacactcatcttccttatggctatgagtaatatagagaccattgcaaagaagcttatagaagctggcaaggatccaatgactaaggcagccttcatatacaaggcgacaaggtctgatcaaagaagatatataacaacacttaaggatgcttacaagactaaagtggataatgatataaagaatccatcggtctttgtagtcggagatgtggttaactttgccaatgatatagacttctttggagacaggccatttaaggatagaagctttatactattaagaaagaaggagttcaatcaagacttcaaggacttccttatcgacaataaggcagagtttttggagcttgagactataaagtacactcctatacaagatgcaggctttgataatgcacttaggcatatagaagattacaagtgcctaatacttactagccgtaatgcagtagaatttttctttaggagagccttggagcttgctatagactttagaagatttgctaatatcaagatagcctccataggtcagaagactatgaaggacatagctcagtatggtttcaaagcagactatgtatcagagaaatatacatcagacgagctgatcaagaatgtaatctcgaactttgacaaaaaggcaaaggttttgtatcctcactcagataaggccaagggcaacattagagcggcactagctgactacgatgtggacgcctttgaagtgtataagaacagcgatgaggcatatgagaagatgtaccttgatgataaggtgtatgacatattcttcttctcgtcatcggaagctattagcttcaataagttctacccagagataatggcaaaggcgaggatatattccataggaccatatactacaaagagcatagaagaacttggctacaaagtatataaagaagccaaagtacatgactcagaaggcatgatagatttaattaaagaggagataaacaatgaagaatagaatgagaagactaagacttaatgcgaacattagagaagtattcgcagagacagctcttagaaaggaagaccttatatatccactttttgtgaaagatggagttaatgaggtagaagatataaagagcttaaagggacaaaagcaatacaccgttgacaagcttgatgaagtgattaaagagttaaaggacttgggcatacgctcagtaatactatttggcgtgccagagcacaaagacgcgtgcggctcaggtgcttatgcaaaggacggcgttgttcaaagagcgattagaaagattaaagagcttgacaaggacttcatcgttataggtgacgtgtgcatgtgcgagtacactgatcacggtcactgcggcatcttgcacgaggactatgtagataatgacgagactgtttcatacttacaaaagatagccgtgtccatggcagaggcaggagtagatatagtcgcaccatcggacatgatggacggacgcgttgcgaagattagagaggcacttgatgatgctggctacatcaacgtatcaatcatgagctatgcatcaaagtttgcatcaaactactacggaccattcagagatgcagcaggtagcgcaccaagttttggcgatagaaagcagtatcaaatggactacagaaacaaaagggaagcacttagagagatactattagacgtagatgagggagccgacatgcttatagttaagcctgccatggcatatggagacataattaagcttgcagccgaagagactaagttacctatagttgcttactcagtaagtggagagtatgctatgctatacgacgcagttgcgggtggccttgtcaaagaagacatcatcatggagactatgctttcatttaaaagggcgggagcaaatttaatcatcacatactttgctaagtacttagcagaaagattataatggcgaagaagtattatgccgtgaagtccggcagagttagcggcatatatgagacatgggacgaagcaaaagagcaagttcatggatataagcaagcgatgtataagtcgtttaagaccttagaggatgctcagtcatacatggaagacgaggcgcctgaagtcaaaaatgatttgactggaaaacttcttgcttatgttgatgggagcttcagcaatataataaaaaaatatgcagcagctgccgtatatgtcatagatgatgaagtgatagctacagaggcacttgcatatgataacaaagagcttgttcaaatacgaaacgttgcaggcgagatcaaagcatcaatgatggcgattgactacgcgatagacaagggctacgacgaagtgcacatctttttcgactacgaaggtatacgcagctgggccatgggttattggaagacaaacatagacgcgactaaggactacaagaagtttttcgatgcgaagaaggacgaggtcgagatacattttcataaggtagaggcacacacgggagataagtataacgagcttgcagacagcttagctaaaaaagcactgattaaaatgtcttgacatctacattctaagagtatataataaaggtacttgaatgacaaagattaatatatggaggttgaacttatgaattttgcaatgaagttaaaaagattgagagaacgtgcaggcttaactcaaactgagcttgcggagcaactaggtttatcattaaaaactatatcaagatacgaagtcaatggtatgagacctcgtagtagacaaacatataacgacatggctaatatatttagagtagacgcatcatacttattagttgatgatgacgactacaaagttccagttcaagatcaaaactatgacatgcttgtcaatggtatgataggcttgtttgctggtggcacacttagtgatgaagacaagaaggctgttgttgaagcgataactgaagcttattacaagtcgaagtatcaaaatgcagacaaaaaagaaggcagcaagaattagtgagtgagaaatatttagaagacgcactcaatttgatagaagaacacgggacaaacgatccatatgagatattagagaaccttggagtggtagttatacctattaacataggtgctgccttccttggtatgtttagaattttagacggtgtaagctacgtaatatataatactcgcgtggatgaaatcgtgattaaagaagtcctggcacatgagctaggacattttttatatcataaagagtatgcaagtgaagctgagctagccgactttggtttaacgcaagagtcgtccatcatagaagcgcaggccaatacctttgcggcgcatctacttatagatgaggatgagctcttggacaccttagaggaaggcatgagctatatggagcttgctcaaagacttatgattgatgagaacctactactttataagcttaagtcgatgaagaagagaggacttaagattaatttaagcgaagtggctcgcagtgaattctttcaaaatcttgcagaacaagctaaaaattacgatatagactagtggaggaaactatgaagaagaaaattttaactttagcagcattactgcttataagcttatgcttatttgcgtgcaatggaaaagaagccaataaatttgctataaaaggacaatacacaacagcaggtactgatggtgtgttgacttcttatgacatcgatggcaaagaatatgtcatctttgatcaattcttagaagagcttaacccaactatacatagagttggtaatgtttatgagatggtagatggagtgccttcgcctaagaagagcgaagacggccactactaccttgacgatggtatgctatacagcacagacaaggccatagaagcagtgagacttgacaaggatacttatagtaaactagaagacgttaagttccctatatactacaaggacgaagcgaccaatttagacagtggagtaaagaagcttaacgatgtaatcttctacccactagagcacttagaagaagtgtttaagttcaaagccgaaaacggcgaattcgttttcgagacaaaggacgataacgagcttgaagttcttaatcaaagggactacgactggtatatagatcaaaaagaaacaggcaagtactctgaaaacaactgcggaccaagctgcgctgttatgactttgtacttccaaaaaggttatgacaaggcagtcacagctgagatggcaaggaacactcgccttaacgatggtggctggtggtatactaacgacgttagtgacttcttgaaagactcaggtgttacacacaagatgaagttctacaagaacccagacagcttacttaagccgcttagagaaggcaaggtatgcatcatttgcatcgattcatcaacactacgctacaatccagacgcgaactcacacttcaacaagtactacacaggtggcggcggtcacttcatagttgttaatggttacaaggttgtagatggaagactttattatatagtaaacgatcctaattcttggggtatgaagtactcagacggcacttacatgggtaaggatagatactacgacgccatcgacatagacaagacagttagagaatggtcaagagagtattacattatagataataaatagtgaataggcgacttagtcgtctatttttttgactaaaaaaggaggtatatagaagtggacatactagataaattaaaaaatagagaagagacttaccttcctatcaaaagaacgaaagctgtagaggagtttggcttctcactatatgatgcgtatcaaagcaagagacgcttcgaacgctttgcacgctttttcatggaagcctttgatgagatagatagcaaagactactacaagagcgcgcttaagaagtcagagcttggatgcgaagtttacttaaagcttgactcacagctaaaggttgcgcatagtgttaaggcgagaggcggctttaacgaagtcatgtctaaggtagaagaagtgcttacacaaaagggcatgatggagaacttcgacactcttagccttgatgatataagatgcataatgagtgaatacacgatagaggtcagctctaccggaaacttaggtttatccataggactatgtgccaaggctttcggctttaaagcaaaggttcatatgagccgcgacgctaaggagtggaagaaaaaactacttagagaggcgggagcagaagtcgtagagtatgaaagcgactacacatacgcagtgaagatgggcagattgagtgctagtaagaatccaatgagctactttgttgatgacgagatgagtgagaagctcttcttaggctatgcggcatccatcttcgaagtggcagatgaggtgagtttaagcactatgcatataagccgcgaggagccgctacatgtctttctaccttgtggtgtaggaggcgcacctggtggcattgcctttgccttgagaagcttcttcaaagacatggtgcgcatatattttgtagagccaacagagtacccttgcatgctatatagttatgtaagtggtgaagctaagtctgttaacgagataggacttggtggcataagtgttgccgatggtcttgcatgcagtgcaccatctaagctagtctttcctatgcttgacgctcttgtcgatggcttcttcacctttaacgatgagagcattctcttagcaaaaaagcgcatatacgatatggaccatgaagtagtagagccatcaagtgcggcagccttgcttgcatatgagaagctttctaaacctaagaactcaattctttggatgacgggatctaatgttgataaatagcttctaaagtattgaattctacatttattagtgatataattaaaatttggagggatattatgaatttattagttgttattttaaatgaaatggataagcttgatgaattattacttgagctttctaaaaaatctatcacaggaggaactatacttgagagtcaaggtatggcagcaacacttgctgattggcacaaagagataagcgccttcggtggtttaagaagaattttgaacggacaaagaccattcaacaagactttgttaatggtacttgacgacgaaaaacttgccgtagcaaaggacgttgttaaaactgttatgggcaatattgaaaatgaaaatacaggaatcatgtttacactagatgtaaagagtgtggagggcttgactaaatagtatgaacttcgaaattttattacacttaggtacaatacttttagtcggctttatagttgctaaattgcttggtcttttaaaatttccagaagtaactggctacttgatagcaggcatacttataggaccatcagtcttcggttttataccagaagaagcagttaagagtttcgacatcatcagtgaagtcgcacttgccttcatcgccttttccataggtgctgaactaaagtttgacgacttaaagaaggttggtaaggccatcttcctaataactatactagaagcactagttgccttcttcttagtaacagtagttatgcttttattaaagcaaagtctaccattctcactagctataggttcaatcgcgtgcgcaacagcaccagcagctacacttatggttatcaagcaatacaaagcagaaggaccactagttagaacattaatacctgttgttgcattagacgacggtgtatgtatcatcgccttcggcgttgcatcaacactcgcacaaaatatgatacaaggcggcgctttctccatgatgaacatggtaggtaagccaataatacaaattttctctgcacttgcacttggtattgtcgcaggcatcatcatggttaaggctatgaactttatgaagaatcaaggacaaatacaagttgcctttataggtgtcatcttcttacttgcagctatatcactacgcttcgacctatcaagccttcttactatgatggcttttggtacaacaatttgtaacacatcatcaaacgaagttaaagttttcactgcaatcgaagttatcacaccagctatattcttatgcttcttcgtactatcaggtgcggatctagacctttcgagcttaacaaaggtaggcgtacttggtgcagcttatgttgtagcaagagttataggtaaggcactaggagcaggtatcggcgcaaagataggcagcttgtcatcatcagttcaacaaaacctaggcttctgcttagtaccacaagccggtgttgctataggtctttcacttatagcaaagagaatcatacctgcaccacacggagcagcaatcagagacatcatactttcagctacagttatttatgaacttataggaccactattaacaaagatggcactattcagagctggagaaattaagaaggagaacatataatgaacataaaaattaagtattttgaggaactaaacacaactgagctatatgaaatacttaagcttagacagtcggtcttcgtagttgaacaaaactgtccttataacgatgtggacgagtttgatccactttcggttcatttaatgatgatagagggtgatgagcttataggctacgcaaggattactgagaaggatactcgttacccagaagtctccataggtcgctttcttgtgaagaaagactttagacatagtggttttggcgataagttattcacaagggcgattgattacatcacagacgacatgaaggaagacacaattaagatacaagcacaaacatatatgaaagactactacgcaaagaagggttttaaagagatatcaaaggcttatctcgaagacaacattgagcatgtagacatgctttataaaaaagattaagatgcaaaagagattattcgccgtgcttatggccttgtgcctagctcttattgcttgcggcacaaaaacaagcaaagaagaaagaaaggatcttagcatacttctacttatcaatggcacacttggtgacaagagcttttttgacagcgctgaggctggtatgaagcttatcaaagaaaagtatcctgatattacgactaagaccatacagatgggtactgatgagacgaagtatgatgcgatacttgaagagaacacagagtccaaggcatatgacatcatagtagttggcacttggcagctaaaggataagatacaaaagatttccgacaagtatccagagcaaaacttcatactcttcgacgataacgcaaatgacggcgagaaaaagtatgagaacatctactcgatactctacaagcaaaacgagggaggctttttagcaggagctcttgcaagccttgttgaaagcagcgagggatatagttttgccaagaagactaagaagcttggacttattggcggcatggataataagattataaaggacttcttacttggctacgaagatggagcaaagtatatcgatagcgaggctacgatacttagtagctacgttggtaacttcactgacgccatcaaggcgaaggaccttgcaaacatcttgtacaaaaagaaggatgttgatatcatctttaacgttgcatccatcgcgggccttggcatcatagactcggcagtagagaacgagcgctacgtcataggcgtggattcagatcaagcggctctactaggtgacgaaaaggcgaagtacatcctaacatctatacttaagagggtcgatgtatccttactaagagcgattgataagtacaaaaagggagagaatatttttggcactacagagtttttgggagtaaaggaaggcggcatagcaattgctgatggcgcatactacgaggcgaatataagtaaagacacaagagataagatggaagaaattattgctgaaataaaggctgataagattagtataaggtcagagttcaatgattaagatacggaatttacactttgcttatggtgagaacgtcatctttgacaagtttacacttgatatagacgctaggcttagctttcttatgggcaagaatggtgcgggaaagacgacgcttctaaagctcatacatgcagacttaaagggctacactggagagatagtctcggacgaagccttcatggtgagtcaaagctttatgctctttgacgatttaagtgctatagaaaacatcgccatcgccatagatatgaagaaggaaaaagtcctaagcctagttgagacatcgccattctatatatcaggtcttgatagaaaagttaaagagatgtcgactatagaaaaacagacgcttgagcttatcgcgatgagcttatcagataagaaactaatcctacttgatgaggtgagtggggcactagactcgagtgtaactcaaaagctaattgactacatcaagtcttctacaaagagctttcttatggtctcgcacgactctgagtttatatcagccttcgatgctgaagtgatttatttgaatgagcaaaaaaacatttcttcacaagcatcacatatagtcacagagggcaaagataaaaagattattggtatatatataaaggacgaggctgctctagaagagcttatgaataagtacaaaagttttgcttacgtagcaaaggatgtgcgcgaggctgtgcttatggacgagagggcatataggaacatcttcatatacgagatgctagctaatacaaggcacgactacgaaagagaagcagaggactttattaagagatataaattaaagtttaagccaaatgacatcacaagtacactctcaggtggcaacttgcaaaagcttgtcttctttagagagatgctacgcgatgaagaggcatacattttatataattacaagaagggcatggacttcgaagcgaaggcgcttgctcaagaggcgatactaaagaggcgagatgagggtaggacgatatacatcatctcggacgattatgaagaattaaaggaggatatagtagatgaaatcaaagtcatttaagagatatttcattttgctatatcctatttttatgcttattgtcttattaatacttgcgcttctttcacataagagctttgcagatattggggctgcggcattaaaaccattcacctcgcatctatatagactgagctttgttaaagagtttatggtcattagctttttatcccttgctatgaacctttccttgtcgatgggcgagatgaatttttcgcttgaaggcatttttcatatgggtatatttttatgtgcacttgtagctatatactgcgcaaattttttctttattataattttcattccaatcattttattcttactatggcaagtacctaagggcatatccagtggagatggcaagaaactcatcatatcgtcactgatctttaactatgtgattttaggcattatcaattacttggtatatacattcttctctgatgagagcatctcctcagctgtaacaaaaaaatttgacttcgctcttgacataagagcagctcttctacttagtgctgtctctcttatagtcttcgtagtccttgcacgtaagttctctttagtaaagaagcttaagctaattaaggatgcaccgagcgttttaatctcgactggaactgatataaataaagaaaagagggcgattgacctttgccttgctatgcttacatctgtggcagcatttttatatttatttttaaactacgagcgcttcagcttgcaaggctttacaggctatggatttgacgcgataactgtgtctttactcgctcgcggcgactttaaaaaacttgcctatccagcaattttaattacatacataagacttttaagccttgtcatgcagaccgaattttcattcgtctcgtctgtgatgtatttaatgcaaggcgttctcatttttatatcaatattggaggcgcgcaatgacagaaattattagagcttttatacgcatatttttattgtgcctagccatcaatgcgatgagaaatattggcctatgcctattgcacgcggacggccttgtcaatatctcagcaatcacagccatcatcgtctttaatgaaacgtcgtcctttgcactaagcttaagcacggctgtacttgtgtgcatgagtgtaaacatcttattcgtctacctaacgaagagaaggggcacttcggacattgtttatggtatagcgatgaaccttatgctgcgcggtctatcaggacttatgctctatctatacgcaggcgaccttgctatgtcgacttcactgagcataaacttcgactctaatatatttggagtcaacatcttcataatcttgggagcagtaatgagtctagcctactatgtattcttatataagacaaaggcaggccttgagctaagagccgtgggacttgatgaagaaaaggctaagtttagaaaattaaatatatttagcttgcgtctttatgctattatctttgcatccgtttttgcggcgctcgttggaagcttcttatcgctttcgtacttttcatacttcacagaaaacatctcgcaaaatgtgggctacgtatgcttggcacttgaaggcttctcagccatacatccagctctaacgccaatcgcaagccttgtatacgctgtctttacttatcttgcaggctccttccaaagcgtggcggccattaactacaagctacttgatactctgccttacatcgttatgcttgtgctcttatacttctctaagggcaagggcaaattgcacggcaagaatttttatgatataataaaaaaagaggtgaaagaatgaaaaaattacttagaaatttatttatagtatcgatactgctactaacactgatacatacaggagaagttaaggcagcatcacttaatttaatcatagacggaaacaatgttacaaagagcgcaagtcctatcctcaaagatgcgaggacactagtgccacttcgttttatcgcggaaacttttggaagaaacgttgagtggagtgacgcagaaaggagcgttacagttagtgacggcgcgaataacttcaagctatacattgattcgttccttatagacataagtgacggctcacttaagtttacagatgttgcgccttgtatagtcaagggcagaacttacttgccactaagagcagtagcagagcttatgaacatagctgttggctatgacgaccaaagtagaactgttaatatcgactctagtgcatttaatcaaagcacacaaagcactatgctaatgggactagagccaaatcaaaacatcactactaagatgaactttacttttgcaagtgataagacatttgcaaaggcaaagctgcttctacttgatgaaaataacgaaggatatatacaagacgttaaaacaaacatgagtgaaactctagagtatcttccaagtatgaaggatgctggatggaagaaattagtccttgcactatatgatgcgagcggcaagcttgtagacgcgacaggtgcgagagtaaacataaatgttcttccaagagtaacatatacaggagttgacaatggcggcttagtgcaagatgagttaaagattactccagatataaattttgtcgcatcaaagatgaaggcgataataacaaacctaacaacaggagcaacagagactaaggacaatcttgatccagaaggagagttcgcgtttagaccaagctatctagactcaggcagctactcaatcatgctatcggcctttgatgaacttggaaacgaacacttcggcgagactaagaccttcactatgaacataagtccttacatcaatataacaggtgtgccaaaagacggtgtcatctctggacaagtgactcttaatgtgcaaagaaacttcgacgttatgagaactgactacatgcttagagatccacttacaggaactgagagcgttatcgagtcgaagtcctacggcgcatgcaagttcttcccgaatgtaaaggatgcaggtcaaaaggaagtcttcgttagatgtatagacgctagcggcaagactatggagagcgagcacaagcttgtcttgataaagggtgactccaaactattgattcaaggcgttgcaccaggcggtataattcataagtatatagacctaaatgcagtgtctaatgttggtgtcaacagcgtaaactattatctaagaaaccttagaacaggtaaaactaagactatagcagagaacgttgcatatggcgagaactatagatataacgtaaatagcgatgatgagggcgagaacgaaatttacgcaacaggtaatcaaattgatgccttcataaagggtgagagcataaagtttagaatttatacaggaaagatttttacaaagcagccacttatggctaaggataagttccttgactacacaaagaaggttgctagacgcgaatttttaagaacagacctaagcggcgccatcacaacagcgcaagctatacttgagtcgggttggggtcaatcagtgccagttgataagtatacaggtaagttctcaaataatttatttggtgttaaaggcagtgcatcaaacggcacagttaccatcacaacatctgaagtttataacaacgtcaaagtaagtatagatgcaaactttagagcgtacaagtcagccgatgaatccttcgttgaccacacagcacttttacttgaaagaaagtggtatgcgccatttagaaaggtaatgtttaacgaccaaagaggcgtttacgctatcaaaagaagtggctatgcaacagatccaaagtatccaggcaagcttaaagccatcatcgataaatataatttgaaagagctagacaaagttaatatataaaacaaagagcaaggctagccttgctcttttacttgcagcataagtgagtctacattagctatcagtaaaaaatcctctggatcactccagaggattattttattcagtaattctatatgccttgtagccctttgttctaagcttagttattcttacaccagttgtctctatggactcagcaaccttgccatcaccaatgtagagcatcatgtgctgaccagccttgtttagtatgtcgcccttttgcaattgattcataggtatctctacgaagctctctggataccaatcaagcgtccatgagtataaaccatcagcaggcacatcaaagcctgctacctgtatagctgacgagacaagacctgagcagtcaacatttgcgtaaggcgctcctaaaacagagtatatatagtcgatcatagtttcgaccttctcagccctaggtggactttggtatacgaactcttgcgtgctgtctatgagtatagtcttagatggagcgtcgtagccaactttgaagttagccgcttgagcaatgtcccttaagctcatgtagttgtagtcattaatgttgtaggacttaactatcaaagaagtgtaactaggtctcatgcctagatacttaaactttggattcaagtttaacttcttcacactaagaggagcaagctcgctaccgttttcagtataagagctatcccttactacaacaggagtgctttcatcaaccatgacctcaaaacccttttgcgtacccatcataagctttgcgacatctcttagcttgaagtagttgtagcccttgatgttgtagcagctcacattttgcaccttgccgtcaacactaatatttacattattaagcttagcagtgttacgtgcactagccttgctgcttattaagattagtcctataagcaaaataaaaattttctttctcatactaacctcctataaaatttcttcttaactatagtatatatgataattcattttattgcaattgaataatattttggggtatatataaatgtaatgaggtgacatagatgaagatattagtaacaggctttgatccctttggcggagaaaatataaatccatccatagaagcagttaaaaagttgccagaaaatatagctggagcagaaattattaaacttgaagtgccaaccgtaattggtaaatcaattgaaaagataaaagaaaagcttgaagaagtgcatccagatgtcgtcttatcaattggtcaagcaggaggcaggacagatataggtgttgaaagaattggtattaactgcgatgactgcaagataaaggacaacgaaggtaatcagcctatagatgaaaaaattattacagatggaccagcggcatatttctcaacactaccaatcaaggccatagtaaaaaatataaaggctggaggagtgccagcgagcgtgtcaaacacagcaggtaccttcatttgtaatcacgttctttatggtgtacttcacttacaagcaagtaagtataaagagatgcgagcaggttttatacacataccgtttttgccagaacaagtagtagagaagaaaaatatgccatcgatgacaatcgaaactatagttaagggacttactttggcaatcgaagcaattgtaaataacgatactgacataaaaattacaggcggaacaacgcactaaataaaattaggaggtatttatgatatttagagaaattgaagaaaaagatatacagagcttagctgctttaatgaaatcagtttacaacgaagctccttggaacaatgagtggactatggagactgcgagggaagcagtggaatgcctcacagcctttccaaagttctttggcctacttgccatagagggtgatgatatagtaggcgccattatgggtaatgttcgtccatattcaaagcaaaggacatactacatcgacgagttcttcgtatcaagtgcgcatagaagacagggcatagcaaagaagctatatgagagcgcaagagagaagctaaagaatatgggggtagcaggtgctttcttcaccacacttaagggtagcgacgcatataagttttatataaaggaaggcgccttcgatctagatgactcggcagtcttctaccacccatttaattaaagataaagactagttgattctagtctttttttgcgtaaaactattgacaaaaaaattaatcaatgctataatcatattgaacaaggttcagttaggagattatatgacaaaaactgttacatctaaggatgctatacttcttaaaatcagagagatggttgcgaagaaaggactcaatgcacttagcataagaggacttgctaaggagcttggctgctcagtaggaacgatctactactactatccatcgaaggatgagctcatcatcgaagcgatagagagcgtatgggaggacatcttccacacgtcagattggactaaagatgaagccttctcagaatacatcaaagacatctttgagtatatcttagatggcgttaagaagtatccaaacttttttacactacactccattatgcttcaaagcaatactaagcctaaagcaaagtcatcaatgtatatctacatgactagacttatgcagaggatgaaagaagttttaaacgcagatgaaaaagttagagatgacgctttcacagatgagtttacaaaggacgactttataagctttattatgtcaaacatcatgagtctcatacttgacaagtcgtacaagaaggatttcttcatatccgtgatagaaaaactactatattaataacccgtcacacgcttgacgggtatatatagaagctaatctgaacaatgttcaaacacaaggagatgattttatgcgtgcaatttttgaaagtctcttcgacgctatatacctagtaacagttcttactataggcataaaaatgatgaaagaggctaggggaagaaaagagtactacttatttgggctgatggcagtcgttctaggttttggagacgccttccacttagtaccaagaatgctagcactacttacgacaggtcttgatgactacacagtcccactaggcataggtaagcttatcacatccatcaccatgaccgtattttatataattttatactatgtatggaggatacgctacaagatcgaaggcaaagaaggactcacatacacagtttatgcgctagctatacttagaatacttacatgcctatgtccaaggaatgaatttttatcaaaattaccaccactatcttggggcatactaaggaacattccattcttaataattggacttataattattgcaatcttttacatctcacaaaaaaagcatcatgacaaaaactttaagtacatgtggctaacgatagttctaagctttgcgttctacgcgccagtcgttttgttctcgcaagagcacccaaaccttggcttacttatgataccaaagacatgcgcttacgtatggacagttttgattggatacaaagacatgaaaggagacaagtatgaagaaaagactacttaataccgccttcatctatggcatacttggcttagtagccggcgccttctatagagagtacacaaagtttataggctttagtggatacacaagccttgcctttgtacacacgcaccttttagtcttaggcatgcttgtctttttatcgcttgcatccttttccttgattggcgattttacaaagaataaatactttaaacgcttctactacacatataacacagctcttatattaacagcttcaatgatatttgcaagaggcatctacgaagtacttaaatttgaaagtaaggcgcttgatgcatccatctcaggcttagcaggcataggacacatagtcttggtagtgggacttgtgtttttattcacctcactaaaagaagcaatcaaagaaaaataacaaagcaaagtataaataaaatatatgcgcaagacttaatgcttaaaaacttaattacacttatacatgaattatgtatatacattttgaatatactttattcaaccctcatttctctattagcctcatctatatgatgaggctttccctttattaaatatttaataaatttatattaaagcggtttactatagatataatttatttgacagaagcgacaaatgatgttatatttttaatgtgctgacattagttggtaacagaactttaggaggttttttatgaaaaagaaattatttaggactagtattttattaatgttgttgctatctttagtgatattttcagtagcttgcacaaagaataatgatacaagtgacaataaaccaaaagaagaaacaacagcaagtacagatgaaacaaaaacatctgaagaaccaaaagaagaagctaccaatggtgaaaaggaagttataaaaatatcaacaactggaaaccatgcatttttctctgaaactaatgaaaaaactggagaacttcaaggttatgaaatagatgtttggaatgaaattgcaaaaagaaataattgggaaattaaatgggagatagcaggattccctggaattcttgagttattagaagcaggccgtgttgatactgtagctgatcaaattggagttactgatgaacgtaaaaagacatataattttagtgatgtatatttctatgttccatataaggttgtagtagcagaagataataacactattcatggaatcaaagatgtatatggtaagaaactaggcttacttacaaatgatatagcatatgcgtttaaagatcaatttgacccagatggaaaaattgaatatgttgaatacgatgttagtactgcagttcatacagacgtagcattaggacgtattgacgcatcactaatgtctgctatgcacatcaatgacgtaaaagaaaagtccggattaaaaattaaaggcgttggtgacactgtttatacagaagatgctgcatatcctttccataaagatgaaagaggagaaaaacttttaaaagaagttaacaaggttcttaaagaattaaaagaagaaggatttttaagcgaaacagcaaaaaaatggtttggctttgatcctatggctgagtaaacgtttgtatggatcgttttaatataaatctcttttttaaactatttccaaaaatattaagatatttgccagaaacatttaagctggcatttataactatatttttctctttattaatagctttaattgttgctattataagacaatataaaataaagggtttatatactttaacgtcaatatatgtttcattttttagaggcacaccatttattgcacagttattttggttctattatggacttgcacaagtctttgaatcaataaaatcaatgaatccatttcaagctttagttatatgtatgagtgctaactatgcagcatttatgtcagaagacatacgtgctgcattgaattctgttagcagatctcagtatgaagcaggtctatcaataggaatgtccccattaaaagttatacagagaataataataccacaagcagctagagttgctgcaccgggattgtctaatcattttatagggatatttaaatctacatctattggatttatgattggatataaagatatgatggctgcagtaagtttggaaacatctaaagtatatagatttttggaaggatatacagttgctatagttatttattggataataatttcaatattatcatatggccaaaagaaattagaagagaagcttaatttgaactataagtaggagacaataatgattaaaatagaaaatttatgtaaaaaatttgatgattttgaagtattaaaaaacgtttcactatcgctagaagaaggaaaagtggcagttttaattggtccttcaggatcaggaaaatcaacatttttaagatgtataaactttcttgaaagagctgataaaggcactattagtatcaatgattgtactattaattgcgaaacagctactaaaaaagaaattagtcaattaagatctttaacatctatggtgtttcaaaattattgcctttttttaaacaaaactgctctcgaaaatataatggaaccaatgatatcggttcaaaaacttagtaaaactgaagctagagaaaaagctcttgaaataataaaatcaattggactatatgacaaacaaggtaattatccaacacaactttctggcggtcaacaacaaagaattggtattggcagagccatggctgttaattctaagttaatgctaatagatgagccaacatcttctcttgatcctgaattggtaggagaagttttaaagcttttatatgaattagctaaagaaaaaacaactatgataattgcaacacatgagatgaaatttgctaaacatatagctgacaaagttatatttattgataatggagagataatagaagaaggatctgcggaagaaatttttaataatccaaagtctgaaaggttaaaacaatttttaaataaatttcaggtaaaataaaggagtattatttatgaactatattgaatataacggaagaaaaatatctgtcagacctgctgtaaaggactatgaaattgatgagaaaggcgcttatgtaagacagattccatggttcagggagccttttggagaatcatataaaaaccctgtagaaaaagatagatatacacttttttgggcaaaagattgcgcttggtctaatcgcgttgctatagtttattcattattgggtttgtgtgaatcaattaaggaagagattgttgattggactgaattagatttgcctgttggctgggaatgcgtaaactctaaagattgtataaacaaggaaagtaatgctcgttttgttggcgagctatattatagaactgatagtaattttgtaggaagaccagctgtaccattgttatttgattataaaaggcaagtaatagcaaataatgattatcacaaaatgacatattatttagaaaaagattttaaatctcttcataaaaaaggagcacctaatttattaccaagtagcatcgaaagtgaaatagtaaaaatgggctcttggctttatgacaatatcaataacgctatttatagaatgtgctttgctaacaataaaacacaatacaagatagcctatgatatattttacaaggctatggaagaattggaacaaagacttgcaaagtcaagatttatctttggtgattatttaacagattcagatatacgtctattttctacattggtaagattagatgtggattatggtaaatatttaaatcttgatatttatttagcagattataataatttgtttgattattgcagagaaatatatcaaatagcagaagtaagtaaaaaaactttttttaaaaaaatatgtaggaaagaatttaatgaggaagatataaagaacgttgaaaaattatggtctgagaaaattgataggaagaataagattaagtcgagtgataacatatttataatagaataagtatacaatacagtagttttatggttataacttaaacattaatatttaatttctctattagcctcatctatatgatgaggctttccctttattaaatatttattacagagcatatttacatggtaaaagtggtataattatatcaaaggaagtgagaccatgaataaaaaacaatttatgatatttataatatgtttactgcttattgctttagctgtagtttctttcgtatatataagacagacaaacttacttagagaacaggcaaggcgcataagatatcttgaagatcaaataagagaaaaagagagaaaaaaccaggagctagaagaagctaaaagaaaagacgatgaagagagcaaaaaatattctaatctatatgtggctatggcagacaaatgcggcttaagtattatggatgatagaaaaaaagctatggtagttcctttgggaagcgcttatgacgaggagactttaaaagaagttttagcaaagctaaagctatggtcagtttgctacgatgtcaaggatataaacaagttactcgtgctagcaaaggctgagggcacaagcgatacttaccttatgggtcaagaattttatatcgtagttcctaagtataaggatgctgaagtttcacttaaagagcttgaacttttagaaaatggcaagcttaatactgttggcaatgaatttttagacggcaagaaatttactggacctgtacttgtatgccaaaatatttcagacatagcacctaatgcactaatctgtatcgatggtgaaggtagagagataaagtttagtccatttgtcagtttgaaagacggcgagcttatattggatgacgaagtatacaatgcttatgccgctcttgatatgaaggtgtatgataagactgattacgatgaaaatttatttaacgagatcaagtcttacttatataattatgattagtaaaggcagctcttaggggctgccctttatattgtttagctaaagaaatgaaaaaaattcttgacatttctacttcaataaggtataataatcgttgttgggacctttagctcagttggttagagcgtccggctcataaccggcaggtccggggttcgagtccctgaaggtccaccaatttgcccagatagctcagtcggtagagcagtagactgaaaatctacgtgtggctggttcgatcccggctctgggcaccatgcttaagtttttacttaagcttatttttttgcccaaaatcaaaaaatgctaatattttcctataaaaatatatttttgtttattttaaaagcctcatgggtatattaataacagatgatactaagtgcaaggaaaggatgaatataatgaatgacgttcttcttatcaataggatagatgttcagaaggagtatgacaagaaaaagaaggtcttttttattgttgactacaaaagtgaagactactctgagtataatatagtgaagctactttctagtttggaagacattaagtctgaggacatagtctttagatacaacggttttcaaatccaaactgagatacgaaatatacctgccatcttaaaggctttgatggatgagaaagttcctgtctatagcgtctttgagatgtatacaccggtggtttagtatgagtagattatcgcaaaggcaaagaagacttcgcttctacagattgctagtaattatacttattgccatcattgcaatctacttcttcgtttttagaaagaagtttattggggtgaataaggaagaaagagttgacaacttaaaggcttccatagaagacataggagacttagtaactgtcgagtacaactacactgacatattgacatacaaggacagcttgactcttatggatatgaagataccattcacagacaaaagctacattattaagtataatggctacataaaggccggcatagacttatcaaaggcggtagtaaaggacgtaggcgatactaaagttgagcttgaagtacctaaggctactatcacagatagcgtgcttgatgagaagtccatggtcatacttgatcaaaagaacaatatatttaatccactagacttgggagactaccaagagacacttaagaaagaattgaatgcaagagagctaaaggctaagaaggacggcatacttgaaagggcgcaagataatgcggacaagattttaagaaaaatgctgcaaagccttggctataaagatattaatataagttacatttaggaggtaattgatatgaaaattagtaagcaagttgcagatgctctagtagaacaatacaattttgaattggaaagtggctatatttacttagctatggtacatgatttaaaggacaaagcttgggatggcttctctcacttcatggacaaacaagctggggaagaatatgaacacgctacaaagtttaaaaacttcatcgaagaaatcggtgaaagagttgaattaaaagctattcctgaaccaaagaaggaatacaaatcagttcttgaaatctttaagacagcttacaaacatgaacaagaagttacaaagagaatcgaaaacatctttgatctagcacttaaggaaaagaactatgtagttgttgagttcttaaactggttcttaaaagaacaagttgaagaagaagacaacatgagaactatcgttgaagtattagaaaacctaaaggatggctacactggcttatatctatatgataaggaactaggtagaagagaataattaaggtatttgagggtgcttaaatgcaccctttaaatatagatagcagagctataaatataattttaggaggaaaaattttgagagcaatgacacaaacaaaccttcaatcagcatttggaggagaatcacaagcacacatgcgttatctttactgggcaggagctgcagaaaaggaaggcttcaagaacatagcaagattatttgaagcaacagcagaagcagagagagttcacgctcatctacacttcagagcaatgaaagacttagaaggtgacttcacagtaacatcaggagcaggtttcggagatcacggaacatcaaaaaacttacttgcagcagcaggtggagaacactttgaacatacagaaatgtatccaagttacatattagtagctgaagagcaaggcgaaaaagccgctgtatcagcaatgaaattcgcagttgaagcagaaaaagtacacgaaaaattattcttaaaagcaaaagaatatattgatcaaggcaaggacctagaagtatctaagatatatctatgcccagtatgcggtttcatctcactaacaggtgaagaagaaaagtgccctatctgcagtgcaccagcatcaaaatttgttgaatattaatactctttaatcaagaagtacttattgagttctcacacgcaatgtgtgggaactttttttatgaaaatagtagaattattttaacatatgtgataaaatagtactgattaatatagaaagaggtaattcattggcaaagttacttatacaagaatcgaatcctttgcttggaacagtaagagtcagcggtgcaaagaacgccgctctgcctatacttgctgcgactatacttggcactgaagacataatactagaggacctacctaaacttaaagacgtcgaagttatgtgcgaagtgctttcctcattaggagcaacgattgaaaagataaacgaacatacaattaaaataaattcaaacactattaataaatacgaagtagactaccaactaatgcataagatgagagcatccttcatcgttatgggtgcgcttataggcaggatgggtaaggcaagaagctctatgccgggaggctgcgcgataggagcaaggccagttgatttgcacctaaaaggttttagatcacttggcgtcaacgtcgatgttgaggagaatgatgagtacacagacatcttcgctcacgcagataatttagcaggcaataaaatttacctagacttcccttcagttggtgcgacacaaaatatcatcttagctgctgttcttgcacaaggcgagacagttatcgacaacgcggcgatggagcccgagattgttgatatggttaacttcttaaacaagatgggcgcgaagatatatggagcaggtacgtcgactatacgtattagaggtgttgaaaagctttttggtgcgactcatcaaatcatgccagacaggatagaggcgggcacttttatggtggctgcagctgcaacacatggcgacatcatacttaacaacgtcatagtaagtcatatgagaccagtcatagctaaattgcgtgaggcaggctgcgacatatatgaagacactgacactttaaggatagttgcaacaaagaagcttaaaccgataaaggtaaagacactaccatatccaggcttcccaacagatatgcaagcgcagtttatggcgcttgagaccatcatcgaaggcgagtctgaggttatagagacagtttttgaaaacagatttatgcacgttgatgagctaagaaagcttggcgccaatattgacgtagaagacagaacagcgacagttaaaggcgtagataagcttcacggcgcagaagttagggcgacagaccttagagccggagcagcccttgtcatagcggcgctatgcgcaagtggcgatactaagctatcggacatataccatatcgacagaggatatgaagattttgaagagaaatttagatctttaggcgcaaaagtctatagagtagaggaataaggaggatacgcatgggattaagatctgatgtaggcattgacttaggtacagctagtgtacttgtttatgtaaaaggaaaaggcatagtacttaaagaaccgtctgtcgttgcgatagaccaatatacaaataaattcttggctgttggcgaagaagcaagaaagatgcttggcagaacaccaggaaacatcgtcgctataagaccgcttagagaaggagttatctctgactacagcgttacacaaagaatgcttaaatacttcatacaaaaggcacttggcagaatgcttttcaagccaagattaattgtttgcgttccaagcggctgtacagaagttgagaagagagcggttattgaagctgcaaacgaagcaggcgcaatcaagacctaccttatcgaagaacctatcgcagcagctataggcgcaggacttgacatcacacaacctaacggcaacatgatcatagatataggtggcggtacaacagacatcgcagttatatcacttggcggcatcgttgtaagtaagtcaatcaaggtggcaggcgacaattgcgacgaagcaatcacaaagtacattagaaagaaatttaagatgatgataggtgagagatcatccgaagagctaaaggtaactataggctgcgcttatccacttgaagaagaacaatacatggaagttaagggtagaaatcttatgagcggcctacctatgaacgttgttgtttcatcaacagatatgcttgaagcgcttaaagagccggttcaagagatcatcgaagcagttcacacagtacttgagaggacaccacctgagcttgcagccgacatctctggcagaggcataatacttacaggtggcggcgcttgcttaaagggacttgacacacttgttacagaacaaacaggtataccatgcagagttgctgaagatccagtagagtgcgttgctataggtacaggtaagtcacttgattgggtagagatacttgagaagtcaaacaacaaaagcggtgcgagcgtaagatttagataattttatctatacttataagacaaactattaatattatttatacaagagcggttattgatataactgctctttttttggtataatagtagtggcaagcattataaaaaggaggaataaaaatgagtcaatattttgaaagaaaagatttacaagaattcggcagaggcgctttaggcgaacttaataaagagatgtgggataatttcatgaagtattacgcaagtgtataccaagacagcaagctaacagctagagaaaaatcacttatcgcacttgcagttgcacatgctatccactgcccatattgcatcgaagcatacacaacagcatgcttagaccaaggctacactaaagaagaaatgatggaagcagttcacgttgcaagctctatcacaggaggagcagtacttgcttactcaactcaaatgaagaaacttgctgacgagatggagatgtaattgtcttacctaaagagtttacaagaagcagtccagccatttgcaaagacggttgggtacgatatcttagctaaggagccaaagacactgcagctaaacataacgaggaagtgtaaccttgcgtgcaagcactgtcacgtcgaggcctcacctacaagagatgaggatatggatatgaagactgcacagagggccatggagatattaaaggagtgggactttacaactcttgatataacaggcggcgcgccagagatgagcagcgtttataagtacctcatcgagacagcctcgtctatgggtaagaagcttatgactagaagtaaccttactatctttttggatgaagaatacaaggacttacctgagtttttaaaagagcacaaggtagagatcatcgcttcgctgccattctacgaggaagtaaagactgacaaagttagaggcataggcgtctttcacgactcaatcgaggtcttgcaaaggctatgcaagcttggctatggtagagatgaagaactgcagctaaaccttgtatataatccgagtggagccatgataccagcgggtcaagaggagcttgaggcgatatataggaccaagcttaaagaggggtatgacatcgactttaacaatctatatagcatgacaaatgcacctataggacgctttggcgagtggttagataagtcgggcaatatgcaaaagtacttaggaagactatgcactgccttcaacccagcgactgtcgatgcacttatgtgccttgacacgctctcagttgactacgacggcagccttcacgactgcgacttcaaccttgcactcggaatgaagatatcaggggagcacaagagcatcttcaacatcgaaaaagaagatttaatcggaagaaaaattagaacaatgaaccattgctactcatgtaccgcaggaagcggttcctcatgaggtggagcattggagtagttactcacatgtaggctttctgtcatatgacgggaagctttttttatatcttatatatatattaagctgctttttaatcttagggagccagctactatatagcaggcccgctactatatacctcgctcgctactatatagctcgtttcataagccttatgcgcttcttaatacatagcgtttcacttatataaaaatatttgcaaaatactcttgctttttataaaaatatattgtataatgaattcagttagcaatgactaacaaaaggaggttttttatgaaagcgagcgtaatattctggtcaggcacaggcaacacagaagctatggcgaacgaaatcgctgcaaagcttaaagagctaggtgcagatactaaactattgacagttgaagaagcaagtgttgacgatgcaaaggacgcagatttacttgcattaggctgcccagcaatgggagcagaagaacttgaagaagactacttcagaccttactttgacagcatcaaagacgtgatcaaagacaaaaaagttgctatcttcggttcatacgagtggaacagtggagagtggatggacctttggaaaaacgaatgcgctgacagcggcatcgcagttgtagatgcacttatcgcatatgaccatccagatgcagatgcactagctaagtgcagagaacttgcagaaaaattaatgaagtaattatcaaggagtgctaagcccccttggcgccccttgtacatatataaaaaaactgcccgcgaaggcagtttttgtatcgtatggagttttatcctagtagtatatctaagatcatcatgatgacgaaaccaaagatgatgccgtatgtggcttctctttcgtagccttttgagtgcgtatctggaatgatttcgtcgcagataacgaatagcatcgctcctgcagctgaggcaagtactactggaagtacaggcttaaacacattaacaaggccaaatccaagagcggcgcctacaggctcaactaagccagttagtgcagcaactatgaaggcatacttcacagagtatttctcacgcacaagacttagcgcaacggctagaccctcaggcatattttgaatgcctataccaagggcaagcgcaagaccgtcactaatgttttcggtaccaaagcctacacctgttgccataccttcagggaagttgtgtatggttatcgcaatgatgaataaccagatctcactaagtgatgatgagacaccttcgcgtcttttgtcgataaggtgctcgtgcggcgagtacttgtcaatcatgtcaatgatgaaggcaccaaataagatacctagtgaagtgattataacagctttgaagtcgccaccaccatactcaatcgatggcataacaagcgaaaagcaagtcgcagctagcatgatacctgctgcaaagccaagcatcatatctaaaagcttctgtgatacattcttagtaaaaaatacgggcacagcacctaaggcagtcattagacctggaaagacaagtcctattgcgatggtagcctccctacttaataaattgttcatatgtgcatccccttaagataatttatttaagagcattttattataaaatattttaaaagtcaagaaaaagggtataaagaacttgcaaaggagttgaaaaaagatgtattatatagatacacttaaaagcgaacacgaacatataattaaactcacagaccatatacttaaagtttcaaaagacatcttgcacggcacagtaaattctagtgatatattgaccataacagacgtgattagaaactatgcagataaatatcatcacaaaaaagaagaggacctagtcttcaaagctatgctagaatatcttggtgagcttgctgagaaacttgttacaagcggcatgcttgttgagcacgacctagcacgttacgagcgcatgatgatagaatttagtcttgaaagctacgaaaaagataaatcagatgaggcgcgccttgaactcataggccaccttatgagctatcgctcgctacttattagacacgcagacaaagagaacaaggtagtctatccatttgcaatgaagaacttgccagaagatgtgcaaagaaaacttgacgaagagacaagggtcttcgaagaagaaaataaagaacaaagagaaaagtacttaaagatcataaacgattttgaattggtaacaattttataaggaatttaataaaaatgatgtcaatgctactcattgagcttatagcttaagggtagcattttaattttgtatgatatcgcttttaagtgcgttgcataatatggacttaaaaagagctacacaagcagcacctgcacaagcaccacaaacaccaccagcacctgtaccaaatccacaagagaatggtaatgaaggtgcagatgaagataagggtaagccaacaaagcctgttgttcaaaagaatcagattaataaaaatgaagacgaagcttcaaagcaagaaagaagttctacgattttcttaagaagcatgctgtgtatgacacaggctacgaacttaaggaagatgacaagatcattaatctagttacttgcacttatgagaagaagaatcaaagactcatagtgctaacaattgtagataaataagagaagcgcctcccgtgcataatgcatgggggcgtttttatatgagtggattgacaagctagggcctttggtatagaatgggtatatagatagtagtaaggagtgatatatatggaatacaaagaggcgcttaagaaggtacttgatgagtttcaagctgaggcaaatttaaaagaaggcgagatacttgttgttggctgctcgactagtgaggtcgttggtggcaagattggcaaggcttcgtctatggatgttgcaaaggaattcatcgaagcctttatggactttgccaaagagcacaaggtctaccttgctttccaatgctgcgagcacttgaacagggctatagttactacaaaagagtgcatggagaagtacttcttagaagaggtaagtgttgttcctaagatgcatgctggaggttctatggcgactatcgcatataagaagctagatgagcctgtagttgttgagtatatacaaggccacggtggtatcgacataggtgacacctttataggcatgcacatcaagcctgtcgctgtacctgtaagagtaagcgtgaaagagataggtgaggctcaccttacacttgttagaagaagacctaagctaataggtggcgagagggcacagtataagtagttagataagaggagtgaggagctcctctattttattaacgaggtctatagtgagaagtagataaggaaaaaatatgaagaaatatcttagtcaatgcttgaaaaagacttgaatatgtgataaaatgatatgaagataattttaattattagtaaaggaggataaaatgtacgatattattgtagtgggcgccggccctgcaggtgtatctgctgcactatatgcaaagagccgtggcttcaatgtgcttttattagaaaaggacgaagtcggaggacttattaaaggcgtttcacacgtgacacactatgttggactagatgaaaacgagtcaggtgagacttttagagagaagcttgaagagcaaatcgcagacgctgacatcgagcttaagtatgaagaggttattgatcttgacttaaaatatgaagtgaagaaggtaaagactagacaaaattcttacaatgcaaaggtcgttataattgcaatgggctctactccaaaggatcttggccttgagaacgaaaaggaaattggtgttgaacactcagcactaggacttgatgatgagatcgaagacagaatcatcttcgtagcaggtggttcagacggagcagcaaaggaagcactacacctttctaagcttgcaaagaaggtctaccttatcgaagagagagatgagcttggcatgattgatgagttcagagaaaagattgaaaattctgacaacatcgaagctatgacatcttcgaagattgtaagtgcaagcggcactaaggacaaaatcactgaagtttgcatatacgattctaacgaaaaggaagaaaagatatttgaaaacggcgaggacgaatttttaatctttgcctacatcggacaaaagcctaacactgagctaatcaaggatagcttagagatggcgggtgcattcataaagactgacggagtaaagacatccataccgggtgtgtttgcttgcggcgatattatagataaaaagattagacagatagcaactgctgtagctgaaggctgcacatgcgctatcgaagcacaaaagtacttgggatattagtacttaaatattacgaagaaggggtgtaaaagatggagtttattggaaacgcactgacatttgacgatatactactagtgccaaatttttcacaaattttgcctagagaaactagtactgaaacaagactaactaagaagatcaaactaaatataccgatgatgagtgctggcatggatacagtaactgaatcaaagatggcgatcgctatggcaagagaaggcggtattggtatcattcacaagaacatgtctatagaggaccaagctatcgaagttgacagagttaagagaagtgagcacggtgttatcactgatcctttctacttatctgctgagcataagattgctgatgctgaagccattatgaaaaagtacaaaatctctggtgtgcctataactgatgaagacggtaaactagttggtatcatcactaacagggacatgagatttgaaactaacatggaaaagaagattgccgaagttatgactaaggatcatcttgtaactggcaaggaaggtgtttccatggacggagctttggaagttatgaaggttcacaagattgaaaaacttccaatagttgacgatgagaaccacttaagaggccttatcactattaaggatatagaaaagtcaatcgagtttccaaactctgcaaaggactcacaaggaagactactatgcggtgctgctgtaggtataactgaagatatgcttcaaagagttaaggctctatatgatgcaaaggttgacgttatcgttctagacactgcacacggtcactcaaagggcgtacttgatgctgttagaaagatcaaggaaaacttccctgacttacaagttatagcaggtaacgttgcaacttacgaaggcactaaggctctaatggaagctggtgctgactgcgttaaggttggtataggacctggatctatctgtacaacaagagttgttacaggtatcggtgttccacaagtaagcgccatcatggaagcttacagagcatctcaagaaactggtatacctatcatcgctgatggtggtatcaagtactctggagacgtaactaaggcgatagctgctggtgcagatgttgtcatgatgggatcattatttgcaggaactgacgaatcaccaggagaagaagttatcttcgaaggtagaagatacaaagaatacagaggtatgggctcacttgcagcaatgaaggctggttcatctgatagatacttccaatcaaaggctaaaaagtatgtaccagaaggtgttgaaggtagagttcactacaagggcaaagttggggaagttatatatcaattacttggcggcttgaaatcaggtatgggttaccttggatgcaaggacatccctacacttaagactaattcaagatacgttcaaattacaagcgcatcactaattgaaaaccatccacatgacataactatcactaaggagactccaaactactcgcctaagaacaatagggattaagattatggataagatgttaaaagttttagacaatggctacgtaaggctagtaaaccatttgggtagtgaccttacagtagtaaatgcagctagggtttcttatcaaaaagaatccttcgagcttgatcaaaatgacgagaagctaataagtttcttagctaagcacgatcatacatcgccatttagacatgctatgctgcaattcgaagtctacgcaccacttatggttgctagacaatggtggaagtacatcataggttcttctcacatggaaggcataggcgacactatgaacggctggaacgagtcttcaagacgttacgttactgaagagcctgtcttctacgttccgaacgagaacgagtggagaagtatgccggataataaaaagcaaggcagcggtgacccggttgctgctgaattaggttctgaatatacgaaagagcttcttgagcttattgaaaagggccaaggcctatacgaaaaggctatggaagacggcatttgctctgagcaagcaagattattcttaccagcttatggcttatatgtaagatggtactggacagcttctttgcaatcagttgcacacttcatcaagcaaaggatggacggccacgcacaaaaagaaattagagactatgcaaaggttatttacgacttaagtttggaagacttcccagtagctatgaaggctcttattgaaaacgtaaattaatgataatatattttacaaggcacggtttaacagaatacaataaggagaggagaattcaaggtttacttgattctcctcttacaattgaaggcaaagataaggcgaaggagcttggagagcgcttaagaggtgagggcatagagcttatatactcctctgatcaaaagagggctatggacagtgctaatattattaacgaggccttaaatcttgagataagaccaagaagaacactgcgcgaggtatcaatgttaagtcatgaaggtatgacttgggcagagagcgttgctactgatccagagcgtgaggaccttattatgcaaagacccgatttatttaacgaaggcggcatatatccatacaaggacgcgctagaggatgcggaggccttcttgaaggaactgattaaatgcagttatgagaaggttctagttgtaacgcacggaagcaagcttagagtaataacaactgtgcttgaaggatttgacttaaaggacgcaaacagggtagagcttataaaaggcttaagccttaagatttataagtacgatggaagtgagtttacgctccttcacgacgaccacgactacgacaattttgtataggaggcaagatgagatgagagaggatagatacgacaatcccttagttagaaaaccaatttatcaattattaataaagtatgcagtgccatctatactatcattcttggtaagcgccatctacaatatagttgaccagatcttcataggcaacattgtaggtcaccttggcaatgcggcaacgacagttagctttcccataggcataatatctacagcgctagcactacttttaggcataggaactgcgtcgaacttcagtatatacaagggcagaggtgacgacgagagagcagaaaggattgttgcgacaggcatcacaggactgcttttcgtgtcaattgtggagctcgttatagtcatagcctttctagatccattgttaaggctttttggcgcgagtgacaatatattccactacgcacacgactacgcttttataacatcacttgcgatagtcttcgttgtgttttcaatagcactctcgcacataattagagcggacggttcgccaaagtatgcgatgatgcttaacgttacaggtgcaatacttaatgttatcttggactacatatttatgattcacttcaagatgggcatcaagggtgctgcatgggcaacattcataggtcaagcagtaagctttgttctagcactgtattatatattcttcttgaaagataatccaattcgtaaaaaggatttcaagatacatccagaggaactagcagctatattgaagcttggttcggcagcatgtatcaatcaattagcaatggtagttgtgcagatagttatgaataacgttatgacatactacggagcaatgagtaagtacggacccgacataccactagccgcggtcggcatagcctcgaagctatatatagtcttgattggcttcaacataggactcgcacaaggtggtcagccaatcattggttataactacggagcaaagatatacagacgtgtaaaggatacctacctaacgaccatcaagatatctgtcatatacagcacggtcttcttcttgctagttgaaatatggccgcaaatctttgttaatatcttcggtaaaggcaacgaactatacatggagtttacaactatactactaagaatcactatgataatgacagcactaaacggacttcaaccaatcacggcaaacttctacacatccataggcaaggcgaaacttggtatctttgtttcattaacaagacaggttttattctacctaccactgattatagttttgccacaattctatggcatacttggagcactttacgcaacaccaatcgcagatttcatagcctttgtacttgcaatgtactttgtaattagagagtttaaagctatgaatagagcgggagatgaggtaatattaaatgcagaaattcgttaaattttttaaaatatttttaataacaatactagtttgcatactgttcttcggcttgtattattataagaagctttctaagaaggacaacaaactagttatagttgatgagactaagatcaatcagaagacgacagataagcttgaaggagagctagtatttgctttcttcggtatagatggagagaacggtcttggctatatcaagcaaaaacttgcaaggcttgatggcaagactggagaggataggtacttcactacaggtaacccatcagataccatgatgctagtaaagattgacaagaagacagctaaggttaatgtcgtgagcgtgccaagagatactaaggtcaagatagtaaatcacgaaggcttaagaaagattaacgcatcttttgcaaaggacggaccttacgcggccattgatacacttagagagttttcgaacgttgactttactaattacattgccgtagactacaaaggcgttaaggctatagtcgacatcataggcggcatagaagtagatgtgccgttcgacatggactatgacgacccaacagacacaccaccactacacattcacttaaagaagggcaagcaaaagctcgatggtaaaagtgcgatggagtttcttagattcagaaagtcgaacgaaggacagggtgataagttccttggcgacgtcggtagagtaactcatcagcagtactttataaaggagcttatgaagcaaacacttagcgcaaagaacattgcaaaattgccacgcatgatacaagcaggacttgagcatgtcttgacaaacattagcatagatgagatgcttgatttggcaaaggtatttacagcctacaagccagacaagcttactatagagacaataccaggcacagataagtttgaaggtggcgcgtcttacttcatcgcagatgaggaagagacagcaaagctatttacaaagatatttaagtaataggaggagaaagatggacgcattttatttttacaatccagttaaaattcattttggagaaggatcaattagagcactaaaggaagagatgaaaccatataagaaggttttacttacttatggcaaaggcagcatcaagaagaacggcatctacgacaaagttatggaagcacttgaaggcaaggaagtttacgagctttcagacataatgccaaacccaagagtagagaaagtttatgaaggcataaagttagttaaggacaacggcatcgacttcatactagcagttggcggtggctcaactatcgactgctctaaggcaatagctgcaggtgcaaagacagatgaggacttctggaaaaaatactttatcgacaaagacgatgtacttgatgcaactccactaggaagcgtgcttacaatggcaggcacaggaagcgagatggacaacggcggcgttatcacaaactgggaggaacaattaaagctaagcttcggcggcgacccgtgctatccaaaattctcaatacttgatccaacatacacatattcactacctaagcaccacttaatcagcggcacagtagatatgttcagtcacatcatggaagagtacttctcaatgccagacgaagaaaatacaacagacgaaatcagcgaagcacttatgaaaactataatcgaaaatatctatatagcactagacgacccaagaaactacagagcaagagccaaccttatgtgggtatcgacacttgccatcaacggcctaacatcactaggaaagcgttcagactggctaagccacagacttgaacacacattatcagccttctacgacgtttcacacggcatgggacttgcagtaatgcatccaaattacttaaaatatgtttacaagggacacgaaaagaaatttagaagatgggcagaaaacgtttggaagatggacacatctaagatgacagacgacgaagcggcacttaagtccatagaaagattgcaagaattcttcaaatccataggtgcaccaacaacacttaaagaacttggaataccaaaggacaatattgaagccatggcaaagaagacaggcgtatacaagacaagctactcagacctaaaactacaagacgtaatcaatatctacgagcaagcatacgaataaaagataaacaaaaaaatatatataagggaagaaatttttaatgaaagacattactacagataaactaatcctaagagacgcaaaagtcagcgatgcacaagacatgtttgaatacgctaaacttgaagaagtgacaaaatatctttcatggaaagcacatcaaacagtcaaagactcagagaaaattttagatttactaagcaaagaagcaaaagagaaagactcctacgtacttaaagccatagtcctaaaagaaaataataagatgataggcaccatagacgcgagaatctttggagaggatttaaaagacgcagagttcggttactgccttaacccaaagtattggaacaaaggttacatgagcgaagcacttaaagcatttatgaaagcacttcataaagaacacagcgtagagaatatatttggctgcttcgaaagagagaacataggatcgaagagagttatgcaaaagaacgagatgtactactacgaaacagtaaagagaaactttaagaacaaaggtgaggtcgaactcataagatacaaagaacttaatacaaagtaagacaaaagatataaagcagtggagtgagtccactgctttttttgtatgcaaaggcattttgcatgatgagtaaaattgctacacgaatgacgaatcgatgatatgtgacgatcgattgatgagtgacttgcattagataaggcaaaaagaaaaagagattggcgtgcactagagttgtgacgattgatacaatagtgtaaagtaaattgactaaattttgaataatgtaatattgtatgtaaaagtaaaattatttaaaaattaaaaattaaaaattaatttcttagataaaatgtgatgattgggcgaagtggactgacgaggcaagcggagtgtataagtacatactcgagcatgccgaggagggaacgagctcaagggcgcattttagcaagaaatatactacagctagtattagacgaaggatctagatacaagctttaaaatttttttaaaaaattttaaaaaaagagaaaaaagacttgacaaaggtaaggaataaatggtagaatggataagtcatctggaaagactccaggtggcaagcaaaactgaataaaagtgaaaagaacgatttaaaccaatcaatttttattgataaataatttcgaatttaagagccaaggttaacttgggattaaataaaccatttaatcgagagtttgatcctggctcaggacgaacgctggcggcgtgcttaacacatgcaagtcgaacgatgaaagagaatccgatctcttcggagtgaagaatctctggattagtggcggacgggtgagtaacgcgtgagcaatctgccttacacaaagggatagcctcgggaaaccgggattaataccatatgatatcacatcttcgcatgaagaagtgattaaagaatttcggtgtaagatgagctcgcgtcccattaattagttggtgagggtaacggcccaccaagatagcgatgggtagccgatctaagaggatgaccggccacattggaactgagaaacggtccaaactcctacgggaggcagcagtggggaatattgcacaatgggggaaaccctgatgcagcgacgccgcgtgagcgatgaaggctttcgagtcgtaaagctctgtcctatgggaagataatgacggtaccatagaagaaagccccggctaattacgtgccagcagccgcggtaatacgtaaggggcgagcgttgtccggaattattgggcgtaaagagtgcgtaggcggcaaattaagtcagatgtgaaaactaagggctcaacccatagattgcatctgaaactgatatgcttgagtcaaggagaggaaagtggaattcctagtgtagcggtggaatgcgtagatattaggaggaataccggtggcgaaggcgactttctggacttgtactgacgctgaggcacgaaagcgtggggagcaaacaggattagataccctggtagtccacgccgtaaacgatgagtgctaggtgtctgctcatacgagtaggtgccgtacgttaacacaataagcactccgcctggggagtacgtacgcaagtatgaaactcaaaggaattgacggggacccgcacaagcagcggagcatgtggtttaattcgaggctacgcgaagaaccttaccaggacttgacataccaaggaaagtttttagagataaaaaccctagatttatctaccttggatacaggtggtgcatggttgtcgtcagctcgtgtcgtgagatgttgggttaagtcccgcaacgagcgcaacccttacatttagttactaacaggttaagctgaggactctagatggactgccgatgacaaatcggaggaaggtggggatgacgtcaaatcatcatgccctttatgtcctgggctacacacgtgctacaatggtcggtacaaagagaagcgaaatagcgatatcaagcaaacctcaaaaaaccgatcccagttcggattgatctctgcaactcgagatcatgaagccggagttgctagtaatcgcagatcagaatgctgcggtgaatgcgttcccgggtcttgtacacaccgcccgtcacaccatgggagtaggcaatacccgaagcctgtgagctaaccgtaaggaggcagcagtcgaaggtagggtcaatgactggggtgaagtcgtaacaaggtagccgtatcggaaggtgcggctggatcacctcctttctaaggagaacattagttcttttcactttgggctttgcttaaaaacaaatacccaaacaaaaccatcaacatgggggtgtagctcagttgggagagcacctgccttgcaagcagggggtcaggagttcgaatctcctcatctccaccatgacttttcaaaagaaaagtcaaaaccaaataaaacttaataaccataatcaaatgaaaacgaaacgacatttataaagaaaataaatacagtaaattttaacaataagcgttaaaggatttttaaaaaaattaggtcaagttactaagagcgcagggcggatgccttggcaccaagaggcgaagaaggacgtagaaagctgcgaaaagctccctagatctgcaaacaagaaacgaaagggagatatccgaatggggcaacccacttaagcaaaccttaagtatctatatatgaataaaatagtatatagaggcaataccgggagaactgaaacatctaagtaccccgaggaaaagaaagaaacatcgattttcaaagtagcggcgagcgaaatggaaagagcccgcttaaagaaatactaaaacaatatccgaatgatcttggaaaaatcatccatagaaagtgaaagacttgtaagagaagatattagcatttcaataagcttaacgagtaccacaaggcacgagaaacctggtgggaacatgggaggaccacctcccaaggctaaatactacttggtgaccgatagagaacagtaccgtgagggaaaggtaaaaagaaccccgaaaggggagtgaaatagaacctgaaaccctgcgtttacaagcaaagaaagcacgtgaaaagtgcaatcttgtactttttgtagaacgggccagcgagttacttttgtaagcaaggttaagaagttaagcttcgaagccgaagagaaatcaagtcttaatagggcggtttagtttacaggagtagacccgaaaccaggtgacctatccatgagcagagtgaagttaaagtaaaatttaatggaggctcgaaccgggtgtggtttaaaacacatcggatgacttgtggataggggtgaaaagccaatcgaacctggagatagctggttctcctcgaaatagctttagggctagcctttaggatgtttaatggaggtagagctactgactggttgcggggtgtttgtacattaccaaaacctatcaaactccgaatgccaagaaaacaaacctaaggagtcagacatagtgggataagcttctatgtcaaaagggaaagagcccagaccatcagctaaggtccccaaataccgattaagtggtaaaggatgtgaagttacccaaacaactaggatgttggcttagaagcagccatacatttaaagagtgcgtaatagctcactagtcgagtgaccttgcgccgaagatttccggggctaaatcggataccgaagctgtggactcaacttgagtggtagaggagcattgtgtaataggctgaagcagtatcgaaaggcgctgtggacgaaacacaagagagaatgctggcataagtagcgagaaggagtgtgagaatcactcccgtcgaaaacctaaggattcctgagcaaggctcgtcccctcagggtaagtcgggacctaaggccaggcctaaaggcgtagccgatggacaactagtaaaaattctagtactatcaaatatcgtataaatgaagcggggacacagaaggataagctaagcgtaccagatggaagagtacgctcaaataaaaaggcatgccaggactaataaccaggctaagctgatttatgatgaggatcgaaacaaagtagagaagtagccgatttcacactgtcaagaaaagccgctaaatagataaatgatacccgtaccgtaaaccgacacaggtaggaaaggagagaatcctaagacgcgcggaagaacctttgttaaggaactcggcaaaatgaccccgtaagttagcgagaaggggagccagagcgatctggccgcagtgaataggcccaagcgactgtttaccaaaaacacaagtttctgctaagtcgaaagacgacgtataggagctgacacctgcccggtgctggaaggttaaggggaaatgttagcgtaagcgaagcatagaacttaagccccagtaaacggcggccgtaactataacggtcctaaggtagcgaaattccttgtcgggtaagttccgacccgcacgaaaggtgtaacgatttgggcactgtctcaacaaaggatccggtgaaattgaagtaatggtaaagatgccatttacccgcgacaggacggaaagaccccatggagctttactgtaggctgacattggatttcggtagtacatgtacagaataggtgggaggcaaagatcctggtacgccagtatcagaggagccgaaaagtgggataccactcctgtagtgctggaattctaaccttgagccgtaaaccggtttagggacactgtcagttgggcagtttgactggggcggtcgcctcccaaacagtaacggaggcgttcaaaggttccctcagcacggacggaaatcgtgcaaagagtacaaaggcagaagggagcttaactgcgagataaacagatcgagcagatgagaaatcaggacttagtgatccggtggtaccacgtggaagggccatcgctcaacggataaaagctaccctggggataacaggcttatctcccccaagagttcatatcgacggggaggtttggcacctcgatgtcggctcgtctcatcctggggctgaagtaggtcccaagggttgggctgttcgcccattaaagaggcacgcgagctgggttcagaacgtcgcgagacagttcggtccctatccgtcgtgggcgtaggaaatttgaaaggagctgtccttagtacgagaggaccgggatggacaaaccaatggtttatgagttgtaacgccagttgcatagctcagtagctacgtttggaaaggataagagctgaaagcatctaagcacgaagccccccttaagataagatttcctttaagtaagacaccttgaagaccacaaggtagataggcagtaagtgtaagagtagtaatactttgagcctaactgtactaatatgtcgaaaacttgatcaaaagacgcttgttgaagaattatggttattaagaaatgtggcagcaatagcaagagggaaacacccgttaccataccgaacacggaagttaaggctcttaacgctgaaggtacttggttggagacgacctgggataataggtagccgccacttaaataagcttgtgtagctcaatggcagagcaaccggctgttaaccggtaggttgtaagttcgagtcttaccacaagcgccaaacaagccggggtggcggaactggcagacgcacaggacttaaaatcctgcgacccctaaaggtcgtatcggttcgattccgatcctcggcaccataaaagacatcgcgggatggagcagctggcagctcgtcgggctcataacccgaaggtcgcaggttcaaatcctgctcccgcaaccataaaagttacggaagagatccaataaacaaatagatatcaataagacggttcagcagactgtttcagaccaatcgaacaaactacgttgttctcttgggaaacaggttgcacttgacctactaaagttcgccctagcgtgctcactaagttaggtcaatgaaatcctgctcccgcaaccataagattacgggtatagatgaagtccttaaatagactatcaaaagacggttcagcagacgttttttaccaatcgagcatcgcaaagcttgctctcttggaaaaacggttgcacttgacctactaaagttaattacggctgacgcctaattcactaagttaggtcaatgaaatcctgctcccgcaaccataaaagttacggaagagacctttatatataatttaataaaaatattaataagtaaatatggccctatggtcaagcggttcaagacaccgccctttcacggcggttacccgggttcgaatcccggtagggtcaccatttttattccaaaacaagaaaagaatttattaattttatattgacaaattctttaaaatgtattaatatagaagtgtagtcacttaggagagtaatgtaagctactttgttgattacagtctgttatggcggagtagctcagttggctagagcattcggttcatacccgaagtgtcaggagttcaaatctcttctccgctaccaagttctttttagaactaaaagttaatagatttataattcatgcatggacgattagctcagctgggagagcatctgccttacaagcagggggtcataggttcgagccctatatcgtccaccatgcatggcccggtagttcagttggtttagaatgctagcctgtcacgctagaggtcgtgggttcgagccccatccgggtcgccataaaagattaggcgaaatttatcgcctaagttgccggcgtagctcaattggtagagcaactgacttgtaatcagtaggttaggggttcaagtcctcccgccggctccatatcttttagcatttaggaagagtacccaagtggctaaagggggcggactgtaaatccgttagctaagctttcagtggttcaaatccactctcttccaccatatgcgggtgtagctcagtggtagagccccagccttccaagctggttgcgagggtccgattcccttcacccgctccataattcaatatatgcgactatagctcagctggatagagcaacggacttctaatccgtgtgccgggggttcgactcctcctagtcgcgccattgttgggatgtagccaagtcggtaaggcaccagactttgactctggcattttcgtaggttcgagtcctaccatcccagccatgcggagaggtatcgaagcggtcataacgaggcggtcttgaaaaccgtttgggtgcaagcccacgtgggttcgaatcccactctctccgccattttttttatttaaaatggtaatgaccataatttaataactattggagaagtactcaagtggctgaagaggctcccctgctaagggagtaggtcctaatttacggggcgcgagggttcaaatccctccttctccgccatatgtggacctttagctcagttggttagagcgtccggctcataaccggcaggtccggggttcgagtccctgaaggtccaccattttaggggtttagctcagctggtagagcaacggtctccaaaaccgtgtgccgagggttcgaaaccttcaacccctgccataagccttttataggcttatttttttagctttttattctttgtatatatcatttagaatggatgtgtttctatgaaggcacgcgctttttttgaaacaattgaagagatatttttgcagtctttaaaagatgaacttaatctaacacctaagcctggctgtgttgatggacatgatagtggtccgcacgcagacatggattatgatgtgtttttaagtagtatttcatctcttaagggctatttttttgaaataatgatgatttcgaacacgcctaagagctttgctgatacctttgaggctattaggcctattggtatgatctatgagaggaagatgtatgaggctacatctgggattaacacgcacaaaggtgcgatcttcactcttggtgtgattgcctgtgctatcgggaaaatttattatgataacaaataccttactattgacttgattagtgagtatgttaagaagctttgcgctaatatttttgacgattttagcaaagaagaaatgcaaaagacgaatggcatgcgcatatacaaaaagaatgctaagcactctggcataaggtatgaagcgaagaatggctttaagacggctcttgatgcttatgacttttataaggaagtgaaggatttcttaaggacttttgtttatatagtagcaactcttgatgatacaacgactattaatagagtaggtgagtctggtcttaatttctcaaaagcttatgcaaagaatgttttaaatagtaaaaatttttctgaagatatcattgctatggataagctatacacacagaagaatatttcaactggtggctgcgctgatactatagagcttgtttacttttttaagcgtattgatgattttatggtatcttttatgaaggattttttaagggcgaaggaagctagatggaagatcattactgatgcaattgaaagctacaagatgccaataattactcttaacttaaatatcaaaggtatgcataaggacaagtatgagttcgctcctttatatagtaaggcaaaaacgcttttagcttcttacgacttagtgtatgaggatagtgatgcgttcacagctgcatacttagcgaagtctgatgcaattactgagaagaagaaatttgtgagcttagaagagtcttatgagtacatgcgctttgttgatatcgatgtgattgatagatcttttgcgcctatatcaagatctcagcttgaccttcctaagaggacctgtatagtatgtggggaagataggtttacatgcatgcgtgaggcaaggcacactcaagaggagtttaatgctcagttagacgatgctttattaaatcttgacaaataatagagtttactatataatattaactatggaaaaaaggtttatgaacatggcaatcagagaggcgataaaggcttataggcttggtgaggttcctgtaggtgctgtcattgtgaaagatggcgaggtaatttcaaaagcctacaatgaaagcattacttcgactgatgcgtctgctcatgcggagatgcttgctataagacgggcgtgcgagaagctcaagaactacagactcacaggctgcgacatatacgtaacgcttgaaccttgtatgatgtgcctgggtgcgattttagaagcacgcataaaaaacttatatataggtcttcttgattacaagaagggctcttgtattagcaaaatgcagcttcacaactcatctcttagctatcataagctaaatgtagtatatagtgaaagcaagatttataaattccttttacaaaactttttcaagaccttaagaaacaaatagggagtggtatcgaagaggtcataacggggcgcactcgaaatgcgttaggggccatgctccacgtgggttcgaatcccacccactccgccaatacaatattttacgtgcactagtagctcagttggatagagcagcgccctcctaaggcgtgtgccgggggttcgattcctctctagtgcgccatttctttttacatataaggaggtttttgacagcgtgagttttaagttaaaaaagcttggtgttgtggcaggtctagcagttttagcccttgcacttactttgcttttcgtatataagaattatttctctaaggtggaagttttttcttctggagagtccttaggtgtttatgcaagtgtgcataattttaatgaagctattgataaatataaatcaaaatatgaagatagatatgatgtagatttaaaaaaggctaaatatgagttcaaaagaagcgatgaagagccgaagaatactatatctgagtgtgcttttaatattgatgcttgtgccatcgaaaaggatggtaagtcactttatgcgcttaaaaatgaagatgcggcgaatgaatttttacaatctcttgaaaatcattactacagtgacaatactatgagcgtagaaattaaggatgatgtaaaaatttctaagttaactatgcctttaagcgagattaaaactgtaaaagaagcgcttaaagaggttgtagagaacaataaactaaagaatgacaaggccataaacgtgcttttgacaaagaaggaaagcactgaagaggttatcactatgcctgttgagagccaagaagatccatctcttccaagaggcgaaactgtgctttctatggacggtgaggaaggccttaaagatgttaagagcatcgcatattacgagaacgacgagcttattagcaaggttgttttagaggaaaatgttaagaaaaaggctgctccaaagcttgtgcttgttggaactagaaaggctttggctgacggcagctttataaaacctaccagaggtggttattcctcaggttttggtagcagatggggcagaatgcatcaaggtgttgacatagatgctgattatggtgatgacgtatttgctgcagatggcggagttgtaagctacgcaggtactcttggtacttatggcaagcttgttgagatagaccaccaaaacggttacaagacaagatatgcgcacttaagcagtataaatgtttcaaagggagatactcttactaaaggtgagtttataggcaaggtaggagcgactggcagagtaactggaccgcatctacactttgaagttattgttaacggcaaggctcaagacccaatgaattacttaagaggatattaaaatgaaacgcaaagtactagtacttttgctaatagttatgtcgcttagcttaatttcatgtgcaaagaagatagatgatacaaaagcaaaagacattgccgaatcttgcatgcaatctctaagagactcagatggcaaggcacttttcaaagcagcaaagcttgaaggtcaaaagcaaattacggaagaagattaccaaaggtctttggatcttactatgcaaaaacttggaaaattcataaaatcaaatacagaagactttatatataaggatgatagattcatattaactagctatgatgagtttgagtatagagacgctacatccattatcgagctagacaaagctgggactatggtcaactcttacttcgtgcttactaatccaaaatgtgaagtaaacgatgactttgaagaaaagccatttacactgaacaatggtacagcaaagatgtatggcatcatatgcaaacctaagaatccaagcactaaggcgatagttgtgatgctgcaaggctcaggtcctcaagatatggatgagaccataggtctagcaggcaacaagccattcaaagatattgcacatggtcttgcaaagcttggcatagcaacacttagatatgacaaaagatatgtaaacaatgcagctgttgattatactatagatgaagagattatctccgatgcaaaaaaagttatagatggactaaaggaagacaaagaatatgatgaagtataccttctaggtcactcgcttggtgccatggtagcaccaaagattgcaagagaagaaggacttaagaaggtagcaatgctttctgcttcaactatgaagtttacagacatcatctacaatcagcagcttgagtatcttaactcgggtgcggtaggtcaagcagctgcagaatttcaaaagaaggagcttgacaagatcaaaaagcaaattgatgagatgactgagaagactaagggtaatttctttagtatgcctgcttcatatgtgtactcagttaaccaagttagtcccgtagaagacataaaagcagctgaatttgatgtatttatagcacacggctcaaaagacttccaagtgaagaaagatgagcttgataagtttgaaaaagctttgaatggtagagagcatgttatatacaaattatacgaaggacttaatcacatgatgatgccagaggactcagacaaattctctatggatatatatgataagccaaacaatgtaagtgacgacgtaattaatgatttagcagaattttttatatagacagattggcgaatagtgatattcgccttttttcttaaggagatgtatatgttaagagggattgcatttgcactaatatttataggtgtatccatgcagcttccaagcaaagtagaatcatataagaaatataagagcatagacaatttactagagatgcttgcttatctattaatagcactaggctcattcctacttgcgcttggatacatctttggataaatattatatacgcaagaggtaaactagatattcagctaggacaaggagctagctttatataaatataatttttataggaggattttatgaaattcaaaagactaatggctctaatgcttgcattaatagtgttctgtgcatttgctataggctgctctaagccagctagcgatgcaggaaaaactaatgaagaagaaaaagtagccgatgaaacaaatgaagctgaggctacagaagagccagcagctgaagaggacgacggtcctgtacaagaaggaggaattttaacttcatatacgtttatgatgccagaggtatttggtttgtttgctaacgattttaactacggagcaagagatgtatgtccaaacgtattcaataaacttgtaaagatgaatgctaactatgaaattattccagatttagctgaaagctacgagtacaaagacgatggcaagactatagtcttccacctacgtgacaatgttaagtggcacgatggtgtagactttactgctgatgacgtaaaatttacttttgacatgtacaagtctggacaaactgtattgggcgatttcttttattaccttgaagcagttaatgttatagacaataaaactgttgaattaaaatttaaagaagcaggagctaatatcttatctttctatgcatcttatgacgtttatatcatgcctaagcatatatatgagggctcaaatgtagcacaaaaccctgcaaacaaagcgcctataggcacaggtccattcaagtttgtagaaaagactgaaagtgctatcactcttgaaaagaaccctgattactttggcgaaggaccatatctagataaacttatcttcaaatattatgaagatggaaatgctatgatacaagattggtcagataataaacttgatattactggcgctttcccaaaagacattgatgaattagttaagagtggcaagtgcaaatatgtagaaaatgattcaacaaacaaaataggtctaatattcaatactaaaaatgaaaagttctctaatcctaagctaagagaggcaatcctttatggactagatagagaagagcttgctaaaacttaccctggtggaagatttgttccagctgagtactttatacctaacgtttacaagtgggcacttaatgatgatgcaaagttgcctcaaagagatctagaaaaagctaagaagcttatggaagaagcaggctttactatggacagtgacggatactacttggaagcaagtatggatacacaggacaattcatgccctgaagaattagctaaagcacttgaagcacaatttaaagatatgggtataaagcttaagattaataaacttgattggtcagcatataatgacaaaattatgactaataaaaattttgaaatggctttctcatatagttatttagatccagatgtatcatctataggaaattcatttagatctgattcatactcaaacagctctagctatgcaaacgaagagatggacaaagagcttgctcttggcttaagtaaacttactcaagaagaaagagcacctcactacaagaaagttcaagagatcttaagaagagacttaccagttatcttcctaatggatatgcattctaaatatccacttaagacatatatcaagggctaccctggagacaaagttaaagacgaagtttcttggggagaatacacgctaacttggatagatgaaagcaagaaataatatttaacttaataaacactaaatgagcgtaagaggcaatttgctttttacgctttttcttttctattaatagcttttgggtataaatacttaggtgattatatgaaaaatatcaatgacaatatcaatctagcagatgaattatacgataaaatcgagagggaacttggcaagcttaaaaaggtgaagatacttgtgctaggcaagactggtgcaggcaaatcgacactaatcaatgctttattccgtgaggatatattaaggacgggagttggctatcccatgaccaaaaacattgtcaaggtagagaaggacggtgtgcctcttactttatacgacacacgcggacttgagcttgataacgactcgcgccttgaagtatacaaggaagtagcaaactttgtgagcgaaatgctgatgaagggtgatgatgaaaaactgagtctcatctacttttgcatcaacgctcaaggccttaggatagagaaggaagaggaagaacttataagaacgctaagcaaggagaataaagtcatcatagtccttacaaaattcttctctgaagaagctaaagatttctacgactttattaaaaatatgaatatgggtgagtttgcgatagctccagtacttgcgaagaaccttaagattaaccgtgacaatgttattgtctcgcatggacttgaggatcttgtacagatgagtatggacgcacttgaagaagaataccaaatatcttttaacaatgcccaacatgcagatttaaaattgaaagcagaaaaggcacgcagttgggcgaagaaatacattgcctcaagttttggagttggtttcgttccaataccattctccgatgcatcggtactggtgcctatggagctaactatgcttgctcacatcacagccatctttggagtgccagttaataaaaagagactcgcttcactacttgctggtctcggcggaactatgggcgcgacatatcttggacgctttatagtaagtaatgcgctaaaattcttcctaggcgcaggaactgtggtcgctggtctcataagcggcgcaactgcttcagccatcatggcatcacttgcctttgcctacatcgaagtactgacagttcttcttaaaaaagcaaagtctggtgatgagattgacgacaaagagcttgaagagatgctaaagaagctctataaagataatttaaagaatcacaagaagcttaaataaattaagaccttaagagttaactcctaaggtcttttactttgcttatattaaactattatctatatgtgaaccaaacgaggatgtagccgactaagactgctgtcaaggtgaacggcacgctcatcttcataaagtctttgttctcaacagtgtagcctgcctccttaagtataccaagcgaagcaatgttcgctgaggcacctattggtgtgatgtttcctccaagagtcgcaccgctaagtagtccgaagtagaagactgtcatgtcgaatggcacgtgagttgagataacagaaagaactggaagcattgtcgcaacataaggaatattatccacgaaggcactaattaaaacgctgccccaaacaagtgctgtgtataataaaagaggtctatctgctagctttatgaatagcttcgctatctcgtctataactccagcattttcaataccggatataattatgaagagtcctgcaagtagtccaagagtgttgaagtcaatctcgcttgcaacagtctttattatggacttgtctttatgtcttaataggtgataaattacaccaaagacagctacgccaacgcagataaggccgtttagtatgtcaatcttttcatcttgtggtataaatgatgcaaagattaaaagaactatcattagtattactaaaattgttggcatatagtccttaacctttgttacttcaatcgcgtcaaccttgccttgcatatcttttgtttgaaagtaaataatagcagaagcgattattgccgatatttgcactatccagaacatacccatgcgtccattatatacgaagaagtcgaagaaagtcatgtttaacgcacttcctaggagtatcgaagatgtatcgccgaccaaagttgccgcaccttgtaaatttgacgatatggatatagctataatcatttttactggtgatatctttagttttttcgctaagctcatcgcaactggagctatcataagtactgtagcaacattatcaataaaggctgagacgaagccagcaaacattgataagaaaagtatgatgagccttatgtccttaaccttgtttatgattaggtctgcaagtctcgttggcattaaactttctgagaaaagcgagacaagcatcatagttccacctatcattaagagcacgttgaaatcaattgcgccccaaactgtgtttattggaactatgtttaaaattataaaaacaagcgcacttatgccgacaactagtggtctatgattaacgaatttaatcataaatatgtatgttataatgaaaagtgcagctgcgagtatgagtctgtccatattgtcctccttatatattagtcttaactaaattattatataaagaatagtaaaaaaagtcaaggcgcgcacaggcttatcttgattttttcttgcgtatgctgtattatgtttataggtgaaattatgttagaagagttaaattatgaagatatagaaaatttagataatatagtcttagttgatgtaaggagcgaagctgagtataagaaggcacatatacctggcgcgataaacatagccatactcaataatgatgagagaagcgaggtaggaaccttgtatgacaaggtctcatatgaacttgccaaggtcaaggcggtcgagtacgcatcgaagaagcttcctgagctttacaaaaaatatttagagcttgaggagacttgtgacgagatcgttatatactgcgacagagggggctataggtctagcgttcttgaaaagacttttcgtgcgcttggtatgcacatctctaagcttagtggcggctacaaggcatatagaaagtacatcacacaaaagctagatgagtatcttgacaggatcaaagtccttactctatatggacttacaggcacgcacaagacctatatacttagaaggcttaaggaagatggacttaaggttttggaccttgaaaagtatgctaatcatagaggctcaatctttggttcagtcggtttaagtgagaaggtttcgcaaaagatgttcgattcctacatctatgaggcgataaagaaagaccctgatgcaacttatgtaacagagggtgagtcaagaaggataggtgacatcgtcttagatgaaaagctatacacaaagatgcttgagtcggaaaagattttagttgaggcctcacttgatgagagagcaaaaaacatctgcgaggactatttgccaaaggacaacgaagaagaactcctaaggaccttcgaagagtttaaaaagtttataagcaaggagaggtacgaaaaatacaaggacatgctactagctaaggattacattgaactaatcaaggatatgatgaagagctactacgatcctaagtactccttcaagcaatatgaatacatcaaaacctttacagatgcaagctatgaagacatcagagattttataaaaaagcgcttgacatattaatctagttatgctaaactatggatgtagtattaaatactaagtggaggcaatatgaaagttaaaatattaaatggtcttagcgagttaaagcttccaagatacaaggacttgcctgactttggtatatattcagagcagctagtcgagatagtaaacaaagctttggaagcgatgttcgatgaggacaataaactaacaaagtccatggtcaataactatgtcaagcacaagatcatgcctagcccaatcaagaagcgctactttcgtaatcacatcgtttattgcatagtgatcacggttctaaagaacatattgagtatagccgagattgatgatggcatcttgcacgagcttaagaagagctcaatcgaagagtcgtataattacttttgctacaaacttgaagacgtgatgaaactcatcatagatatcttggaaaggcaaaaaagtgacggagtgaagataagaacatctatcgacatagaccttgacaagaggaacggttttacgcttgcaattgttagcgtttgcacaaaagttattacacaaaagctattagaatacgagcttttaaatgctaaggaggacatatgagtaaagtaggaataattatagatacagcctgcgacgtacctaaagaagcatatgaaaaattaaatgtagcaatgctgccactatgggtgcacttttcagacaaatcatacagagatgttttagatatagaaaaggatgagttttatgacttacttgataaggagtttcctaagacaagtacaccatcgccagtagagataaaagatatagttgacaaagaatttgcagacggcgcagatgaagttataatcatcacattatcatcaaagcttagcggtgccaataatttagcaaatcttatagctatggactacgatggaaaggtgaaagtttttgatacaaagaacatcgccataggtgcaggcttttatgcatatagagcagctagcctaagagacgaaggacttggtgcagacgagatcatcaagattatgacagatgacagggacgctatgaagtctaagacatactttgctataccagaacttactaaccttatcaatggtggaaggataggcaaggttcaaggtgttatcggtcagttcttaaacatcaaacccatcatcacatgtaacatggacggagtttactacgccatcgacaaggtaaggggtttttctaaggcacaaaagaaacttatagatagaattaaagaagaactaagcggtgtgaaggactattacttagcaatttgccacggtgcaaatcctgaagcatttaatttagttaaggaagcacttaaagacgaagtagcaaaggcgaaggtatatgttgaagaacaaattgcaccgacactagcagtacacacaggcagaggcctagtaggtgttgcgtattataaattatagctatcaagcttaggagattattctcttaagctttttttaacaattttgtaagatttaagtgcttgtatatagctttgataagttatataatatacttaacgatatatcagacgaaagcacaaggaaggtggttttatgaaacttaataagaaaaatatgttttttgtcttatgtctattagcattaaacctattatttatcagtgcgtgctcaaataatattgcttcgaaatttccaaaagatgaggacggctatccagagcaaaattacgcaatgatagatggcgaagtttatgaggtagaaaagaaagaaggtatgtatggaaaagatgaaagtgataatcctgatgaaaagaccatagacataggcacaaataaagatgaagtagaagtagtcttgccagcaggaaattgctgtgacgagtgggtcatatcgccaaagaatgatgtagccgaaaaaaccttagtggaatttaaagttaagggcgaattaaaagaaggaggcccgtcgacttgtgtagacgtatataaagtgaaagttaatggcgatgagaccatagagtttaaaaatgtaaacgttacgaatgaagatgaatatgaggctaaaaaggcttactttgtattaaaaattagggtaaaaaaagaaaagtaaataaggaggaataataaatgagtaaaagtaaaaaaataatatatgccatattaattattgtaataatttttgcagcatataaattgattaataataaaaatacaaataatgaagaagttttatatccagctattaacgatgagctaattagtgaattggaagatggaaagaaaccatatctatttgacagtgaaggtgttcttaatgaatatctagctaaaacatattcagatagcaaatttgaggtaaaagataaaaaagacagtggcaataccattatctataatataaacttagctgataaggataaagattttgaattgactttgaagcaaaaggaaattgaagtgaataaagaaaagttaaatatatgggttgttacagatagtaaagaaataacaaagaagtaaatagattatataaggacttattgattaagtccttatatttttgcaaaaaaacatttcataatgattgaaaaatgtttttcttagtgatataattagaatgtaatttttaaggaggatgacgacatggaaaagttagaacaagtatatgaaggcaaggcaaagaaggtcttcaagactgatgaccctaagaagtttattttgtcttataaggacgatgctactgcattcaacggtaagaagaaaggtactatagttggcaaaggggtagtcaacaacaagatgagcaacttcttcttccaaaaattagagaaggaaggcataccaactatatacatcgaagaattaaacgacagagacacactagttaaggctgttgagatagttccacttgaagttatagttagaaacgtaactgcaggtagcttctctaagaggatgggtgttgaagaaggtaaacagttacttcacccaatagttgagttctcatacaagtcagatccacttgatgacccattcatcaacgatgattatgcaacagcacttggtcttgcaacaaaagaagaagtagaaactataaaagactacgctagaaaggttaacgaatacctatgcaagcacttcaaatctgttggcataagactagttgacttcaagttagagtttggtagatacgacggcaagatcatcttggctgacgaaatcagtccagatacaatgagactatgggactacgaaactaacgaaaaacttgacaaagacaggttcagacgtgaccttggtaatgttgaagatgcataccacgaagtcatgagaagacttggactagaaaagtaatgtttgataaaatgcatgaagagtgtggcgttttcggtgcttattcacttaagcacgaagacgtctctactctgatatactacggattatttgcgttacagcacagaggccaagagtcttgcggtattgctgtaacagacacttatggtgcgcaaaatgttgaagtttataagaacatgggccttgttaatgacgttttcaacaaggacaatctagctaagctaaacggcaatcttggcgttggtcacgttagatactcaacaagcggtaactccaatgttgcaaatgcgcagccactagttataaactactggaaaggcactttagccatcgcgcacaatggcaatattgtcaatcaaaaagcactaaaggatgaactttcacaaacaggagccatcttccaaactacttctgattctgaaatcattccttatcttatagcaagagctagacttgaatccaaatctgttgaagaggcggttgcaaaggctatgcctaagatagttggtgcgtattcacttgcaatagcaagtccacaaaagcttatagctgcaagagacccgaacggttttcatccactttgcataggtcaaaaagaagatacatactttgtgtcgagcgagtcatgcgctcttgacgcagttggagcaaagttcataagagatgttgagccaggcgaagtcgttgttattaatgaagatggcataaaatctgtctacaaatacgaagctaaaaaatccatctgcatctttgaatacatctactttgcaagacccgactcagttatagatggcatcagcgtttatgaagcaagattaaacgcaggtaggatgctacacaagagatatccagttgatgcagatgttgttgtcggcgttcctgactcaggcacaccagcagcttatggttacgcacaagagtctaagataccattctccataagtttcatcaagaacaactatgtcggcagaacatttattaagcctacacaagatcaaagatcgacaggagtttccataaagctaaatatacttaaggacgaggttaaaggtaagaagatagttctagtcgacgactccatcgttagaggcacaactatgaaaaacattgtcaaggatcttaaggaacttggtgcaaaggaagttcatgttaggatatcctcgccaccattcttacatccgtgcttctatggtactgatgttccaacaaacaaagagctaatagcttataaatacactcaagacgagattagagactacattggctgcgacacacttggctacttaaaggttgaggaccttaaggagcttgtaggtggcaggtgtgactattgcaacgcttgctttactggtaattatccaacagaggtggaagatggacaaatataataaatatatatcgccgttctcagaaagatactcatctaaagagatgcagtatatattttcagaagaatataaatttaaaacatggagaaagatgtggatagcccttgcagaagcagaaaaagagatgggtctagacatatcagatgaagctatcgaagaaatgaaggcaaacaaggacaatcttaacatcgaagtcgctaaagagagagaaaagcttgtgcgtcacgacgttatgagtcatgtctacgcttatggtcttcaagcgccaaaggcaaaggcaatcatacacttaggagcaactagctgctacgttggtgataacactgaccttatcactatgcatgaagctcttaagcttatcaggaaaaaagttcttacagttatgaagaatcttagagactttgccatgaagtacaaagaccttgacacgcttggctacactcactaccaagcagctcaaccaacaactgttggcaagagagcatgtctatggcttcaagacctttacatggacctagaagagctagataagttattactagactacaagctacttggttcaaaaggaactacaggcacacaagcctctttcatggaactttttgacaatgacgaagcaaaagtaaagaaagttgatgaacttatagtgaaaaaacttggtttcgacaaagttttaactataagcggacaaacatatacaaggaagatagacgccaagatacttaatgttcttagcctaatcgctcaaagtgcatacaagttctcaggcgacttaagactacttgcaaatttaaaagaaatagaagagccactagagaaaaatcaaatcggttcatctgctatgccatataagagaaatcctatgcgtgcagaaagaatcgcatcaatctcacgctacatcatagtaaactcacttaatccgcaaataactgctgcaacacaatggttcgaaagaacacttgatgactcagctaacaagaggatagctgtgagcgaggctttcctagcacttgatggagtactagatatatacatcaacgttagcgacggactcatagtttatgaaaatgttatcaaaaagcacttaaacgaagagcttccatttatgataacagaaaacatacttatggagtgcgttaaacgtggtggcgacagacaagcccttcatgacaagatcagagtgcactcaagagaagcacaaaagaggatcaaagaagagggcaaggacaataatttattaaagctaatttctgaagacaaagactttaacttgactatggatgacatagaagagataaaggctgcatcaaagattagcggtagagcatcttcacaagttgaagaatttgtaagtgaaactattgacccgatacttgaagagaacaaggacagcatcggtatcaaagttgaactaaatgtttaggaggtatatatgattacagctatagtaggagctaactggggtgacgaaggcaagggtaaagtaaccgatatgctagcatgtaatgcagattatgttgttagatttcaaggtggagccaacgctggccacactattatcaataattatggtagatttgcacttcatctattgccatcaggagtatttaatgaaaacactgtcaatatacttgccaatggcgttgcattaaatataccattcttcattaacgagcttaagtcaataattgatgcgggcgttaaagagcctaaagtttatgtatccgacagagcacaaatagttatgccatatcatatagactttgataagtacgaagaagaaagacttagcaaggcatcctttggctctactaagtcaggtattgcatatatattcgcagataaatatcaaaagataggcttcgaagtgaatgagctttacgacgaagaatatctttctgaaaaattagatttgatactaccaatcaaaaacgctatacttaaggagctttatcataaagagccgcttaagaaggaagatgttttgaagacgcttcttgaatatggcgaaatgattaagccttatgtcaagaacacatccaagatgcttagaaaagctatcaaagatggcaagaaaatattatttgaaggtcaacttggcacactaaaggacactgatcaaggcatctacccaatggtaacaagctcatcaacacttgctggctacgcatccataggagctggagtgccaccatatgaaattaaaaacatcatcgcagtgacaaaggcatactcatcagcagtaggcgcaggcgagttcgttagcgaaatctttgatgaagaagcaaatcaattgaggactcatggcggtgacaaaggtgagttcggcgcaacaacaggtagaccaagaagagttggctggttcgacgtagtcgcaacaaagtacggcatcgaaatgcaaggcgcaacagatattgccttcatggtcgtagacgcacttagctacttagatgaaataccagtttgcgttagctacgacatcgatggcgagatcacagatgaatttcctaacacatccaagcttaagaaagcaaaacctgttttggaaagacttaagggctggaagagcgacataagaggcataacaaagtacgaagaacttccaaaagaagcaagggactacatcgagttcatcgaagaaaaacttggtaagaaattcaaatacatttctacaggaccaaagagagaagaaatgataataagataaagattaactacgcttgtgtatatgagcgtagtttttttgtaaaaaattgtatttgtgatataatacttataaggagatggtagtatgaataagaagatagctttatttctcttagtgctttgtttactaatgagttttggctgcacaaatacaaagaaagaaagcaaaaatgatattgaaactaagaatgaaatgactgaagagacaagaataagtgaactagaaaaagaaaataagaagcttaataaaaaaattatagatttagacattaaagcatatacgaataaaaaaatgcttgatttttataaaggtatacttagtaatatgaacgaaaaagctgatgatgatttaaaaaataaaatagtggccgctacaattaatccagtattttcgatgaatgatgctccactcagtgaagaagaggtgctatctattaatgaacttgaaaataatactttcagtgttaatttatcatatgataacgttgacccagagttagtaagagactattcgcttacatttaaaaggaggcttccatatcttgattctgaaaatctttttgaaataaaaacaaaggctatatataatataatgtttcttagatatcattatgtagaaaaggtgttaattacatttaaagacttaaaagttggcgacacaattactatagttctaagtgatgaacttgctaagctatgtgattataagagtggcagcatcaccataaacatagtagattaattaaaattaagcggggcattacattgtctcgcttgtactatatttataaagaaaatttataaaaagatacacttttttataaaaaaatctatatttgtgattcaaatcacatatttaatataaaaggacatgtataatctaaacacaatataattcatccagagaggcggagggactggccctatgaagcccggcaacctgtttaatcaaggtgccaattccagcggtattaccgagagatgacgatacactttactctttatcttttggtaaagggttttttttattggatttatccaagaaaggaggagcttatgatagaagcaaaaaatttaattaagacttacaaggtagatggcaaagaatttaatgctgttgacaatgtaagtttcaaagcagaaaagaaagacatcttagccatcataggtttatctggtgcaggcaagtcgactcttgttagactactcaacagacttgaggaagctgacggaggagaagtaatcatagacggagtgaacatctttaatttaaagcaaaaagagctcttagctttaagaaagagaatcgctttcatctttcaaactttcaaccttttcagtcaatacacagttctagacaatgtgttattcccattaagcttaaatggttttaagggagacaaaaaggctgaagcgagaaaatttcttgattatgttggcctacttaataaagagaaggcatatccaagcgaattatctggcggacaaagacaaagagttgccatagcaagagcccttgtatctaagcctgagatcatactttcagacgaagcgacaagtgcacttgatccagaaagtactaggatggtcatagatttatacaaaagagcaagagatgactttgatacgactaccataatgataactcatcaaatggaagcggcaaaggatgcttcgaacaaaattgctcttatggaaaatggaagaattatagaagaaaacactactacagagcttttcaaaaacccaaagacaaagcttgcacaaagctttatcaagaaggcagctcctgatatagagcttgattacagtgctttcagtggaacgctaatcagactttcttactcgaaggacacagttaagactcctgtattaagtaacgcaatgaagacctttgacgttgacataaacatcatagacggtaacatcagtaacgtcttagacgaagagcttggctacatggttatcgagcttcgcggctcagaagatgagaaagcaaagcttattaagtatcttaaagataactgtgcagaggtatcggaggtgatagcatgagattcaaggagataatggacatagttttaccagcacttcctgaaactataatcatgattttagttccagcactcatcgctttgattatagggctaccttggggcatactaagttttataactagacctaagggacttagagagaataaatttatatacactataaccaatggcttaatcaatatttttagaagtatgccagccattatactaatcatagtcttagcgccactatcaagaattataattggtaaggctataggtactgaagcggcgcttgtaccactaacatttgctgcagcgcccttcatcgcaagactatatgaaggctacttcttagaagtagactcaggagttatagaagcagccaaatcaatgggcgcaagcaactttgagatagtcaaggtgcttttaaaagagacagtaccagcagctatacttggtgtaacgactaccatcattaacttagttggctactcagcaatggctggagcacttggtggaggcggtcttggcgacatcgccatcagatacggctatcaaagaaatcaacttgacatactttggatatcggtcgcacttatagttgtcatagtacaaattgtacaattcacaggaaacacaatttataaaattacaaacaaaaaataaatttaaggagagaataaaatgaaaaaaatatttacattactattagcattaacattattaacaactcttgtagcttgcaagaactctacaggaaacacaaataaagataaggcagagacaggttctgaaacaaagacagaaacaaagacagacgatgataacaagattatcataggtgtgtcaccagtacctcacgcagaaattactgaagcacttaaagatgaattcgcaaaggaaggccttgacgttgaagtaaaggtatttgatgactacgttcaaccaaacctagctcttgatcaaggcgacattgacgcaaacttcttccaacacattccatacctagtaaactttgctagagaaagaggacttaacttagagaaccttggctcagtacacatcgaaccaatgggcttatactcagacaagatcaaatcactagacgagttaaaagaaggagacgaagttttaattccaagcgacccatcaaacggacgcagagctctattacttcttgagaagaatggtctaatcacacttaaagatgatactaaagaagacttaactgagaaggacattgatcaaaacgtaaagaacttaaagttcactccagtagaagcagcaaacattccaaatgtttataaggatgcagcacttgcagctataaatacaaacttcgctcttggcgcaggacttaatccatcaaaggatgctatcgctcttgaagataaggacagtccatacgcaaacatcattgcagttagaaaaggagacgaaacaaaagataagtttaaaaagctaattaaagttttccaatcagacgcttgcaagaagtttatcgaagagaagtataacggagagatatatccagcattttaatatatacgtaagaagtggtgactaagctcaccacttttcttttataaaaaatttactacaaagctattaaatatatgttataattagtatagatgttttgcgtaagtttcttacgcatcagatataatttgtttatgatataaagagtattgaaaggaagataatatgtgtggtatagttggatactatggcaagaaggatgctatcaagcatgcgataagcggtttatatagtcttgagtacagaggctacgattcgtcaggcgtggcattcattaaagatgggtttcttaaggtgtataagagagttggcaggataaaggagcttgacaaggcgtgtcctaaggaagattctgacatagccatcgctcatacgagatgggcaacgcatggagcagtgagtgaaacgaatgctcaccctcatatagacacaagcgaaacgtatgccatagttcataatggtgttatagagaactatcttgagctaaagaatttaatgccagatttcactccaaaaggagaaaccgacacagaagttcttatcgagtacatcgcaagaaatatgaagaatcatgaccttgctagttttattgaagcgcttgaagctgttaaaggcagctatgccatactcgttttagataagaagacaaagaatctatactttgcaaagaatggctgccctttgctagtgagtgttaagaatgacgaatacctatttgcaagcgacatctctgctgcaatcgagttaagtgatgagatcatctactttgaagatggcgatatgggtgttataaactctgatggcatcaagatatacaatggcggtaatgaagttcacagagaagcgcaaaaatctaatattaatatagaagaaactcaaaaagatggctacgagcactttatgcttaaggaaatacacgaagagccaaagaagtttaaggagctacttgatagacacatacgtgacggtaaggtttacttcgacgagctagatggacttaatctaaatgactttgacaatatctacgtaacaggttgcggtactgcatatcatgcgagtctacttgctaagaactaccttgaaaggttcttagaaagacctcttatagcagagactgcaagcgagctaaggtactcatacaacttcataggaaagaagactctacttatagcaatcagccaatcaggcgagacagctgacgttatgggtcttgtgaaggaagcaaaggcaagcggagcaacagttctagcgataacaaatgtaattaattcatcacttgatagaatcgccgactacaaggtgcacatctttgctggaccagagatctcagtcgcatcgactaaggcctttatgatgcagatactttgcatctatttactaggcatatactttagagatggccttgctggttatgactgcggcatgtacagccaaatcattgatgagcttatcaaaatatctaaagagatggactcagagattacaaggcttgagcctatcgctaaggaagtcgcttctaagatcaaaaataaggagaagattttcttcattggtcgtgatcttgactatatagcagctcttgaagtttctttaaagcttaaggagattagctacatcaactcaatagcttttaaagcaggcgagttaaagcatggcagcattgcacttatagacgagaactcatcagccatagcctttgcaaacgaaggacaaattttcgaaaagacaagaactactatggaagaattaatggcgagaggcgctgagactatacttgtgacaaatcaatctgaaggcgagagcatagttactctaaagagaacctttactatattcacgccaatatacagtgttctttttggccaacttatgagttattatacagcgatggttttggaccgcgacattgacaaacctagaaaccttgcaaagagcgtaacagtagagtaggaggacatatgattagaaaagcaataatacctgcggcgggcttaggcacgaggatgcttcctcagactaaagcatcgccgaaggagatgataccaatcttcgataagccgacacttcaatacatagttgaagaggcatacgactcaggtataagtgatatattgattataacaggcagaaataaaaacagcatagaagaccatttcgacagaaacattgaacttgagaagtctcttgaggagtcgggaaagattgagatgcttaaggagattaggaagatttcagacatggtgaacatatactacattaggcagaaggagccgcttggactaggacatgctatactatgtgcggagagctttgccggcggggaagatgtagcagtgcttttaggagacgacatcgtttattcaaaggagccttgcttaaagcagctgatgaacgcatataatgagagaggcaaatccatcttgggagtcggctacgttgctaaagaagacacttcgaagtatggcatcatcgcttacgacgaaaaagtgaacgagagactatacaaggttaagtccatagttgagaagccagacattgacaaggcaccgtcgaatatagcagttcttggtagatacattttgaagaacgatatctttagcttgcttaagaagacaaaacccggtaagaatggcgagatacaattaactgacgccatcgacatgctattaaaacaagacgatatatatgcttatgccttcgaaggacaaaggtacgaccttggcagcaagcttggcttcataaaggcgaaccttgactttgcacttagaagcgatataaagggagatgttttaaactacattaaggatatagtgaaagatgagacttaaggactttgaggcagccatatttgacctagatggaactgtctttgactcgatggacgtttggaagaacgtagacttaaaattttttgcaaggcactcgcttttcttaacagatgactactttgataatatcttgcacaagactctagtagactctgcgaagtatactatagagcgctacgcacttagtatgacgccagaagaagtcgttagagagtggactcgcttagcaaaggaagagtttgaaaacgatgttgtaccaaagaagggcatcattgattatttaaagaaattaaaggcgagaggggtcaagacatctatcgccacagctaatgagaaggacatcttcacaagtacattaaaaaagtttgatatggatacacttttcgatgacatagtgacactatccgaagtcggttcggataagtcgtcaccaattatatacctaaagtgcattgccaaatacaatattatgccgcaaaacacactagtcttcgaggacctacccaagaacttaaagactgcgaagaaggcaggctttataacggttggagtgcttgataacgaggactacttgtcacatatttctaaatatagcgacatcattattagagattttacagaaatttaggaggacattatgaaaaaaattattttaactttacttattttatctatgcttatgggactagttgcttgtaagccaaaggaaaaagacgaacttaaactaggcttcgtgccacttgttgatcaagacaagcttgaagatatgacggaaccattgacaaaaatacttacagacaagcttggaacaaaggtatcaatgtttacatcaacaaactatgttggtgtagttgaagcacttggttcgggtaaagttgattttgcaatcataccgccatttgcctatgtactagcgaataaaaatggtggagcacaagtacttttatcagcacttaataaggacggcaagaattactacagaagtgaattattagtaagaaaagattctggcatcaaagaagcttatgaaaaggacggctacgcagcacttaagggtaagaagattgccttcgtagatccagagagtgcatcaggctacatctatccaggagctatgatagttaaaggcggccttgatcttgaaaaggaccttgaatatatgtttgcaggcggccatgataaggcagtacaaatgcttttaaatggcgacgttgatgtgtgcgcgacatatgaaggcgcagaaaagaagcttatgaaggactttgagggtcttgatggattagaagttttagagtatacagacaagatcccatatgtatgcgttgcagctagcaaggacctttcagatgatatgaagaaaaagataaaagatgttttccaaaatgatttatcaagcggtgaaggtaaagaagcttgtgaaaagatattcaacttaacaggctttgttgaagcaacaaacgatgacttccaaaacgttatcgacactgctaagattatgaacgttgatttagataaatgatattagaagtaaaagatatatctgtacagtatgaaaagaatatagacgcgattaaggacgtctccttcgatgtagagggaggcgactttgtcgcgcttataggtccatctggtgcgggtaagtcaacactattaaaggcgataaacgctcttaacccacttagcaaaggtagcgttatatacaagggcgaagatgttcatagtcttggcgcaaaagatttaagaaagcttagaagaaacattgccttcatctttcaagatacgagcatcatagaaaacatttctgtccttgataatgttttactagcacgtcttggagagaaaaagttctttgaggcgatgctgtcaaagtacacagacgaggagtatgatagtgcactcaaagccatagagatggttggattgaaagagaagacttatgcacttgcaaaagatctctcaggtggacaaaagcaaagggttgccatagcaagggcgctttttcaaaagtcagaccttatcttagcagatgagcctatatcgtctcttgatatagagacaaaaaggtccatcatggacatttttaaaatgcttaataatgattacaagaagatcatcgtcataagcatgcacgaccttgatttatcgcttgagtatgcgaagagagtgattgccataaaagatcacagagtttatttcgacaggagcgtaagtgaactagattatgacagagttaaagacttatttatctaagaaaagaaggaagaatatactagcagcacttgcatttttaacgctgctaatagcttcaggcttaggatcacaagtgtccttaagctcttttttgcgtggactgccagatatgttcgacttagtaagaaggatgtttacactcgactttcaatacatcatctcggttatggatctagtcttcgaaaccttccttatggcttttgcatcatcagccttgggagtcttcatggcttgtcttataacattcttcctgccatacaatacgagtccctcagagctagtatccaaagtattaagcgcagtcttttctgtatttagaactctgccatcacttatatgggcggctctacttgtgagcttcttctcggctggccgcttctcaggcttattagcacttagcataatttcattttttatgtctactaaacttatcaaagaatacatagaggccatgaataggaatgacttcgacttctacaggtcgcttggcatagctaaaggcaaaatttattacaagataatattaactaagatgagaaagtttatagtctcgacatttttactatgcttagagagtaatatcagaagcgcgtctatacttggtcttgttggcgcaggtggtattggccaaagactgtggctcgagttaaaccatatgaactacgacagagtctcgtcaatcatctttatgctattgatattaatcttcgttatagaccttgtgagtcaaaagctaagagagatagagatcaaggtgccgataaagataaatgatcttagctcatacagaagaagcaagagattaaagacgcttttctttatactcttcatgcttgctttatttcttgtgctaagacttactatcaatatcacatacgagcgctttgtacttggccttaagcaaggaggcgtaattatatcaaagatacttacacctgaccttgcctatctatcaagagccgtgccagcagcacttgagtcagtagccatcgctgtctttgcttcgcttatgggggcaattatatcatttatattcacagcatttacagcagcgaacatcgccccttcgaagaaggtctcagtcttattcaagctcatcatcaatgtaatcagaaccttcccagccatcatcacagcgatcatcttcttcagaggactaggaccaggaccctttgcaggtgcactagcgcttacagtatacacatcaggcatgcttagtaagctctactttgaatacatcgaggacatagcagctgattccatcatgtctatgaaggcacttggactaagcccatttaccatgtatgcaaagctcatatatccaaagacataccgaagcttcttaggcttcgtactatatagactcgagtccaacattagaaactcatctgtactcggccttatcggtgcaggaggtattggtacactgctttctatgaacatagcgtggcgaaactggaacagagttggctcactactactagtgagctcggtgatgataatattttttgattacttatcatcaacaattagaaaaaaattattataattaagtgggcagacaatgctcacttttttattgcaaatacaagtgtaatgatataaaaaaatatttatatatatatttaaaaaggtattgactttaaattgtttaaatagtataattagctatagctaatgaaagttagctaaagctaatgatatattggctgagaaggtttatttaatggcgaatatacttgccaaatattttcgaaaggaggaactatgaaaaaactaagcataatattggtgacagcactagtttttttgatgtccataactaatgtttttgcaggtaatgtagataaaatatacaaagactgggaagatgtaagtaaggacatggaagtggttttaagagatgctcttaaaatttatgaagcaggcggtccagatgcaggcaaggaaggctatgacaaaattaacgaagcttattttagatattatgaaaaattaggctttgaaaaaattgttatgacaacaatttctggaaagcgtggatcaaccgttgaaaaccaattttatttggcgagaaaatctatgcgtcaaaatgaagatatcgatgttgttaaagatgaagttgaagtactaattagatatctacacgaagatgcaaagacacttgacggtatgagaggtaaaaccagttctggctggggcgttttctttagcgttttaggacttactttaagagaaggtcttgaagccatcctaatcgttgcagcccttattgcttatcttgtaaagacaaacaatttaaaatacgtaaaaggcgtctatgtcggcgcaattttaggtattgttgcttcaataattcttgcgattattttcaatataatttctgcaaaatttggcgaagacagcagtggtgttagccaagagatttttgaaggatgcggaatgtttttggctgttattgttttattctatgtatcaaactggatgctatcaaaatctgaagtggaagtttggaatcattacatccaatcaaaagttgaaagttcaattacaaagggaagtgctatggctttagtattcagctctttcttggcagttgcccgtgaaggcgcagaattgattattttcttccaaggtatgagagaaaatatttcaaacaatcctgcatatatgtggggcggccttgcatgtgcaatcgtagtacttgcaattgtgtatgtattgatcactaagatgagtgtaaagcttccattaaagccattcttcacagttacatcaatcttgatgtttgtactttgtatctcattcatgggaaaaggagtcgccgaacttcaagaagctgatattatcggcaggacaataattccatggatgaatggatttacgattgacatcttaggaatttatgatagggtagaaaccctattgccacaagttatcttaatagtaataactattgtaacagttatcgttcaaattaaacgtaacaaaattaaaagagcagaacttgaaaaagattatgcaaataagaactaataggaggtttattatgagttcaaaagtaaaaaaattattagcattagcgcttgcagttatgacaattgcagcatacggatgcaacaaagcaccaaaaccagctgaagaaaatacagctaaagttgaagacaaaaaagatgaagacacaaaaactgaagacacaaaaactgaagacacaaaagatgaagacaaaaaagacgttgcagctcctggtgaagacgcaggattcgacgaattcccaattggtgacgaacaagaatcaggccctctagcagttgctggtgtttatttccaaccagtagatatggaaccagcaggtaactcattatcaaaagaagaagctgactgccatatcgaagctgacatttcagcaacagaagaaggcacaactcttggatacggcgcaggcgactttgttccttggctaaatgttaaagcttatatccaaaagaagggttcagacaaggttcaagaaattgctttcatgccaatgaacgcatcagacggtccacactatggtgcaaatataaaatttgaagaaggtcttggaacatacgacgttaagtttgaaatttctgctccaggaaacgactaccttctacatgttgataaagaaacaggtgtaacaggaagattctggacagagccaatcgttattgaatggccagaatttgaatggacaggtccaaagtggtaaaaaatattggaaatggctttaagccatttccaccttgtacataggaggaattatgttaaagatatttattaaagtaatggaggcgggagtaggattctcgttaataatgggcttggcgcttggatatctaagtacagaaaacttcaaaaacaaatataaaattatttttggtacagtctttgtgggcactcttgcggcaattatctcttcagtaattagagaaattccaaattttgtcaacaggagctctttgtcattttggtcaatggtaccaatagtagttgcttttattggaattatcatcttttatttttttaaagaaaaatccagtatttataaaaatatttttgtttgttttttgtctttgtatataatagcgtcatttttctattatatgccggctatctttgtccagctaaacaattttgtttactatggagaatctgctgtttccaccatggttttatatagaatcattggttatgtatttgcaattgttcttatgcttttatctagtattgcaatttttaaaatcatcagacgagttggcaagacatatagggataaaattttaatgatctcatttttaatttggggaataaatcaaatttttattgtccttcaaagactatacgcagttggcttcttaccaagaaatgcaaaattatttagcgcaattgcttgggtaataaaccacgcacactacattgggtttattctaatgattttttcaattatcctaccaataattttatattcaaataatatgaaagttaaggaaacttttaaaaatcctgcagaattaagaaaaaagaaataccatatgagatgcaacagaaatctggcaaaatttttcttgattttaattgtaattaatgtttttagtttaacttatctaagggcatattcgggtcgtgatattgcactttctgaaccagaagaatatgtaattgaaaatgatatgattgttgttccgctatcagaacttgaagatatgaaacttcaccgctatcaatacacggcatctgatggagttcacatgagatttttcttaattaaaaagtctcaaggttcctatggtgttgtacttgatgcttgtgaaatttgcggaccatccggttattatgagcgtggcaatgatgttatttgcaaattgtgcgatgttattatgaatcgtggtacgattggttttaagggcggatgcaatccaatccctataccatacattgttcatgatgaaaaaataaaaatcagcacgcaagatcttgatgccaatagctttgtatttaagtaggtgacttatgttttttagaatgattaggggtgcaatctttaggcaaaagaaaaaaatggtcttgattgcatttgtagtaatgcttggcacttgtctttcaaccggcatgcttaacactatgcttggcattggtgacaaggtcaatagagaattgaaagcttatggggcgaatataaacgttgttccaaaagaatcttccatgcttgatgatatttatggaatcggtgaggatagtcagaaaaattatttgaaagaagatgaacttggcttgataaaaaccatcttctggtctttcaatatcgttgattacacaccatatttaaatatcaatgcaaaagtcgatggagaaactacgagagttgttggtacatggttttataatcatatggaccttccaactggcgaggccattgacacaggtatgagaaaattaaaaacttggtggaatatcgaaggtgaatggattgaagacaaagatacagataaggccatggttggcactgtatttgctctaagacacaattataagcttggtgataaaattaaagtcgtaggttcttctacaacaaaagaatttacgattgcaggcatttttgattcaggtagtgatgaagattcgcacatttatcttccattaaaagctgctcaagaattagatggagtatcaaatgtagtttctcgtgttgaagtttctgcactaacaactcctgacaacgacttagcaagaaaagctgcaagaaatccaaagtctcttacaatcaaggagtgggaggtttggtattgtacagcatatgtaagtgcgatttgctatcaaattcaagaagttatgactgattcaatcgcaaaacctattaggcaggttgcggaaagcgaaggcgatattttaaataagacaactttattaatggttttaatcacagctcttagcttaattggttcagcacttgcgatatcaaacctagtaacagcatctgttatggaaagacgtgctgaaattggacttcaaaaagcaattggcgcaaataacacaagaattattacaagaattttagttgaaaatattagcacgggtattatgggtggaactgttggttacttcataggacttggtcttactcaaataatcggtataacagtttttggatctggaattcctccaacaccaatggtaatacctatcgtaattattttgattttgcttgtaattgttttgggctcgattccagccattagatatttgctaaaacttaatccaacggaggtgcttcatggaaaaggctaaaagaaaaaatatacaattcttttggaagatggttgaatcatcgatagcaagaagaaaagctcgtatgcttacagcccttcttgcaattgccatgggtgcaacgattctatcgggtcttgttacaatctactatgacattccaagacaattgggcaaggaatttagaagttacggggcaaatatgattgttattccaaagtctcaagacgataagattggcgataatcatattgaagaaattaaaaaacttgcaggagataaactagtgggaattgctccttacatttatcagaatgcaaaaattaatgagcagccttttgtaatagcggctacaaattttgatggcttaaaaaagaacagccccttctggctagtcgatggtgaatggccaagcgaaaaaaggactgttatgattggtcacgaaatttcaaaaaaacttggcttaaaaatcggtgatcctttcgtactgagcactccaaaagaaaattcgcaagaaatgagagacagcgacttcaaggtagcttcgattgtaacgactggtggtaaagaagaagatttgatatttatgtctattgaagatattagatctatcatgggcgatttgaatatcaatatcattgaatgttcaatcgatgcaaacagtgaagagctacaagtaattgcagataatataaataaaattgatgctactgtcagcgcaagacttgttaaaagagttacagaatcacaaggcgtggtacttgaaaagcttcaagctcttgtgtggatagttacaattattgttttatttattacgatgatttgcgttagcacaaccatgatggctgttgttgcagagagaagaaaagagattggccttaaaaaagccttgggtgcacacaataaatcaatcatttatgatttcttgggcgaaggatttttacttggactaatgggcggagctcttggttctttacttggatatttatttgcaagtgaagtttcaagacgagttttcgcaagaagtgtaaatttcttatgggccctagttccaattacaatcattacatcaatagtaattacgattgtagcttgcattataccagttaaaactgcgactgcagttgatccagcacttgtattgaggggggaataatgaacatattagaattaaaagatatctcaaagatatacggcgatttaaaagcgctcgataaagtaaacttaaacgtagaaaaaggcgaatgggtttcaatcatgggtccatcaggtagtggtaaaacgacaatgatgaacatcatcggttgcatggacaagccttctataggcgaagttttacttgaaggaattgatatttctaaattgaatcaaaaggaattaacagaaattagaagagataagattggtcttatttttcaacagttccacttggtaaactatttaactgctttagaaaacgttatgatggcgcaatactatcactcaatggtagacaaggaagaagccttgcaagcacttgaaagcgttggattaaaagataggcacaaccatttaccaaatcagctttcaggtggagagcaacaacgtgtttgtattgcacgcgctcttatcaaccacccttcactcatcttagcagacgagccaacgggaaatcttgatgaaaagaatgaaatgctagtattggatattttagagagactccataacaatggatctacaattgtagttgttactcacgaccaagaggttggtgtggaagcagaaagaattgtcttccttgagcacggaagaattgctagagaagaaaaacaaaaaagacaaagaccaattctggaggtttaatatgaaaaagattttattattattgttggctgtaagcttactattgacagcttgcgccaagaagactgacgatgcttgcacagatgcttcatgcgctgatgcatacaaagacggcacttaccacggtgaaagccaagttgatgaatggggcggtaaggtaacaacagatatcactatcaaggacggaaaaattgttgacgcaagtttacaaaacttacttgctgacggaagtgaaaaagacgaaaattatggaaaggccaaagaaggcgctactaatccaggtctttataagattgctcaagaagcagttaaaaattctaaagagtatccaaagcttttaattgaaaaaggtaagatcgaagatgtagaggctatcgctggtgcaactgttacattcaaatctttcaaagaagctgtaattgatgcattaaaggatgcaaaataaaattaatataaaagttcaggaggttaatatgaacaaaaataaaattattggaattctatttataatattaggtgttttagttttcttaacaccaggaacacttgctccagtatgtcctgcaatggcagatggaaagtttatgaagtgccactggatgggacaagcaattaaaggtattggtggtgttatgactgttctaggtcttatttatacacttatttgctctaagaaacaaatgttctttacactagctatctccaatgtagtaatcggaatttatgcaattttattgcctgcaaaattaattggtggctgtatgaatgctgaaatggcttgtagagcaaaaactatgcctatgatttatattttagtcggactttatattgttattagcgttgttgctgcaattttaaataggtcttgcaatgaatctaatcaatgtaaataatctatccaaatcatttagacgtggggagagagattttttcgcaatcgataacgtaagttttgatgttagcgaaaaagattttataaatatcattggtaaaagtgggagtggtaaatcaacactccttactcttttatctgcgatcattgagcccacatcaggagaaatctttgtagaaggaaaaaatctttctaatatggacgatgaagaaaaaagtggatacaggaatgaatttattggttatgttcctcaatcacttggaactttaccgaccttgaatgtccttgacaatgtaagacttacttacttttttaaaaaacgtgagggagatggaatcgaaagagctaggatgctcctagatatgctcggtatattgaacttggaaaatgatttttgtaaaaatttgtcaggcggcgaattaaaaagagttttaattgcaagagccctaatgaacgaaccgaaaattttaattgcagatgagccaacttcagatttggattcaaaaactacagttgaaattatggacatgctaaaagaaattaatgaaaaagggacaactatcattatagtaactcacgacaatgatttattaaaatatggatcgcgacttcttgaaatgacagacggtaaattaaatgaggtggtcaaatgagattaagttccaaacaaattgcctttaaaaatattcaaaacaaaagtgcaagaagtgctttgcttataattttaacagcaattttaacactagttttatttttatctagttttttgattttgtcacttggaaatggcatgcactcactggctaatcgtatgggagcggatattatagttgtacctgaaggttatgattcgaaaattagaggcgcaattctacgcggcgaaccaaacacattctttttagacaagtctgtcgttgaaagaattagaaaaatcgatggagttaaaattgcaacaccacaattattcattgccactctttctgctggttgctgctcatttccaatacaagttattggctttgattcagacacagattttgtagtaaaaccttggctagagactcaagctaaacttcccttaggaaaaggagaaattttggttggacacaatattgttggcgatatgcataaacacgttaaatttttcaatcaagaatttattattagaggcagacttgcaaaaacaggcatgggctttgacaatacagtgtttgtaaattttgatgaagcaaggcgccttgctaaagaatacgaaaaaattcttcatcttgaagacaaggatcatgaaaatatgatttcatgcgtaatgattaaggccgataaaaacgttgatccagttgaaattcaaaataagattaggagcgagtttaaaggcgagggcgtttatcctcttctatcacaatcaatgatgaacgaagtcagcacatcaacacaagacatgatcaagtatgtttatatattaattgctctagtatggctattggtcttccttgtactaactctcgtttattcaattacaattaaagaacgtaagagagaatttgcaacactaagaattttaggagctagcaaaaagcatctaagaagtattatcttgtgggagatatttactataaatatcgcaggttctgcatgcggaagtgtgcttgctttagttatttcaattttatttggaacttggtttagtcgaagtttcaaaatgccatttttagcaccaaatgttttaacgcttgcaacaatatttattgctgtttttgcaatcggcacagtaatgggaccaatctcatcactcggatcaattagaaagatgaacgcagaagaacttggacttttattaagacaaaacgattaatatacactttgaaactgttatgtatttattatatctatggagggtttttccttcatagatatttttatgtaaaatatatattactatttcctttatattgctattgactaaggattttatcttatggtataatcattgtgtgtgagagaaatagggggaggtaatttaattggcactattcaaaaaggaaaaatttacaaaagagaaaattacaaaattaattaaagagtacatattgatattgtttggtagcttcatagtagcggcagggatgtttttcttcttcaatccagcgcacctttcagtaggcggagcaaacggtcttgctgtcgtacttaatcactaccttgagattggcgttggtaactggatgtatgttatcaatatcggtctattcatactagccttcttaactataggttcgcagttcggcgttaaaactatcattgcgtcactacttacatcaggcttctttgacttactagaaaaacttatgccgcacttccaaccattgacaggggataccttcgtagagttatttttcggtgtcttcgttacagcggttggtatggcgatagtattcaatcaaggtgcatcgactggtggtacagacatcattgcaaagatacttaacaagtttatcggcatggaccttggcaaaggcgttttagtatctgacgtattgattacattactagcaagtaatgccttcggcgcgaggattggtatctattcactatttggtgttatcgttaatggcttcttaatcgactttgtcatcgaaggtatgaacatgaacaaagaggtcaaaattattgctgaagacactaagcctatcgaggagttcatcatcaaagagctagatagaggcgcaaccatatacaaggcttacggcatgtatacaaaggaaccaaaggacatcatcatgattttgcttgacagaaaagacttcttaagacttaagaacttcttaaaagacctcgatcaaaagactttcatttcagtttcgaacgcatcagaagtcttaggttatggatttaaaaatttaaaagactgatatatgagaaaagcctttcaagtgaagggctttttgctttttaaaaaaaatattacatactttacaatttcttaacaaagaagtattacaatgattattataaggagaataaaatgaaatacgcactaattgatattggaagtaactcaatacgcctaaacgtttataacaaggacgatattcaaaaggaagtcttctcaaagaagtacatggcaggtcttgcaagctttgttgaagatggaaaacttagcaacaagggcataaaaaaattgatcaaagtgctttcagcgcaaaagatgttgcttgattatttgccagttgatgaaatttacgcctttgcctcggcttctttaagaaatgtcgataatggcaaggacattgtgaaaaaagttaagaaggagcttgatctaaacatcgatttaatatcggcagacgaagaggctttctatggagctgaaggcatgaagatggtatacgactttgatgattactacaccatagacataggaggcggctcgacagagctttgctatctaaagaataaagagattaaagacatggcatttttaagggcaggatccttatcattgttccgtgactacgttgaaaacactataccgagcgttagagagtacgatgagatgataaacgccatcgacaagatgctggctgaaaatgttttcacatacaaatgcacaaagcttgtggcttcaggcggaacagcgagggctctaggcaatatcttcgaagagttttatgacggtgatgacaaagaatacactattgacgatgtaaaaaattatatctatgaaatgattgatgggaataaaaagattattcgtacaactgttatggttgtgcctgaaagacttcacagcatagtgccaggagctatcatgctatatagactcttaaagcaccttggcatagaaaaggtcaatgtctcaaagcttggtgtgcgcgagggatatttaaaggataagataattaaggagtgaaattatggaagagttcatgcaaaaccgcgagttgagctggctaaaatttaatcaaagagtacttgaagaggcgagcgacgagagcgtgccgccacttgagagattcaagttcatatcgatattcacatcgaacctggacgaatttttcatggttagagtcggatctttgtttgatttgatgaagtctaagaaggagttcatcgacaaaaaatctggtatgacagctaaggagcagcttgatgccatatacaagacaatgccctactactacgagatgagggacaaaatctacaaggacgtcatcaaagagctagataagtacaatatgcacaataaaaatatgaagtccttaaacgatgaggagctaagttatgtaaaaagcttctaccttagtaagattgagccattaatttccgcgcaaatagttgacgcagcacatccacttccattcttagagaataaaaagttatatatagtgactgagatgtgggacactgaaggcaatattgcgcatggacttgtagccatctcagacatattcgagcgctatctatcgctgccaggcgatgaatttaactacatcagagtcgaaaaagtgattgagcattacgttccaaccatgttcctaggctatacaattaaggagcaatcacttgttgcggtcactagaaactttgatttcgaaacaaatactgagatcgaagaggagattgccgactacaaagactttatgaaaaaggtcatcaaaaagaggacacgtcaagaggttcttcgccttgaaatttctaacacaaagtcaaagagcattactgattttcttaaggccgagcttggtattacggatgagatgatacttgtgacaaagagtcccatcaatatgaagtacgtctatggtcttgaggacatcattccgagctccgtcatcaaaaaagtttcttacgaagactttactccatttaaaaaatattccttagagcgcggctctatcattaaaataatagaagagaaggatcttttactaagctacccatacgatgatattgatacctttcttgacttgattaaggaagctgccgagagtgacaagaccatctctataaagataactatatacaggcttgctaagcactcgaagcttgtcgaataccttaaaaaagcctgtgacaatggcatcgaagtcactgcacttatggagctaaaggcgcgttttgacgaagagaacaatattaattattcagaagaattatttaaggcgggctgcaatataatgtacggctttgaagagtacaagacgcactcaaagctttgcctaatcacatacaaggacgatagggagaatatcaagtacatcacgcaaataggtaccggcaactacaatgaaaacacatcgaagatttacactgacttttcactgatgacatctaatgaagagataggccttgacgcaaatgattttttcaaaaacatgtcagtcggcaaaattaatggtaagtaccttcacatattacaagcaccatcgactcttaaggttagactacttaaggagatggatagagagatagctaaaggtaaagacggatacatcagatgcaagatgaactcacttacagattatgattttatagaaaaatttgccgaagcttcacaaaattttgtcaatgtcgacttgattatacgcggtatatgctgcatagtacctaatgtgactggctatacagacaatgttcatgtctcgtccatagtcggacgctttttagagcattcaagggtctaccaatttggaagaggcagtgatatgaggatatatatctcaagtgcagaccttatgacaagaaacacagaaaaaagagtcgagatagcctgcccagtatacgatgaagagacaagagcaagacttgtaagctacttagatacacagcttaaggataatattaagagaaggatacttgttaactcgggtgactacatcaaaccagaggtacaaggcgaagcgcttatcgctcaagattatttcatgcataaagcaaatgaaaagagagaaaagttttatgaagagcttgagagagctaaatcagatgaagcgcctaaagaaaacttttttactaagattaaaaagatatttacaaagtaatatttattttgagagcctttcatatgagaggcttttgctttgccaaattcatagtaattgaaaaatgcactcagctgtgatataattacaaaagaggtgattatatgcattattttgacaacgcatcgacaacatttccaaagccagagagcgtatatgtaaaatttaatgaagcatttagagagtatggggccaatccaggaaggagcggccacaggctagcacttagggcgatggaagaaataatgcagacaagactaagtcttgctaagctgtttaatgtggataatccacttaatataagctttcatatgaacacaacatatgcacttaatgctgctatcaaaggcacgcttaagaatggcgatcatgtaatcacaacatcgatggagcacaactctgttcttagaccactgtttacacttaaagagatgggcataatcgagctaacagtagtcaaggcagaactaagcggcgaggtcggtaaggacaagatagtctcagcaattaaagagaatactaggatgcttgttatgactcactcctcgaacttgcttggcacagttgaggacattgacgagatctcaaaggctgttaagaaagttaataaagacatacttatacttatagatgcagctcaatcggcaggcatcatagacatagacttaaaaaagctcgatatagatatgcttgcaacagctgggcacaagtctttatttggtccgcaaggtacaggtgtcttgtacttaagagagccagaacttgttatgcacactgttgaaggcggcacaggatcaagatcaaccgaggtttatcagcctatggacatgccggataagctagaagcaggcacaccaaatggacacggcatcatagccttaggcgcaggagttgaattcatacttagtgaaggcatagataagataagaaagcacgaggaagctcttacaaagctcttcatagatggcataaaggacattgaaggcgtagagatatacggcctacttgatgaaaagaagaagacaccggttgtttctataaacatggaaggcgtggattcatcgatactaagctacgttttagatgatgagtacgacatacaaacacgtccaggcatacactgcgcgccacttgcacacgaaaccattggcacaattaaaaagggtgcggttagatttagtttttcgtattttaacaaggaagacgagataacttatgcaatagagacattaaagaagattaaaaaagaggcggcagatggaaaatatcaataagtttataaatgacaatatcttaatcatagttgcagctctagctgttttattaattgcgctactagtcttagctcttgtacaagttttgaagtataaaaaacttaaggagagattcgataccttcactcaaggtatggacggcatcagtgttgaaaagctcttagcaacttttggaaaagacataaaggacatacacagagacatgatacttaatgaggacagattcaatcgcatagagactaatcttagcttctgcgtgcaaaagcttggcttcgttaggtacaatgcttttcaagacagcgcatcagagctaagcttctccatatgcttattggataagtttaacaacggcgtcttactttctgttattcatggcagggagcaaagtgttagctacggcaagatgattaagaatggagagagcacatcgccactttcagaagaagaagtgagcgcagtagataaagcaatcagaggatagtaaaatatttatagtagacttgtctaatgacaggtctatttttatgcttaagaacttgtctaatatataggatgcgtggcactatatacgacgcgtggcactatatacgacgcttgctaccatatgagaggcttagttatatatgagaggcttgctattattaaaaaagaaattttcttcacaattatacatttactagagaacgctgcatgcttatagtataatatacttggattatttgatagataaggagggacaattttgaataatataaagagaatttttgctttattcttagcaataattgtaatgagcatctcttttactcaacttagctttgcgaaagaaggagctaagacaaagaattttaatgaagaaattagactcatagtcgagcttgacgaagcaccgcttgtgttaaagactaagagtgcgaaggtctttagcaaaagcagtataagctgtgatgctatgaaaaagattaaaaagtctgaagagagcgttaagatgcttatgcgcaaagccggcatagagtacaaggatatatactccttagacacctttgtgagcggtttttctatatacacacagaaaaagaacataagcatcatctctaagataaagggtgttaagaatgtgcacgtttgcgaaaagtatagcatagctaggcccataaatgcggcgaagcctgcaatgtatgcttcgcttgatatgatcagtgcgcctaaggtgtggcactcgaagaagtacaagggcgaaggacaagttgttgccgttcttgatactggctttgatactaataaccttgatagctttagacttgataaagaagcactagatagtgttgctcttactaaagaaaaggtcgctatgcttaaggagaagtacggacttaagggagtctatatcagtccaaagataccttacgtctacaattatcaagatgagacagcggaggttgatgcacttcaagataggtacggttcaagacatggcctacacgttgcaggcaccatagcagcgaatgaaaaggatgactacaagaacgcaaacaatctagctaagagtgcaatcaagggagttgcgcctaatgcacagctcatcataatgaaggtcttctcaacatcgcttaccgaccaaagtacttatacggatgctcagtgtaaagcaattgaagatgcttataagcttggcgcagatgttatcaatctttcacttggttcgcctgctggctttatcaagaaggacgacatagttgatatggcgatagaaaacgctaccaaggcgggttgcttagtcgcagttgctaatggcaatgaaggcacagcatactttgatgacgctaatgatagcactaaagaagaaggcgtaaaggcgcttaagggtaaccctgattatggtatggcgggcgaccctgcatgtgcgaaggcaacaacatcggttgcagcgattactaacatgaaatatttgagctgctcaatacgctcaaacaataaggaccttgatggcattgaattttcttggggtgccgagattgttcctaaagactatacgtttaataaatttgtctatgctaataagggcagggcaagtgagataaagaccttagcacctgagatgataaaggacgccttagtcttggcagatagaggagagtgcacttttaatgagaaggcaagtaatgctaagcaagctggagcaaagggtcttatagttatcaacaacgaagacgagatgactagtatgattggctttaaagatgagagcttccctgccatcatagtaagtaagagtgatggggcaaagcttttaaagcatatcaaagacgcaggtttaagtatagccatcaataaagagatgagcgttcatgataaccctaaggcaggaaagatggcagacttcacaagctggggtcctacgccaaaccttaggatgaagcctgaacttactgcgccaggggctgacatctactccatagaccaagacaatgcatatcaaataatgagtggcacgtcgatggcaacaccacatgttgctggtgcggcagccatacttatgcaatacctaaaggacaagagttcactgttttacgaagaagcgaagacggcttcaaagagagagcagctagcgaagacattgcttatgaacacagcacttccacaaaaggatgctgacgtgtactacccagtcagaagacaaggcgcaggccttattgaccttgctaatcttatgaagtcgaggctaacgattaaagcaattagcaagaacgataaggaccttgatgcgaaagctgagttaggaagctttatggataaggacttcactatcgattatgaagtcaagaattattcggatgaggacattgaatacactctagtgccatctatgatgactgagaactacgttaatgatcaagagcttggacctatgtcgactgagactgatagagatatgaacttcactatagacaaaaaatcttttatagcgaaggcttctagcacaagcaagttaagtgtgaactttaactttgcaaatgacgatatcgatatcaataactatgtggaaggtttcctaagcttcgtgccaaaggatactaagaaggacgcgactttatccgttccataccttggcttctatggcgactggtctaagccgaggatttttgacgtctttagtcacgagtcggatgataatataaagccaaactttattaacgaagatacagagaacgctatgggagatgtctttgactacaatgaagagaacgaagatgaagaagaacttgacagtagattgaatcagttcaagtacaagggcaagtggacttacatcactagtcacgcatcatcagaggagctcaaggtaagatttgccctgcttagaaatactgagtatatcaaggcaaggatagaagacgtaaatggcaagctgcttaaggacaatcttgtagacctaagctactttactaaatcaagcctagctgacaatggtggagagaactggataagcttatacaaggacgatttcgaagagaactctttatctaaagttgtacttaaggctaagctcaacatagagaaagacgcggtgcaagaggaaggtgtgcctatctactttgatgatatcgctcccatcgtcaagtctatagagcttgtaagtgaaggcgatgcaaagtatgtaaagctaagtgtttctgataacattggcatagatactataggagctgagcaagttaaagagattggcaaagatgatgaaggagagcctatatacaaggcgcataagtataatgaggttagtggactatactacggcgctactgagttctatacagaggatgaaggcagagtgactgagcaagatgaaaaagttattaaatcacttgcaaagcttaaagagtcaagtaaggagcacactgtctatataagagtagatgatatagctgacattgaaaagatacgcgtctatgtaaaggaccttgcaggtaactggttagatgaggtagtacttgatactaattataaaaaagaaggaagtgttagcttaaaactcataggcgagaacgcagcctttactaccgaagcatctagctttacaccaagcaagtggaggaagaatacttataagcttgagaaaggtgcttatggcaatttagaaataaagcttgcaaagaatgataagaactatgcgatagacacagccttggtcaatggagtagagatgaaggatagctttatctacgatcaagatcaaagattatactatctagcatatagattcgaagaagatacaagcttcttggcgagagtaaaagaagagaaagaaaagaaaaaggacttccctaagggcaatgcttaccctgccatctacctaacacagccagctaacctatggacacttagtgagaacgggcctcttaatgatcaaggagaggagccagagataattgatggcaagctagtggtcaagggtgctcttggctttactaaggtagatgagcttaagaagctaagcctaagcatacttgagagcacaaataataaggtcttagtcaagaaggacatcactaaagaagtaaaggctgaatatactggcgagatcagtaacgaggaaggcgttgtatatgatgggcttgcactaatcttcgatactaagatagatatgccaaaggcttataacgatattaagctacaagtagaagcggaaaataaggatggtaagaagaccgttacagccctaacacttgcttttgatgagagccctgcgacatttaactatactatcgataaaagagatataaagagtgcttatgcgactataagatatgcactctctgatgacaataagaacaccgagcttagcatcgatagagtgagttcagatgacaataacgattacattgaaacagtttttagaaagacatataacgagtttgacattgacaggctaggatctattagatacatttataaagacaagttcactgtaaagctaaagccgggctataacaagtttaaagtttcgattagtgaagtgggtacagctagagttaatgagaagtacatcctcatctatatgcttgacccaaaagtgaagcttaagaactttaaataaggaggcagagcatgaaaaagaaattagagatacttattgtactagtattagctttagttttagttttatctatggatatatctgcagcctcatataaggaccttgatggacactgggcgaaggactatgtagatgacaagttggctatagaactctttgatgaacatggcgaagtctacggagcaaacgatgtgcttacgagagctgaagtgcttaaggctataaataaattaacgcgcattaataaagaaagcaagattgactttgatgacatagataaggacgacacttattatactgaatttaagaaggcggcctacacaggcttcattggtcttaagagtaagaaggcagagcctaagcgcttagtaagtagagcggaagctgtgcatatgctagcccttgtttatggcatagacgcaaaagactcagcgaatgcttttacagacttagaaggaattagcgaggctggatatatagatgcattcaaagcacttggagtaataagtggctacccagatggaaaatttaagccgaaggatgctatcaagagagcagagttcacggctatggtgagcgccttatacgcaaggtttgctgcacctttaaggtacccagcttcatataaaaacacagataagactaagcttaagagtttacttatacatggtagcacttatgcgaatgaggcaagcgagaatgaaaagaatgagtacaagcttgcttatgctaacgcaaaacttattttaaataacaaaaaggctatacaagtagaagtagatcttgcttgcgagaagcttagcaatgctatagacgcgcttaataaggactatgctagtcaaggtaagaaagttgagcttaaggaagatatggacgaaagaaatcctaaaagcgatttaaagaacttagtatatatgtccgaagccttggagaagaagcttgaccttgaatactacaaaattaactatgagagagctttgaaagactttaaagagactcttgcgatggcaaagcaagttcttgatgatgaatttgctagcatggaggccatagctgaatcgaaagcgaaacttgaagataagctagatggtctttatgcatctaataatgaacttgaagagataaaggatgctgcgactagattaaaagatctcattaaagacaagaaagatgataagcttgaagagctgattaagaaggcacaaatgcttatagtttcgaagcctatgcatcaatgtgcagacgagatgatacttaagcttaacgatgcaataatcaaagtccttgacgaacttgatgataaggcagccattgaagagatggtcaaagaggcattagagaacctagaagacattagcaagggaaggatcttcttcttagaagataggtcttacacacttatgagaacaattagagcgaataaggacacggacggcgaggagtcaaaggaaactttgcttaacgcacttaaagatgccagcaaagttaaggaagactacgacactgccatagaagaacttaaggatatgcaagcagctgcagatgattacgaaggcctactagcagaccttggcctaaacgagaagaattcagataagctagcagccatagatataattaagcatgtgaagggagttgcggcttctaagtctaagatcacagaccttgataagatatctcagctttgggataaacttgatagtacagacgagcttcttaaggatgagatggctcttgatgatgagttaagaaagcttgaagactttataagcctaaataagcttaaactgaaggaaagtgatacggctctcatagatgaagcagatgaaatgcttggaagggaaaagcttagcgatgaggagcttagcgcaaagaagaaagagcttgaagaactattagctaagctatacaaagctgtgattagtagaaaggacgcagaagacactttaaaaactgctgaagcaattatcaaagagaatgctacttataaggcagtacttttaaataaagaagctttaaaggcagcactttcaatggatgatgaaagagccattacaaaggcaaatgaagaacttaagaaagagattgcaaggctgataccgattaagctcatctaccaaggaagggatatagaaggcgagactataagcttcgatatgaagtccgatatgagtgtggacgaagtaaggcgccttgtttatccaatgcaaatggataagagtgcacttagctcatgcaagatgaagctaagcctaggcgaaggaactaagcaagaccttgcagttaggaacgccaaggaagagatagtgacgttcagaaagccaagcatgaaggacaagatcaggatcaagttcacttttaactttgctggcaaggcttacgagtgtacgcttgagtacaggtcagaggacaaggcaaagaggttcaaaaatatcataggcatctatagagcgcttgaaggagagagcatagacgagaagttctttaaaaattacgaaggcggcgaagcaaaacttttcgatattgctaagggcgaagatgcaagtgaggctttaaaagtaaaaattctaaaagatggagagcttcttagtagtaaggacactaagcttagcaagggagtttatgacgttatcttctactaccttgatgatgctgaagaagtaagcgcatctacaagttcaaagctcatagttgatgaggctatcagtacaaaggatttattatatgtctacgatggcgataatgcgtcatacatcattcctactaaggatgcgagtggcaatataattttcggcttcaaggtgaaagaaagatgctttgcctttccaaagacggtaaagatattctctcaagatagtggcgtggcttttcttaataaagactctaaagcagagctaggagttaaatttattgatgcgagtggtaaagagctaagcacgagggcagatgctcttaaggctaaggagatctttttagtcttattagaggatgcagaaggaagccttggcgataggaacttaagtcttaaaaaaggcgagagatatcaagtaccaataattaaatagctttatatattaagagggactagcttagcccctcttttttatgccgcgcgaggtgatatatgagaggcttgctaccatatgagaagcttgctaccatatgagaggcttagtactatataccaagcgagctatgttttgtaaatatattgtatctaattaaacgcattttcaagagcctttgtattgataattcatatcttttgtggtaaaattaagtttagaggttgatataatgacagagcttttaaaaattacagatgataatataaaattgtgcgctgaagagattaaaatgggcggtctagttgcctttccaactgaaactgtttatggcctaggagccgatggactaaacgctgaagctgttaagaagatttacgaagcaaaaggtagacaaagtgacaacccactaatacttcatattgcgtctttagatatgatagagccgcttgcatattatgacaaaaaatatgatgctcttcttgatgccttttggccaggacctatgactataatcttgaaaaagaaggacgtagttccaagcgtaatcacagcaggtcttgatagcgtcgcaatacgtatgccatcgagcgaggttgcacgaaaacttatagagtatgctgggactcctatagcagcaccgagcgcgaacatatctggctatccatcgccaacgtgcgcagagcatgtatacaaggaccttcacggcaagcttaagtacatactagctggagagatgagtgaagtaggtatcgaatcaactgttatcgacctaagtagagacaaggtacgcatactaagaccgggcaagatttccttagaagacttgcaaaagataataccggatgcagagtatgatgaggcaatcactgatgataaagaagtgaagaaaccaatcagccctggacaaaagtatacacactacaagcctaatgccaaggtggtcatcatcatgggcgagggtgaggaccttattaaaaagatgaaggccgagtatgaggcaaaccttgacaagaagccagtagtctttacacttagggagtacgaagacgagtttcatggtttcaagaccatggacctaggcagtatcaaggagcccataagcatatcgcacaacatctttaacctattaaggacggcagatgatatgggatacggctacatcatcatgcaaggttatgagcgcaaaggtatattcatggcgattatgaataggattatcaagtcttcgggccacaacattaagtattgaaaatagaaaatgtatatgataaaattgtaaaggagaggtatcatgagaaagataggcatagcatcagatcatggaggatttgaactaaaggaaaagttaaaagcttatatgagcgaaaaaggtttagacgtcgttgattacggcacagactctacagagtcagttgactatccggtttatggcaagaaagcagcgaagggtgtaattgctggcgaagtagagaaggcagtcgttatctgcggcactggcataggcatatcactagctgcaaacaaggtagaaggcatcagatgcgcactttgcactaatgaatacatggctaagatgtcaagaaaccataacgatgcgaacatgctagctcttggcgcaagagttataggagatgaacttgcgaaatctatacttgatacatttttagcggaagaatttttagcaggaagacataaaagaagagtcgatttaatcgaaaattgttaggagggtattatggtaactgtatttgatcatccacttattaaacacaaactaagcatattaagaatgaaacaaactggcacaaagcaatttaaggagatagttacagagctatctatgcttatgggctacgaagtaactagagatttacaattagaagagatgcctatagagacacctatatgtaaaactgttggctatagtttagctggcaagaagatagcactagtgcctatacttagagctggtcttggtatggtagacggcatgctaagcctactacctgcagcaaaggttggtcacataggtctatatagagatccaaagacttatgaaccggttgagtactattgcaagctcccttcagatatagagaagagagaagttatagttcttgacccaatgcttgcaactggtggaagtgccactgcagctatagattttttaaagaagagaggcgcaaagcacattaagcttgtaaacatcattgctgctccagaaggagttgaatacgtaaagagtcaccacccagatgttgacatctttgtagcaaatgttgatgaaaagcttaatgaacacaagtacatcgttccaggacttggagacgcaggagacagacttttcggaactaagtaggtgaattaattgagaagaatatattttgcagcttttgtaagtttagttttagcgcttatacttacaagattgcaaataaaattgtctaagaagcttggctttatcgacgtgccgaaggatcaaagacgtatgcacacagactctgtgccaacatgtggcggcttcgctatgttctttgcaatcttcattccatatatgatactatacaaatttacgccaaggaacacagccattttcataggctctatcatcattatgctatcgggtttttacgatgacatacatgaccttaagccgaagtataaggtgttatttcagcttatggcggcgcttgtggtttactttttaggcaatattaggataatgaacataggtaacccatttatcgataacaaccttttgagcttgggttttctatctctgcctgtaacactattttggatagttggtgttactaatatcataaacttaatagatggccttgatggtctagcaggcggtgttgtctttatctcatcaatgaccttagctgtagtttctgtttcgtatgaacagtactcactaacagcactagctttatgcataggcatgagctaccttggctttttgaagtacaactttgcacctgcaaagatattcatgggagacactggagccttgctagcaggatttttgctcgcagtagtaactatacaaggagcgatgaaggcggtcgctgccatcggcatcatagtaccaatcatgatacttggactaccagtcttcgatacaacttttgcaatgattagaaggctgcttagcggtagatcgattgcttcagctgacaagggccacttgcatcatagattattaagaaagtattcgacaaagaagacagttttgatattatatacaatatcagccatattctcaatctttggcatacttgtgatgaagcttagaaacacagtatctgtacttttgtctggaattatttttatgattatagtatttttagcatataagattggattgtttaaggatggtgaaaattgaaagctttaataatatttggcacaaggcctgaaggtataaagatggcacctattattaaagagttaaaaactgctgataatgttgagcttgtaacatgtataacaagtcagcacagagagcttttagactctgtaataaaggtttttgatcttgagattgattatgatttaaatatatttgagaagggacagactttaaccgatataactgttaggtccctaaagggtcttgaagaggttattaagaaagagaaacctgatgtagttcttgtgcaaggtgatactacaacagtatttgcaggtgcacttgaggccttctacaatggagttaagataggccacgttgaagcaggccttcgtagtggcaacatccatagtccattcccagaggaagcgaacagaaagcttactggtatcatgactgactttcatttttgcccaacacaaagggcgaaggataaccttatcaaagaaggatatgatgagagtaagttatacataacaggtaacactgttatagatgccctactaatgactgctgacaaggtagactcttttacaagagatgaccttaagaagctcgacttaaataagaagctaatacttcttacttcgcatagaagagagaaccaaggtgaacctatggaaaatatcttctcagctgtaagaaagattgctgacgagtttgatgatgtaagcatagtctttcctatgcatccaaatccaagggttagagagcttgcgaagaagcaccttgatggagcggacaatgttttactaacagagcctgttgagtatgaagacatggcatatatattaaagaacgcttacatggttgtaacagactcaggcggattgcaagaggaagcacctgcacttggtgttcctgttcttgttattagacgcgagactgaaagaccagaaggcattgaatatggtactgcaaagcttgtcggaactgagttcgatagtgtttatactaatatgaagacgctacttactaatgaagacgagtatatgaagatgcacaaggccatcaacccatatggagacggcaatagctccaagataatcaaagatatattgataagagaggtaaagtaatgaaattaggtatagtaggactacccaatgttggcaagtcaacactttttaatgcgataacaaaggcaggagcggaagttgcaaactatccattctgcactatagaccccaatgttggcgttgttgaagtgccagatgagagattaaaaatattaacagaagtaaataaatcaaagaagacaataccagctgttattgagttttatgacatagcaggtcttgttaagggcgcgtcaaagggcgagggccttggtaacaagttcctttcacacataagagaggttgaagccatagttcacgtactaagagtctttgaagatgaaaacatagtacatgttgacggcagcatagaccctataagagatatagagactatcaacctagagcttatattctcagaccttgatatggttgaatctaggatacaaaagcttattaagcaggtgaagggtgacaagtctttacaaagcgagcttgacttacttaatgaagtgaagaaggttcttgaacaaggtaagtctgcgagagtcttagaacttaatgatgatcaaaaggctatgcttagaagctttaatcttttaagcttaaagcctataatttacgttttaaatgtatctgaagatgactacatcaatgacttaaaggataacaagtacattgcaagacttagagagtatgcagagagcgaaggatctgagatagttcctatctctgtaaagattgaagaagagatgagtgagcttgatgatgaagaaagaaaggctttcttagaagacatgggcataaaagagtctggtcttgacagacttatcaaaaagagctacaagcttcttggtcttatgagcttcttaacaactggtgaagacgagacaagagcgtggactattaagaatggaactagagccgttgatgcagcggcaaagattcactcagacatcgcaagaggctttatacgcgcggaagttgttagctacgacgaccttgttgctaacgagatgtctatgaacaaagtaaaagagaagggccttatgagactagaaggcaaggactatattatgcaagaaggagatatagtttacttcaggtttaatgtataatgaaaattttagaatatgatgaaaaattaacttttaagtctaagtactacgatgaggaagctgtttttcttgatattgaaacgacaggacttagccccatgagaagctttatctacctcattgggctagtttttattgacttaagtaaaagcactatgcatataacacagctcatagctgaggatgctgatgaagaggaagaaattatctctataatgaatgagaagcttaaaggatacaaaacagtcgttacatacaacggcaactccttcgaccttcctttcatatctaagcgcgctgagcgttatggcatagccgtgcatgaactagcgtcctttgatatgtatgagaagcttagactgcataaggacaccttagggcttgacggacttaagcaaaagaatatcgagaagaagcttggaatcattagagaggaccgctttaatggcggtgagtgcatcagcttctacaaggactacgcgaaaaacaagactaaggagagcttcgatagattcgttcttcataactatgatgaccttttatatatgcctgcaaccatgtccatactcgacctcttagatgagaagatcaccattgacatagatggacgcaagtataaatttgataagcatagtattaaaaaggatatcttagtgattgatttcacaactgatatgggtatcaatacttatgtagaggagcagggctacctcgtagaagagaacgagggacacaggcacctagagtttacactcaagactggctacatgaatgatgcgcgtaaggtgaagtacctagagaagaaaagcttaggcaggctaaaatgtgacgactttgatggcgaagacttagtggcaggtggcattgttcctatacgcatacaaaataaattatttattcgaaatataattaaattaggtagtatttaggaggttaagatgaaattagaactttattacaaggctgagtgtccatactgcgagaaggtacttggatatatgatggaccactgcaatgttaagggtgttgagcttatcgacatcaaagagggaaacaacaacgaagacttaatcaaaagaggcggcaaggatcaagtgccatgtcttttcatagatggcaaggcactttatgaatcggacgatataattaaatattttaaagaaaatttttaggaggtttattatggattacaaagaattaccagcacaagaagtttttcattggtttagagagatcaaccaaattccaagaggctcaggcgacgaaaagagaatttctgactacctatacaattgggcaaaggaaagaaatttagatgtatggcaagacaaggcgctaaacatcgttatacacaagggcgctacaaagggttatgagaacgcaccaaaggttatcttgcaaggacacatggacatggtttgtgaaaagactttagatagcgaccacgacttctcaaaagatccaattgagatgatagttgacggcgactacctaagagccaacaacacaacacttggcgctgatgacggtatagctgttgcgatggcacttgcagtactagatgcagatgacattgagcatccagcattagaagtagtatttacaactgcagaagaaacatccatggtcggagctataaacttaacaaacgaacacctaagcggcgactacctattcaacattgactctgaagaagaaggcatattcttatcttcaagctcaggtggagttaatagtgaatccaaattcaaagtagaatacaaagataacgacaaaaaagctttagaaataacacttaaaggctttacaggcggacacagcggcatggaaatcatcaagcaaagagcaaacgctatcaaagttttagcaagactacttaatgagtgcaactgcgataaactaagattagtctcaatcgaaggtggtactaagcacaatgccatcgccaacgtctcaaaggctactatagttcataaagattacgctaaagttaaagaagcaatgaatgaattattcagccatatcaaaaaagattatcatatagaagatccaaatatgacacttgaatttaaagaagtcaaagcagataaacgcatgacaaagaaagatacagatagaattataaacttcttaatgcttgctccacacggcgttatatacatgtctaaggacatagaaggtcttgtaatgacaagctgcaacgcagctatattaagaactgaagcgggtagcgtaaactatctatgttcaatcagaagctcatcagatgcagctttagttgaagtaagagaacaagttagaatcatgacagaagtacttggcggcaaagttgaactttcggaaagctatccttcatgggaattcgatgaagacccagtactaagagacttagtatcaaaggtttacaaagaagaaacaggcaaagacgcagaagtaagcgctatacatgcaggacttgaatgcggtctactaaaacaaatcttaccagatactaagatgataagcttcggaccaaacatctacgacgttcatacagcaagagagcacctagatattaagtcaactgaaagaatgtggaagttcctaaaggcacttttaaaagctgttaagtaactataaaacacaatagatagaatgataaagacctctttaccgtcaaagcagtaaaggggtcttttatattggaaaatatgtttaattaaaattggcttctacctttaaagacaaaagatacttcgagacctgggtttttattgtttataataaattctgcgtcgtgcagctcggcaatttgcttagaaataaagagacctaagccatgttttgttatattagtcaagtcttcttcgttaattcttcttataatatcttcagataatccgcagccttcgtccgatatagtgatacttatcatatctttactctcattaagcacaactttaatttttccgcttgtataagtaagcgcgttctttaagatattttcaagcattctataaaataaattctcatctaacttgatcttaatatcttgattttcaatattattttcgaaagtaatgtctctatcgggattttcatttagtttgtcaactataagttttctgattatttttaaaggattttcacaagtaaaattctctttatcgatgttagataatgatatggtgaggtttagaccctctaagatatttgaaatttttaaaacttcgtcctgtataagttttttatcaggattttttttatttacttcccaagaaattttagcaagcggcgtcctcacgtcatggctcacacctctgatccacttgcattgtgattttttcaagttcttatatttttcatttgcttcgtttatggtagccatcaaatcttttaattcgccgtattcatcaagcttttcatagtcgtcctcatacagcttatcaattgctctttgcagtgggagtatatttttaaggatatttttaatatctaatttataaagcacatagacaaataataagaataaaattacaaatactaaaacaagtattatattgaaaataaatttgctgtaactatagtaattcgaaggtaatttgtccaaggaatgtttcggatatgcaaagacaattaggccatcgtctaaaacgtaggtaaatacagggtagtcagctaagtagtatctcgcaaatcttgcaacatctcttatgtcaaacttatttttaagctcttttggcttgttaaagctctctataagatttccatctttatcgagtcttatagcccaaatatctttttcttgtaaaaacgctgtatttttcttgtttagataagtatccgttttattttctttcacataggagtaaatataattagggtttggatatttattatttaatctatagtttaggtagagaaaaatcataagtaaaaataatagaaagaataataagcttagtattctaattacaatttttttaaatctttttaatatataattaaacattttaatcctctttaattagtttgtagccaagaccctttattgtaatcaaaatcttgggatttcttggatcgtcttcaagcttttctctgagcctgtatatgtgcgttatcaaagtattttcgtaaccataagagtcttcccaaatattatctaaaattcggtcaattgaaactattgtatttatattttgggataaataatctaaaattttaaattgctttgctgttaaaggaatttcttcaccatttttttcaagtatccctctcgatttatcaaaaactaccttacctaaattaattttctcatcacttttaatttttttacttcttcttaaaactgcatctatcctccaaagaagctcatcaggaaagaagggcttgactatgtagtcgtcggccttattttcaaagcctaatcttctgtcatcaatgccatcgagtgcagatagtattataacagctacattagacgtgcttcttatctcctttaatagatcaaagccgctgccgtctggaagcattaggtctaaaactaccaaatcaattttataattttctaatttaaatctggactccttcaagtttttggcagtataaacttctttaaaacccttgtctttcaaaaaattatataaattttctagcaaacttttttcatcatcaactaacaatatgctaaaattacttctaaaatccattgtcccacctcattaagaccattatacaacatttttttaatatatttggttttatttgaatttgttatctaaaagtgagcttgtgtaaactttatatttatctttgagtgttattatgatcttaggaggaatgattatgaaaaaaatacttgaagtaaaaaatttaaaaaaatcttacaacaaaaaattggtcttagacattgactctttagaaatcgaagaaggttctatctatggacttattggtaaaaatggtgcaggtaagtcaactcttatgaagatagtgcttggtcttgtaaaaaaagatgagggcacagttaaagtcttcgatcaagaggtagaggccaaaaatcaaaaggatattaacaaaaaccttggtgcccttattgaaaacccatccttttacgagcacttaagtggttacgagaaccttgagatagtcgcaagtctaaaaggtattaaaaaagacagcattactaagactttagatcttgtaggacttaacaatgtaggtaagaagaaggctaggaactactccttaggtatgaagcaaagacttggtatagccatggcacttatgggcagccctaaactattgatattagatgagccaatcaacggtttagaccctcaagggattgaggagatgagaaatttgtttaaaaacatcgtgaagaacacttctactagcattcttatttcttcacacatacttgatgagatagaaaaaatttctactcacataggcatacttaaagaaggcaaattgacttacaacggaagtttagatgaatacagaagacttcatccaccatatatatcaatgattacatctgacaataataaagctttagaacttttagatcttgatataaattgcataagtgataagaagataattttaggtaaaaaatctaaccaagaaattgcagacatagttaattttttagcagaaaaagtagatatatacaggatagaggaagaaaaagaaagtctagaaaagctatttattgaagaaagcaggtcttaagatgaaaaacttagagaggaaaaaatataaaagacttggaacaaatttcttaataatagtagtgttcatcgctcaaatgctgatggtagcaggtgttagtcactcgaaatcgttcgcggaaggggcatatccacttgcctacatcctagacacgtatttattcatatcgctactgattaacccaatactgatctcgtctcttgttaaaaaagttatagagattgaagaaaaaaataatatgtggaagattcaaattatgcttggagagaaagttaaccacatacttataaataaatttaaaaatttatcgttaaaattaattatactgcaagcacttgaagctctattctttatcttactcgcaagaaaatcagcaaatttcagtatgagtagcgaaatgctcttaagatttgttctagttaacttatcagctctgataataaatttatttttcttgggattttttatgatagtggagatgaagacaaaaaaagtctacactttatcgtttatttcaataataggtggacttacaggtatcatcaccatgctaacatctaaagcactgtcatttatcaacccctttgcatggatggcaagccttttaaatgtttcttatgtgctagaaaatgaaaagtttattcaagttctaaacccaataaatttctacacattaatcattgcttttgcatttttagtgcttatgataatttatataaagacaatgaaatcatataatttatggaaggactaggaggaaaaatgttaaaattagaattaaaaaagataaaatttataaacatattgctagtaagcctcataatacccttattagccaacgcttttggacttataaactacatgggtaacaaggcttcactaacgcacgagtggcaaagtctgtgggcacaagtaagtttattctacttttcgttcttctatatacctttaattgcaatcgtcgtagcaagcttgtggtcagtagagcacaaggcaggacttaaatttataagactaagtccaaagaagaacatatcctttgtattagcaaagatgcttttagctttcattatagtaagtctatgccaaatatatttcttcttgcttttttatttaggaggaaaatttatagcaaattttgcgagtataaactttagcatatatatttactatatagcgatgagcatacttttatcacttccaatcatagcaatcttcagtgcacttgccataaggatcaaatccttcggcatcatagttcttctctctagtatatttacaatactaggcttgggaactgcgtatagggcactcaaaatagttggactaagctttttggcaatcgagtcaaacaacttaaggtttataaatgctcatgatttaagcttattagtagtctttgcagctgcggagatcttgatatccttgtatctatctaagaaaattttaaaatacgaaaataaataatatcaaggggcacaatcatataaattgatatgtgccttcttttttatttgtgctataatatagtcaagaaaggagtcagtatgaactacattacttacggcgataaaaacaataagtccttagtctttattcacggtcttgcatcgactgcgaagctatgctttggagcacttttgccatatttaagtgattattacgttgttttatgtgagcttgactgtcattatgatgaaagtgacaaagatatcttctccatgaaggagtgcatagagagaatcgaagattatattgtgaaaaatttatctggcgaagtttatggtctgtgcggcttttcgatgggagcgaccatggctgtagatcttattacaaggggcaaaataagggctcaaaggcttatacttgatgccgccatcactatagagatgggtcttatggcaaagccgttcgcctatgcatttgctataggtactgataggatcaaaaagggaaagttcataccaaagtttatgcttgactactttatgggcaagggcaacgacagcgtgagtgaaatgatgtatgcaaatatcactaagaagactatattagacgcatgcaagagtctgtatcactaccaagtatcagatgagcttaaaaattacactaagcctgttttgtttttaaggggtagtgaagaggcggtgccgaagaagagtgaggaggtcctagcgcaatacttaccacagatggagagtatgatcatagaaggcaagggacatggccaattcttgcacgaagagccacaagagtatgcaaagaaattattagactttcttaagtaagacaagttaatctatatataaagaaatgcacctcatatgaagtgcatttttcattattatttaatttttgattttcataagttgcgatggaaggcagcctttgtatctcttataaagcgttgtgaacctactttgtgatgagtagccaacagactttgctatggacttagcgtcaaggtcggttgttagtattaggttctccgctacattcatcctttttctttgtgtgaactcagttatactcatgccgtacttcttcttaaaagtgtacttaagcttggttgggctcatcatggcgatctttgaaagaagctcctccttaaagttcatagagaagtgatcctctatatactttgctacgttagtgatggatctgtcatcatctggtgctagctttacatctcctttttcatcagctaaggcactaagcgagatggctatccattccttagctttttcttcgaagaatacttttgcgctatcttcgtcaagcttgcacttaagtatctccgtcgctatcttttcaatctttttagctaccattcccttagtctctacaaaggtggaagggatttttgttttattaagattattcgtcttataaaaatcatcatcaaggaagccctctttaatctttaagctcacagcactatatctagagttcttgtgcaagacatacttagacacaggccttgacctatccattatatatatagttcttggctcaaccacttgataagggtagaaagtttcgcccgaggcagatatgatgaaagtcgacgatatacagtagtgcattgagacatcaggtgcgtccttatatacgatgtcatcaagcatcttcaaatcatgaatatcaaagataaagtcatcactttcgtagaaccagtagtagcccttaatattttctttgtttattagatatgtttcgccaagccttgggaattgtttaggactttcgattttttcactgacataggattggattaagtttttaaaagtattcatagcttcatctccactatcacaattagacaatatatcagaatgatatatgcgtgtaaatatattgtagcacagtttgaagccttgtacaatagatattgataaaaaacttagtaataagtaagaaaaagtttatttgcactaaactttgttaatatatgtctgaataagatagtagatatatgccccgcataaaaaatgcactccaagtatgaagtgcatccttatatattatttcgtttttatatctataccttttttcttaagctgcttgttcttgtatatagtaagcagtgtatatatagtcgagaacagtggtacaaagagtatcatacctatgacaccgaagagcgcaccgcctacagtgatagcgactatgacaaacatcggaggtaaacctaccttgttaccaactatacgtgggtaagtgacgttgccgtcaaactgttgcaagcataacataaagaccacaaacatcaaagccttaaatggcgattgaagtagtattagaagtgcgccagttatgacaccgatgtaggctcctagtattggcaccaaggcaccaagacctacgatgatggatatcgcaggagcaaatgggaacttaaatatcagcatgccaacaaagcacattgaaccaagagcaagagcctcaatgaattgtcctgtgaagaagttgtagaagttgtcaaaaactatctccccaaatctaacaaacttatcagccaagctttcagagaaggcagagtatagtagctccttcgtctttctagataagtcttccttagatagcagcgcatatattgcaaaggtgaagcccataaacacagcaaataaagtgtttaataccgagccgacccttttaacaacagtgttgaataggtccgcgtttgcatttttaaagtagttcataagagctctctgtgcactgtcgatgttgagcttagagaagaattcgcggatgttctcttcgtactccttaagtataggcagcttaacaagttgatcttcaaactcaggaagcttttctgcaacactaataagggactcttgcacacgaggcgcaacgatgtagccaagtaggaacataacgccgatgagtatgcatatagttaggagcatggatataccgcgtttgaaaccaattttctttggtctccacttgccaaaaattttctcctcaaacagtttaagcggtatattaagtatgaaggcagcaaagccacctgccaagaacggcgtgatgatgcttaagaagaagtttaagtgcgaccacaaagacttcaaattcgaaagcgccacatacaaaatgacaccgaatgcaactatctttaaataaaagaacaacgattttttactgtatttctcgtccataaataagcccccttcttaatttaattatacaatagacaaaaattttattcaacataaaagtaaaatttacataaattttacaagaacttaagcgtaaaaacacatgatatgacttataatatacttgtagaaatttttaaatcaataaaaggagtgtgttcaatgagattaatgtcactagcattttcacttattaagtatccgaatatttataagaatgcggataaaatacacttcaaaaaacctccaaattaatatttaagcagaaagataggctcgttgagagtctatcttttttactcattatatcatgagcagtaaatatgaacttttttaatttgtggtgtgttgcacttgttattataaattatcttgacaaaaaaaatgaaaagtgataatataattatcaaagataatctaattatcaaaacttgaaaaatgagaggagaaaatacatgtcatattgctctgatataacgaaaaatagaattttagaatgcgcgaaagaggagtttttagataagggctttgagaaagcacaggtagctgaaattgctaaattggcaaatgtaactacaggagcgatttatcgtcatttcaaaaacaaggaagcattattttttgctctaattgaagaggaatataattatacgctagctattgtttctgatgttgaaaaaaggagtgaacataaaactattcaaatagaatctgattcagtcgatgatgaagcgattatagaaaatttatttctggaaacaatgctatttgttgattatatgtatgcacattttgataactttaagctgatctttgcatgtagcaaagggtctaaagtggaaaactttattgaggatattactgaaagatatacagctaaaaacatgaagcttattcattttaatgctaaacaagagcaaatcaacacagaaattaaagagtttgaagttcatgttattacaaaaggatatatcacatccttatgcgagtgcgttcttcacgatataccacatgataatgttagtgaatatattagaagcattgttgtttttcaatattatggttggcaaggtttaatgaagaaatacaattaataatttttagccttgaggttagcgaacgctaacttaattgtcgaatgaagggaggctttattcttggaaaataaaaataaaagtgctatttcagagttatttaaatatgctggtagcgagaaaatacaattatacaaatcaattttgttagcgatcataggggaagtatttggaatgattccctttttagccatagctaaaatgatagaaaaaatttatcagtcagatctgtcatttcaaacagtgctttctataactcttgtagctttaggtggacaaattttaaaaggcattttcactttgtattcaacaatgacttcacacaaagcaacatttcacattttgaaaaatataagaagcttagttgcagaaaaaatgttaagagtacctatgggggtaatgatagatactcccataggcaaatttaagaatttaattgtagatatagtatcgaagttagaggattcaatggcacattttatgccggagataacatcgagtatagtatctcctgttttatttttagttttaatttttgttttggactataggatgggcttggcttcgttacttacaattcctttgggaatgcttggatatatagggatgatgaaagattatgagtctagaagcaaaacttatactacagctcaaaataatatgaatagcacattggttgaatatgttaatggcattgaggttataaaagcttttaatcatagtacatcttcatatgaaaaatttacgagtgcaattcaatttttccatgatagtacccttgcttggtggaaacaaagctggttatggtcagcatttgttcaagcggttatgccgtcaacacttttaggcactttgccagttggtgcatatttatatatgaattctcaaatatctctatcaaatttcattgtgtgtattatcttacctatcggctttattgcgcatttaatgaaaatcggaaagtattcggagcaattcagtatggttaaggcgagtttagatgtgatagatgaatttttatcgaaagatgaacttaaaagaccaacagagagagtagttcttgataatacgctgtatcgttttgaaaatgtttcgtttgcttatgataaagaacttgtattaaagaatatcagttttgaattaaaaccaaatacagtaacggcactggttggcagctcaggatccggaaaatcaactatagcaaagttaatggctggcttttgggatccaacagcaggtaagataatttatggcggtaaaaaaatttctgaaattccatttgaacagctaacaagtgagataagctatgttgctcaagataattttttatttaatacaagcataaaagaaaatattaaaatgggaaatccaaatgcaagtgatgatgaaatcattgaagctgcaaaagcagcatcttgccacaatttcattatggaacttgaagatggatatgacacaaaagtcggtgatgcaggaggttctttgtctggtggagaaaggcaaagaattacgattgcaagagccatgttaaaacaagctaaagtcattattttagatgaagcaacggcttttgcagaccctgagaatgagtatttgattcaaagtgcaatcaacaatcttattaaaggaaagactcttatcgtggtcgctcacagactatctactattagaaatgctgatacaatccttgttatgaaagatggggaaattgtagagaatggaactcatgataatcttgtaaaaaaagatggagtatatgcttccttgtggaaaaattatgtgggcggattagatgatgaaaaggaggcgatttaaatgattacgattgtaaaacgaatattaaaaacatcagggaaatatcgaaaaaatgtaatccttggtcttatatttagtggattaaaatcattttttgtttctttgatgttgttggcggttttattgattatgattaatcttgaacagatgaatatgactattattatgcaggcaacagcgattatagttgtgagtatattcggcagattcatatttcagtatctttgcgatagaaaacttagtgcttcaggctatgagatttttaaggataaaagaattgaaataggcgaaaaattaaagaaagctccgatgggatatttttcagaaaaaaacttagggacaattcaagctgttttaacgacaactatttccgacttagaagctatggcaatgcttgcgatgaactttattgttggtggattttttcaagctctaactatgacaatcatgttattaatcttttgttttccagtagggatggtgtctttaattgcgataatccttgggatagttgttcttaaattaatcacaaagaaaactgaaaaatattctcctattatgcaagattcgcaggaaatattagttacagaagcaattgaatatatcagaggaatttcagtgcttcgttcatttaagaaagggactgatggaaaaaataaagttgaaaaagcttttatgaggaaatgcgaagttgatatagaggtcaatgaaggttcagcttatttaatgaaattatatgaaatgattttcaaggtagcaagttgtgccttagtgcttgttgctacggttttatatatgaattcacaaattccactttcatatgcactgatgtttatagtatctgcctttctgatttttttggaattggagttggtcagcgatggagcttttttaagcagaatgctcgcaacgcagcttaaccgattggaatatatttcggacataccttcacttgatgatggtggaaaagagattgatttggattcctatgatattgaattgaaagatgtttgtttcggctatggagaaagggagattttgaacaatataaacttgcaaataaagtctaatagcagtttggctatcgtgggtgcttcaggttcagggaaaacaacgctatgtaatctgatagcaagattttgggatgtcaaggagggtgaagttcttattggtggacataatgttaaggattttacttcggaaagcttattaaaaaatatcagtatggtatttcaaaaggtttatttatttaatgatacgattgaaaataatataaaatttggaaatcctaatgctacacatgatgaggtggttaaggcttgtaagaaagcttgttgccacgattttataacaagccttagtgacggatacaacactgttgttggagaaggcggaacaacattatccggtggagaaaaacagagaatttcaattgcacgagcaattcttaaggatgctccaattattattcttgatgaagcaacttcaagtgtagatcctgaaaacgagcatatactaattagtgcaattaatgagttaacaaaaaataaaactctcattagcattgcacatagattatctacggtaagagaagcagatcaaattattgttattgacaaaggggaaattgtacaacaagggaatcataaggaactaattagtcaagatggagtatataaacatttcattgaaattaaaaaacaatctattggctggcaaatataggtgatgaaatggaaaatgtagttattgattttgagaatgtgagcttcagctatgggacacaaaaagaagggtgtctaaagaatataaatcttaaaattcaagaaggggaatttgtattgcttaccggacaatctggttcgggaaaaacaactgttacaagattgataaatggcttgattcctcatttctttgaaggaattttgactggaagcgtgaaagtaataggagatgatataaggactgttactcccggagaaatgggtaaaaatattgcttctatatttcaaaatccacgaagtcaattttttacgacgaatagtaccaatgaagtggcatttgctcttgagaattatggagtagatagagatgaaatgatagatagagtaaattgttcgtttcacgattttgaagctgaaaatcttatggatagggatatgttttctttatctagtggtgaaaaacagaagatagcgattatagctgcaaaaaccttgagtcctaagatttatgttttcgatgagccatctgcaaatttagatattccttcgattcttaaattgaaggaaataatggaaagcttaaagaaacaaggacatacagtgattgtttcagagcatagattgttctacttaaaaaatttggtagataaatgcttgataatgaaagatggagaaattgataggcaactaaatcacgatgatattgaaaatttggatgaaacggatcttcaaacatataaacttagaacatttaatttgagcaatatcaagtatggcttaaagaacaatgcacctattagtaagcaacaatcagactttaaggtggagaatttatcattttcgtataatgcaaataattcgattttaaataattgtaatttagaaggaaattttggtgaaacagtagctatagttggacacaatggaaatggcaaaacgacattaggaaaaataatgtcgggtttactaaaagcaaaaagtggacaattttacattgatggtaaatttgtaaagcaaaaagaattatacaaaaatgtatattttgtgatgcaggatgcagattatcaactttactctgattctgtcgtttccgaactgatgcttagttctatgaatagtattaagcaaaatgatgaaaaaatagaaaatgccatgactttattgaatatttcatcattcagaaatagacatccgcaaagtttatcaggagggcaaaagcagcgagttactattgcagctgctatagcttcaaataaaaaaattctgatttttgatgagccaaccagtggacttgattatgagaacatgaaaggtgtatcggaagcaataaattatcttcgcaaaaagggaaaactgatttttgttatttctcatgatttagagtttttaagtaaagtagcaagtaaagcagtgtttatagagaacaatactatcattaaaagcatcagcttaaagagtagtgatgattttgaaacggtaaaaaaatttttattacagaatgagagatatgaagaatgaataaatcttgcaaacaaaatggaataagatatgatccgaggattaagttgttacaagttttaattatagggattttagtatttacattggctggtaaaaagtatgaagttctactttttttgtcagtatttgcatatggaatgataagtggaatttacaaaacttgttttaaattcttagttttatatgtagtgttgtttatgctagcagaaataagtcctttatttatttcaacaacaatacactactttatccttccctttgcaacattgacatttgcggctattaatatgagtaggacaagtgatgtatctgaagtattagcttccttgcaaaatatgaaaatcccatactatatcaacattccattggctgttatattaagattttttcctaccttgaaacatgattttatttgtataaggcagggaattaaaacgagagggattgatatttccttccttggatttttaaaacatccatttaaaatttatgaaatgatgttgattcctatgttaatgcgaatgttatgtactgcaactgagttgtcggcatctgttgagacacgaggacttggagtttcgtgcaaaaaaactagttatacagaagtcaaatttcgtatgcttgatatgttattgctagtaataatgattgtattttatataactatcatcattatgaaaataaaaaatatttaaaaataaggagaatgattatggaagaaaaaaagaaatttcaaattaaagatttaattattacagcactaatggtgttatgctcacaggttttatacagagtattaacctttttgttcgtaacgccatatacaatgttattggctgttccaatatgggcaattattggagctattgcttatttcttagtaccttttaaaacaaaaaatccgtggatgattttattgttctgcatacttacaggaattataagcttttatccaccatatataattagtttgataatcgcaggaattattgcgatagtaattgcacaaacaaagggaatacaaaattataaaggattaacaatcggttatataatattttgtattcttgctggttttggtggaatgtgtgttccatttcttttctatgcagagcaaacgattaaatcttatgaaaaaatgtttggcagtgaatatatggaaactctaactaaacttgtttcccctatgacctcagtactatttcttgttgttatagcgatttgtgcgttgattggagcagtaatttctaagaaactattgaagaagcattttgaaaaagcaggaatgatttaggatttttcatagagaaaattgggggaagggataataatgaaaatgacaagatacttcattacaatcaatcaaattatttgcccttcttaaattcagaaatgcttttatatagcaatatcttttaaaaaaacagataaatagaaaacaataaaacattagttttaaactgagaggactttttacgccaaagtatagaagtcctcctttttattcaagaaaaaatttatatttgtctaaaaagaagaagcctttgaatcttctcgcaaaagaatccgcaagttaatcttgcggattctttatttcatatcatattcttaaagccacttggcaaggtcacaacgcttggcttctcaggcatcttattgttaagctcgagtcccaagtagcctatcttgtcatctccaaacttctctctgatctcattgaagactttttcaagtctatcgtccttgacaattttcttaggggcgaatagactcagctgctcggtgtttgtgttccttgtaaggtttatcgcggatatgcataggctccttatgccttctttgaagtcgtagcgcgacctgaagagctccatcgccatatcgtttattctaagtgcgcttatgcttgtctgtgtaaagaccttttggaaactaagcgtctcaagctttctgtctcttatcgatatccttactccgcctgctttgagattctcttcgaccaattttttgctcacatcaattgcgagttcttcgaatatttttttaacctcatcgtaggagtgtaggtctgccttagtggttacacctctggatatggacttaatctcgtcgcggtggtagtagtcacaaactgcacttgtgtcgtagccgttagcgtactgccatagatatagtcctcttatgccaagctttcttcttaaaaagctcacatctgcctttgcaagctcgcctagggtgtttatgtccatatacataagcttcttcttagtcttagagcctatgccaatgattttatctgtagctagcggccaaactatgctcttaaagtcatctttagctatgagtgttacggcatctggcttcttaaggtcgcttccaagctttgcgaatatcttgttaaagctcactccaatgcttacggtgatgccgagctcctttttgatgcgctctttgattttgtaagcaatctcttcgccgcttccaaatagtgtcttggagcctgttacgtcgagccagcactcatcaaggccgaagggttcgacttgattagtgtagctgtagtaaatttggtgtgcgcgcctcgagaattttaggtactcatcgtagtgtggccttactgcaactagattagggcacttcatcttcgcctcatataagctatctcccgtcttcacaccaaaggcctttgcttcgtagctctttgcgagaaccacggagtgtctatcttctaccgagccacaaactacgagcctctttccaatgagtgaggggtcgagccttctctctatggatgcgtagcagttgttcatgtcggagtgtagtatcgttcttgtcatcatctcacctgtctttcatctacttaaatcaatacttattattacttgaatgactaagacaattatagaccattatttctggaatgtcaatactacttttgacttatattgtataccattagacatataaactgaaattacaagccaaataaagaaactaagtgtgctaacgacatatatagtagaaggagtatgaccatatacctcatcatgtatatagtcatacacagaggattatataagaggcgaggtatatagttggaagcttactactatatgagaggcgtggtatatagtgggaggcttactactatatgagaggcgaggtacataaagggcaattcttagcttaaacatcttgtaaaatcgtgtggaatatggtattattaaatttaggtgatagcatgattaaatttgataatgtaagctttgcttacgatcgcaatgaaaaagataataaggctttggactctgtcagctttgagataaagaagggcgagttcgtatccatacttggtatgaacggcagcggcaagtcaaccatagcgaagattatggacggcatcttgcttccaactgaaggcgacgcaactgtcatgggtatgaatacgaaaagcgaagcgaaccttcttgagataagacagaacttaggtcttgtttttcaaaaccctgacaatcaaatcatagcgactatagtcgaagaggatgttgcctttggtcctgagaacttaggactaccgactcctgagattagaaagagggtcgacgatgctttagagatagtttcgatgacggagtataagaagcacgcaccgaacttattaagtggtggacaaaaacaaagacttgccatcgcaggtatacttgctatcaacccaaacatcattgtctttgatgaaccgactgccatgctagatccagttggcagaaaggaagtcatggacactatcattaaattaaacagagaatatgaaaagactatcatactaatcacgcactttatgagtgaggctgtcttgtctgataggcttatggttatgcatgagggaaggcttgtgtgggacgacactcctagaaggatattctccgacgtcaagagagtgcactcgcttggcctggatgtgcctcaagtaacggagctaagtaatctactcaaggaagacggctttaatgtgagtggtgacgagcttagcatagatgaattggtggcaaaactatgattgaaatacaaaatttatcatttatatacaataagaacacaccattcgaggtgaaggcgcttgacgatatctcacttactatcaaggaccacagctttataggtatcattggtcacacaggctctggtaagtcaacatttatgcagcagctcaatggcctacttagacctacatctggaactatcatcatagacggtgttgatataactcaaaaggaaatcaagttaaacaaactacgcgagagcgtgggcatggtctttcaatatccagagtaccaactctttgaagagactgttgcaaaggatgttgccttcggacctaagaaccttggactaagtgatgaagaagtggcgatacgtgtcaaggatgcgattgaggatgttaagcttgattacgaatggatcaaggacaggtcgccatttgagctatcgggtggacaaaaaaggcgtgttgctatagcgggcatacttgctatgaggcctaaggtgcttatacttgacgagccaacagcaggtcttgatccgcgtgctagagaagaaatacttaatgaaatctacgatatatacaagaagtctaagattacagtagttttagtttcgcactccatggaggatgtctttacttatgcaaacgagatagttgtcttaagcaaaggaaggcttatcatgcacaagactactgacgaagcagttaaagagagggaactactgaagaagtacgacgttggtgtacctgagataacagaatttatgtttactttgcaggagaagtatccaggacttaatccatatgtcaagactgtcgaagaagctagaaagcacatagaagagtattttgaggtgaagaaaaatgtttaataacatatcaatcggacaatactttcctacagacagctttgttcacagactagatccaagagtcaagctgatcttcgtcttcgcttttatgatagcgatattcttcgttgattcatacagcatactagctcttgttggcttatcgataatcatgcttatagtcttgagcaaggtgccactaaagattatatttaaaggactaaagcctatgcgcgtaatcgtcatcatgacacttgtttttaacttattctttacgccaggcagacaaatatttccaaatattaagtggccatcaatgtcttacgaaggacttaacacaggacttttcatgtcgtttagacttttattgctactacttggctcatcgctactaacacttacgacatcgcctatcagattaactgatggattagagtcacttatgagtccacttaaggttttcaaagtgcctacacatgaacttgctatgatgatgactatagcactaaggttcataccgacacttgctgaggaggcaagcaagatcaagatggcgcaagagtcgagaggtgcaagctttgatggcaagaacctaatcgagacagcaaagaagatgctgccgcttatgataccacttttcctaaacgcgcttaagagagcggacgagctagcagttgcgatggatgcaagatgttacagcggaggagagcacagaggcaagctaaacccacttatctatactaatgtagatagattagctatactagtaatacttgtttactttgcgtttataatatcgacaaagtatctatttaatttcatatgaagaacataaaattacttatagatttcgacggaacaaattactcaggctttcaagcacaagagaatgcacacacagttgaggacgaactcaactcatccataagcaaggctttgggtgaagagataaaagttattggctgctcaagaaccgacaagggagtcagtgctagaggcttcgtcttgaattttaaaactgagtcagtctgtccggtcgataagatgatatatccaataaacgacaaactccctgaggacataagagtacttagttcagaagaggtagctgatgattttcacgcgcgcttctcatcgaagggcaagtactatagatacaccttggagcatagaaagtttgcaagagctacggataggcactttgcatacaactttccttataagcttgatacgtctttgatgcgcaaggcagctatgtatatggtaggcgagaaggactacagagccttcatggcaataggcagcccagtcgatactacagtcagaaccatacactctgtagacatcattgaagacggtgacttcgtctacatagacgtaaagggcaagagctttctttacaatatggtaaggatcatggcaggcacgctagtctttgtaggcacaggcatcttggatatagatgagatggctagagccatagatgagggtgacaggagaggacttgcaccaaccttgccagcgaagggactagtcttagaagaagtttattattaatatatatctcttggcttgagctgagagatatttttatgcctaaagccccgcgaatcgtctaaaatatggatggaattaggggtatcttacgcaaaaaaacccagttcatatgaactgggttttattatatataagctttcttattaaaaattgtctgcgcctttaaagcctctacctcttacttcgtttgtgtcttgtatagtgatgaaggcgtttctatcgatggagtttgttatcttcttaacatcaactatctccctaggacttactagcataaatataatcttgaggtccttctttgaccatgcgccatatgagtcaatgatggtagcgccgcgctcaagtctgttcataagttcaaaggaaagcttctcgtattccttagagatgatgagcacactctttgttgcgtcgaagcctgtttgcactttgtcaagcacttggtaggcaacgaacatcgataagactgtgtatagtcccttcaagacgccgaacttaatgctggctaagcttatgatgataccgttcatcgccataagcgcgctgcctatgttaatgttgtagcgcttcttgcacactgcggcaactatgtcaaggccgccttggcaagcgccgtgtctaaatagtacgcccatgcctataccattaagcacgccaccaaagatggcactgattagtatgtcatcaaaggtattaagcttttgcattggtctaaacagtaccatagtagcggataagacgaaggtagttatgaaagcgtaaactaggaacttcttgtcaagctctttgagtccgaacaaaaatatcggtaggtttattaagaagagcatgatacctgctggtagtccagtaagtagttctatgatgattgagataccaccaacgccgcctgcaagtagtttgtttggtatgaagaaaaagtttattgcaaaactagatagcaagcagcctatgacgatggctgttagtgtagtaacgatttctgcgttgtcaccaaagtattcatatctgtcaaatttctttttcattgtaattttataaactccttaaatatatttattgcttctcctatgttattcacagccatagcctctggatgaaactgcactagatatatatttctactagcatcctccatcgcttcaactataccgtcggaagactttgcagttaccttgaaaccttccgctatatccttaacggcttgatgatgctctgtattaacaagcatcttcttaaggcctgttgccttgtgtaaaaagctatgctctttgattgtgatgtagtgtgcaccactgccaatagtatcgaagtttacgtgttcaagcttagctacatttgctttgtatatgtcttggtatagcgttccccctaagtatgcgtttataagctgcatacctctgcatataccaagtattggcttcttcgccttgattgcttcatctacaagctttatgtcgaaggcatccctctcattcgatataccaagtatacctttttgcaattcttcgccatagacaagtgggttcacgtcgtgtccgccagttagtatgacagcatcagcaatatctacgagctccgttacaccaataaggccagtgtatggagcaatgaaaggtattgcacccgccatgcgcacagcttcagcgtagtttctattgatttgtacataatgcctctcaccatctgagtatggctgagagcttatcaaaattttcttcattgtattctccaatctatctctttaatattgtgtgcttttaagtaggcattcgtctttgagaatggtcttgatccgaagaagcctctatatgccgacagtggcgacggatgagcagatgtgattacaaggttcttctttgtgtcaatgtacttcatcttgctccttgcataagcgccccacagtatatagacaacgttttctttcttcttgcttaaggtctctatgatcttgtcggtaaatatttgccagcctatgtccttatgtgagtttgcatagcctttgcgcacagttagtgttgagttaagtagcaatactccttgcttagcccaagcgtctagcctgcctgtcctattaacaatgccgaggtcgtcgtagagctccttgtatatatttcttaaagatggtggcaagagaacgccatcattaacagagaaggcaagaccattggcctgatttacttcatggtaggggtcttgacctaagataaagaccttagtatccttcaaaggtgatagctcaagcgccttaaatatctcgtagtacttagggtatatagtgtgctctttgtactctatgcgcagtgcgtcacgcatcttgatgaagtagtccttagtgtattcactttgtaaaaattcttcccaatcgctattaatgatcatgtcttttcatttccttatatcttgcaagctcaatctcatcttctacttcaaggtctctaaagtttgcgaggccttccatatgatgagtgaactcatgttttaaaacgtggtatatcatgtccctaattatctcttcggaacaatctccatacatcttcataaatgatccgtagtggatgtatatagccttgcccatggcagatttttcatactgacctaagatgaagaggtcatcatcgattgcctcgggcgatatttttaaatcctctgagacaacaacacctaagtttagatctctaaagaagacctcaggtagtctttcgcaagcctgatcaacccactcagtgaaggtatcaatgtccggcatcataggaacttcgctccatcattaaagtctagaccagctttgaatatttcaagaacaagattagctgccttaagagcaataccctcttgttcattagtgatttcaacgtgcttatcagtaacgcctgtgccgtagttaccaacaacgtttagtgaagcatacttaatgcctagctcgttcattagtataacttcaggtgagccagtcatgccaacgacgtcaccacctatggacttgtaaaatttattttcaatcttagtctcaaattttggcccttcagtagtaacaaggacaccactagtaagtttgctatcgtatttttcttcaaataatctattcatctcaagtgagtatggctcgtccatcgatataaacttcacgcccttatcaagtccagtgaagaaagtgtagtctctcttcttagtaaagtctaagaagtcaatcgccatgactatactaaggggttctatgtcctctctaagtgagccaactgagttgatggcgtaggcatactccacacctaagtccttcatcgccttgacattgcatctgtagtttataaaggtaggtggtacagagtagtttagtccatgtcttggcacgaagatggtatcttcattaagaacattgtactcgcaaatgccatattcattttctatcctttttgtttcgatgctcttcatagtcttaagagccgttccaccaattattgcgtatttaaacatatttacctccttgagcacagtatgagaccgaagaccttggcgaagcctgcgtccttcataacgcgtgccgagtccttcatagtcgttcctgtagttattatatcatcgattataagcacattgccatgcgcatctgtgcctttcttaaatattccttgcatgtgagacctttcagcgtagctaagcttatgcatatcatgtacttgcagcttctcataagtgtatagtttaagacccatatccttagcaatgacttttacaacctcacccatgtggtcaaagcctttctttctaagcttttctttgttcataggcacgcttgcaatgtagtcaatagtgttgtcttttaaaatatttttgatctcttcttcgtaaaggtaggcgaaagcagagatgtattttttttgtattccaaacttatagttgaagaggtgctctctaaaaaagtcgttgtagtagactatggagtagagctcatcaaagccatcaataaagaatgccttgcgtattatatcaatgttagagccgcagctagagcagtaagctagctttgcatcgagctcttcattacaaaatggacagcttttcatttgaagaccctctttagatcacgaattcttttctctaagcttgtgtacctctgcatgatgaagttgttatcaatcataagctttaagtacttttctcttccaactaagatgagaagctttttcgccctcgttatggctgtgtagagaaggtttcttgttaagagtttttcatttgcgtaggtgataggcatgatgacgcagtcgaactcactaccttgcgacttatgaactgtaagcgcgtagctaagcgatagctcgccaagtagtgaaaagtcataagtagcactcttgccatcatcaaagtctatgtcaatggtctcgctatctttgtcaaggctagtaatgatacctgtgtcaccgttgaagacaccctttacttcttcatacttgccacttttatactcatgcgaaattatatcgtagttgtttttcatctgtatgaccttgtcaccaacacgaaactccttacccatagctctgacagtttcagtatcggctcgagagttaagtaggttttgcagcatgtagttaaggttaactgtaccgagcttgccttttttagttggagtaagtatctgcacatctttgaatggatcgaggccaaagtagtttataagcctttcatttaaaaggtcaagtatctcatcaagtatgtcatcatccgagtccttgcttatgaagaagaagtcgctgttcttcttattcacttcaggcatcctgcccatgcgtatctcttgcgagttgatagctatcatactgttttcgctttgcctatatatatggtctagctcagttgtttcaacctgcttagacttgattaagtcctctaagacattgccagcgccaacactaggcagctgatccttgtcgcctaagagtaggagagtcttacccggctctatagctgctaagagctcgctaaagagcagggtgtccatcatagatacctcatccacgatgatgaagtccgcttcgatttcctcagagctttcgaagaagtccgctccatcgataggggcgatgttaagtagtctatgtagagtcatagctgcctcgccagttttttcttccatgcgcttagctgccttgccagtcggtgcagcaagtgcgaaggatacatcaaagttcttaagtatagttatgattgcttcaatgatggacgtcttgccagtaccagggccacctgtgatgatagatatattattgacaaaggctttcttgatagcaagcttttgctttgcatcgaatactatatcgttgtcatcctcatatttattaattaggtcttcacagtcaaagatagtaataccttgtgatgcgttcttgatgtcgtagagcctctttgcacactcaatctctttctcgtagtatatgctaaggtagacattgtatatggagccgcgctctttcttaacagcaatgacgccccctgttgcaagctccttgatggcgagattgaacttatcttcatccatcgtcataagaaactttagctcctcatacagtctgtccttcggtatgtaggttgagccttgtgcaaggtagatgttaagtaagtagatgatggcggcctttagtctctcaagaccattggcatcgactccttcttcaagagcaatcttatcagcagtcttaaagcctatgcctatcttgtcatagataagtctgtatggatttgtcttcaatatgtttatggcctcgtcattataaatattgtagatttttaacaaagtagcagtaggtaagttatacttcgcaagcttttgcaagatctcctcacgctctttgtttgactttatgtactcttttatatcttcaagcgccttcttacctatgcctcttacttgaagtagtttatctgtttcgttgaaaattactttaatagaatcaaggccgaagaggtctataatctcttcggctcttttttcaccaattttaggaatgccacttttaatcaagtagctcctaatagattcaattgtatctctttctttaaaattaagcttagtaaagcttaattgctcgccatacttgtcgtggaagacaagttcgccctcaagctcaacatagtcgtgctccttaacagtcagagcagtacccacacaagtaataagctcaccatcagagttaacttgcataacagtgtaagcattcaaatcatttctatatacaattttaattacttcaccgtctataatcatattaactcctttaataaattaattattcttcttcagtattttcttcgtttgaattgttatcttcttttaatgaattctcgataagttctttttcttctttgcttataagtcttgttcctgtgcttgacatcttaggtatattgttgattttgtctctaagtgcattaaacttctcgtttgtctccttaagtatgtccgtaaatttatcgtcgatagtctttgccatattatcacttccttaatctgtatttgccctttacacctagtgagtaaagaagctttgtcagtagaaacacaatgaatgctgtaatcgcgtttaccggtatgaaaaagctccttagaaccaggtacatggcttgatttatcatattaaatataaaatatttctctgtgaatagttctgcctttatgtagaacttagctagtattagcgatattaaaaatattatcgtgcctataaaaatgattaagttgtacgactttaaagtctttctcatcctatacctcgtatttaccaagtagcctgataagtagaagaggatcagtattatcagtgagtagataatcatcacgcctctttgtatgatggggctagtgagtttcttcagtgagagcatcataaaaacagataaaactgtgattaggatgtatgaaagcaccgcttttatagtgttcttaagcattttacttcgttgctcctaaagactttgagtagtgcttaaggccatctgtgtagaactcagtgttgtcgaagtttatccataaagcttctgtatcagggaagtccttcaaagcctctacaccttcttcgtatgtcatagtgaacagtagagtagataggaagtcagctatgcctgagtccttggtaataacagttaccgctctaaagtttcttgcactcgatagagttcttgtatctatgatgtgattgtacttaacattgtcaagaccgtagaaatatctttggtagtcgccagaagtaactatagacttgtccatggtgtagagtatgtcatagatacctgagtcgccatctttcatctctgaagcagagtaggggttctcaacacctatggtccactttttattagtctcgccgttaggatgacctatggtcttaacattgccaccggcacttataacaactgagtcaaagccttcactctttagctcgttacatataagctcaacagcataacccttagcaacagaacctaagtttagcttagtgcgttcatctgttatataaactgtgttttcttctttatctatgatgatattgtttaaagacgcatacttagctctctctttaagttcatcgatattaggagtagcagccttaaactcttcattattgaaggcttcattcatactcttctcccaaagttcgattatagcaccaaaagcaatattgacacgcgagtcatacttaagaccaagagtctttgattgcgatataagatctataagcgccttatcaactttaaccttttccttgccagccatcttgttgatggtgtagacattgttcacgccctcatgctctttgtgacaatcgaataagttgtcgtagtgttttaatttttcagaaagcattttatcaaatttatcagcttcgtccttagtatagaagtagccagttgccttaaccaaagtatcgaagctgtcgaagtagtcgaaagtaaacttcattcttaactttggcttgcaagatgctagcacagaaactaataaaactagcgttaggaataatgatatttttctcttattcatcgtttcacctctaagtatataatacaacataaagtgcgatttttcaagctttaattaagtccgttcacgctgccaagcactagagccgtatcaatcttcttctcatgaacaaagtcattaatcttttgattgaagaagcgcttgtcaatcatgtatatagttttgtactcgtttgtaaagagacttgctacggcattagcaaaagagtcttttataataagaaggctcttagtagatgaaggatttccttctatctcaacaagaccatagttaccactaaagagtgccttgtacttatccttgttcttgaactcgtctctatcaagaacctttatgtccttgccgtcgcccttgaccttgataccctcatagttctttggaaggtagaatagtatctcatccacggcgctattgtagtacgaagacttcgaatcaagcgagcctctaaagttttcacaagtaaccttgtgggtatctttcatctcttcaaggcccatcgcgctagctatctcttggtaggcaaggtaggcaccttcacgccaatggtgatccgatttgtagaagatgtactcgtccttgtgagccataagtgggctatataagtcaatgtaagtagcgttaatttcatttttgtatctatcaagaacaattctttcgtcactaaagagagcacccttaggaagcttatctctatatatctcgcctttgtcaggactgattgcaatgtatttatccttaacatcgacttcgtttagatactttataaacttttcgacttttttctcgtcgtagatatatttttcgtaatagtttttatccgtacctatatagacaccgttgaactctcttttgccaagagcgtagtcaagccttgaccttgcgccaacaagttcgtccttgaagatgaattgatcctttaagtagctttcaaacttcttagtgaagtcaccactttttagcgagaagaaggagaacttcggaagctcttctaaaactctattttcattttgactaaaacttctgtctttactaatcacgtttgcgattaagaccgcagatataaagacgaagaataaaattttaagtagtttatctttcatactcatcacctaaaatctaaagtataagaatgggttgtaggactcgctaattagcgacatagttacaatgattagcaaggcgaataaaaatgcgatttctaagtaagtagtctttctctctttgtctataagcttcttacaagcgccgaaagatagagcggtacctactattatatagaagccatactcttttaagtagaaaagagtctcagatgaagcaaagtttttgaagttaatcatcgcttttaagaatggtcctatatcagatactttaaattcgaatataacccagcctataattatgaatattagagcatatatatgccttatgaagcctggagccttatcaagagccttagcaataagaaatttttctattacaaggagagtgaagtagtatagtccccatagtatgaagttaaagtccgctccatgccaaaaacctgttaagaaccaagtgatgaagaggttaaaaatttgtctagcaagcttcactctattgccaccaagaggtatatagacgtagtttctaaaccataaggacagactcatgtgccaacgtctccaaaactcagttatcgactttgagatgtaagggaagttaaagttttctaagaagtcaaagccaagcatgcgtcctaagcctatcgccatgtcggagtagccactgaagtcaaagtagatctgaagagtaaaagcgatgatgccaagccacgccattgatgcaggcagtgttattatttctttcgcaagtattaatttatatagctcgccaagcttgtttgcaatcaagaccttcttcgcaaggccataaacaaatcttttgataccataggcgacggacttgtcagagaagtctctcttcttcaattgattaaagatatcgatgtacctaactataggtccagcaactagctgagggaacatcgcaacatatgcactgtagtcgaagaagctcttcgatgcttcaacctcgcctctatatacatctatggtatagcttaatgtttggaaagtgtagaaggatataccaagaggaagactcaatgtgcttgcgctgatgtttagattaaatagatagtttaagttatcaatcacaaagttgtagtacttaaagaaaaaaagcagaccaatattgacgataacactcaatataaggactgctttacgtttccattcaactttaaatttatctaatagtcttccgttgcaataatcaaatacactggaaaaaagcattatccctacatatatcggctcgccccacgcataaaatatgagcgagagtataaagagcgtgaagttctttatcttgtctggcgatatatagtatagaaataatgcaattggtaagaatacgtataagaataaaagtgatgagaataccattatttaaaaagcgaagctaaagcctttttaacttcgtccgacttatcagaaattacgagtacgatagtcttgccatgttcttcatatacactgtcttcaacaagctttgcttgatcaggagcgtagtctttgtatatttttataagattttctttgtatgcgtcgattttatctttaaattcacttgcatcctttgcatctttaagtcttagtagcaaaacggcattagtattaaggttagtttgaggaccatacatctcataagcttcaaccttatcagtatcaaagtcaaaagtatcctttaaataagaaccttcttcttcctttgaaaagtttgagaagtcaatagtctccttaagcttgtccttaatgctgtcaaggcttacatctttacttgagcatcccaccataaaaactaaaattgcaacacttacaaatagcaataactttttcataatcaacctacctttaattgtgtatatttttaacttcatttaaccataccttgtggaagctgctctttagatgcatgccgtctggttcaaagtagtcttggttctcatccaataggtaagagaagtccaagtaagtcagacctcgctcactagcgatagacttaacaaccttgttaaatgagtttatcttcatattattaacccttgcgtcttccttggtatccaaagccttgcttacagggaatataccttgtaagtatatattagagtttggaaatttttcttgtagagcactaagcatagcctcatacctttgtttaaacttttcttcactcttaacaaagacagagtcatttaatcccatcatcaagtaaatgttcttaggaactatattgaagttttcattgggaagaagctttctaagagtatccgtatttagaccaatcttagaaaaaacattgtcatcaaacaagaacttgtagtacttaagctcctcagtgattgagtcaccaatgaagaggtcgtccttaaagtaatccttgtaaacggatataggaacagtgtttacagatgacttagataccttaatctttttaaagtcatcagctttaatttctccaccttccttaggaagttttgcgagctcttcctcttgaatcttctttctgtatgcaagaagctccttttctcttatatcaaaattatagttatagatctctttgtcaatcaaatcattaacaatgttcgtttgcttaattccatcaaaaatttcatctacattaatattttctttgtctttatttaaattatatctattatgtaaaaaataaattatgcctattaagataagaataaaaattgctcctgagataaattttcttctctttctagttttttttctatatacaaaattgtctttcatattacactcccatttatttcgaaatcatttttatgaaacaaaattatataatttcatttttttgaaacaattttaatcataaaaaaatgatattagtgcgaaatatctcttttcatattatataatgtaaatgtagaaaattcaatactctttgcctaaattgtcagaaaataatatgaaaagttcgtaacaaattgtaacatttgcgtcataatttaattaaaaaactttaactagacattcataataaattttgttacaataggacttgttaattaggagggacaaaatgaataggaaaaaaattataattacatttttactattgtttgtttttctttgtggatattttttaaatagtactggcactatggcgcaaagggaagatgacaaaaaccaagacaataatcaagaagatatagatattgttgttaactacagtgaagatgacatgatcaacagaaatgatgacgtaatcgatgacttaaacgagctagttttagttatggaagaagagaagaatcttacatataatgtatatgaaaaaacaaacttaagtgtagaagagtttaataaagttctagaaaagacaggcttagctggtcaaggcgaaagcttcaaagcactagaagacacatatggagtcaacggcatatttgccatcgctgtttcaatcgcagaggcaggttgggacggtagacaagcaaacacaaacaacttctacggtatgaaaggttcaaacggctacttaaaattctcctcagcaaaagaaaacatactttactttggagagatgatcacaaagagcacatacaaaggaaaaacattacaaacaatagcaaaaatatattgcccaccacgtcataagaagtggcactcagatgtactttggttgatgggtaagttaatcgaaaaacttaattaatagtaaaatgtaattgataagcttgcagatatgcaagcttattttttatgttcacagtaaaaacatatcatgtatgataaaaaatatatagaaagatcaaattcatagtaaaaacaaaaatttaaacaaaaaacaatgctttttcttgcattttaaaaaattcttcaattacaccccaaaaacattagacaaaatatagcacttcataaaactatacacaaaaacaaaataaactatgttcatatttaaaaatatgaacatgtttggaaatgatagaacaaaatataattttaaataaaactagaaatatttataagcatattgtataattaagataaagtaaaacaaaaattatctaaataaaggagagtttataatgaaagtcaaaaaagcaatattaagtacaattatcgcaacacaaattttaagcacagcagcacttgcagcaccagatgaagcaatcaaagaatttaacaaggtagcaccaattaagcaagaagtaaaacacttccaaggcgaagtaaaactattcatcattaaagacggagaaaaagtcagagtcgatcaaaagatgacagatggtttaagagtagttaatggaagaacatgcgtaggagtaagagaccttgtaaacgcaatcgaaggagcaaaagttgagtgggacggcactaaccacatagtcgacataacatatgctggcaagacaatatcatacccagtaggcaagccgcttatgtgggcagatggcaaagcagtaaccatagacgtgccagcacaaatagacccagcaatatcaaaaacattcttacctataagaaacatagcagagacattaggcttcaaagttgattgggacaataaagcaaaggaagtagtcctaacaccaggcgcaggcaaaggggtaacaacagcaacagctcaaccaacaagaccaacaacacaaacacctacacaaaacaaaaacctagcatgggtaacagcaagtggacaaagaataccaaaaccagaggagctacctatgcacactataggtcaagatggtgtaacagtagattttaatagtggatacacagttaatttaaaaccagaagatttaactcaaaatccaaatggttctactactttctttaaaggcactgtgcttgaatatactacaggcattccatttaaaaaggtagatactatcgctaaaagaccatccacatttaatatatttaaaccaaacaaaaatgatccaagagtaggtactgcaataataacaaaaggacattctttctacgattcatcatacagcgaagttgttaatgatataaagagtggaaatccagaatctagtcttcttttaaacataactaagtttataaaatattttactggtgataatgtaagagaaatacctaaggaagaatttaaaagacaatgtaaagattttaacagagaaaaatctggttattggggaactgatttaattgattttgcttttaataataagccaaaagtatatgatgcaactggacttatagatgtaacaccgatagggttaataaagcatcctggagaaactccttttatagtatggtctagttttccaagtttttatataacaacggaaggtgcagttttaaatacttcttcggatgtaaaagaatatataaaaaagaatggtaattttgtaatagataaagtaatatttaaatactactcatattatgtagcagatataccaaatttaaactttatggaatatataaataataacaagcattatgatgctaattgttttatattaggagattttagaaatacaaaactagcaaaataaaaaaggagtgaatttaatatgaagagatatataatggcattcgtggttttcacgatgctgttttttagtacaataagtatagtaaaagcagaagattgtattgaaattccaggagacgtagttgaatctcgtgttaactatcaatttcaacacgaacctccaaaattgcatgataaagcacctggaaagtcagaacttggaaaaggagtggctgaagttgttggatttgatgctaatggagaacctattgttgaaacaacttttgatgtaacagataaaaatcttgatatgagcacaacacaaacagacttagatgcagtatatgataaaagaaacagtaatactcatcatcatgatgtagagtatccaaatgttccaaaagagcaatatacacaagaatctaaagtagtgaacaacaaagtaatatcaagaggaatcgcaacaaagggtggagaaactgagaaatcacaaataaatgatagcgttgctgacgctaaagaatatgaaaatttgtccgcagaggaagctgcggctaaatgtacaacattaaaaccaggaacaaaagcatatgataattttataaaagaatacaatacaagaacacctgctcaacttagaaaagaaggacagaaccaaagaaacacaagacaaattactcaagttatgaaaatccaaagaccaccaacaaaggtatgtaaaggcgacccaggatgggacctatgtgaaagatttgcttcaatgccagacccatcaccaagaacttgtcacaatggtaccttcactccagcaaaaggagcatgtaaagcatacacaagagacgatccaatatcatcatatacaactagagaccctaaaccaacacagccaatgataaaagatgaggattggtgttctagtaaagacaagaaccaaattaattttgaaactgcagaaacgcttaaaaaatattcaggaacaataaaagcaaatcaaaataatatgcaagataaagtaccatcattggtaacacagttcaatgaagaattatggacaagtaaatatcaatcagaagatagattttggaatccattccaagagggtgtaatttcatcaggattaccaattaaaacaagagataataaatattatacagtagaattagactcatgggaggacagagaatatagaccaaacagctttttacctgattcaatagaatatgtaaggaagaaagaagcaataaatgatactgtagttaagaaatacaatggaagtaatatcaatatttataataatgctcctaaccctaaagtaacacatagatacttagatggaaaagtgtggaaagatttatactcaactaatattgaatgtggaatgagatataaattactagtagaccctaagtatgatataactgaacatattagatatcaacacaaacaggtaagagaaatatatggtagagaaaaggtaagtacttacgattgtgaaccatatagatgtaccaagaggagaaaaactggaactcaacattggagtgagtggagacaagaatacgttgatgattatgaaacatatgaaacaacttgttattatacttgttgctacttagaagatgataatcaaaagcaagaatggaatgatggcgaaactcaatcatcacataaagcaggtgaaataccaccagtatacgcacctcgtgtaaaatggagatacagaataggcgtaggtaatgagtatcacgcatctgctaagagattaacagacaaggcaaaattaacaccagtaccaaacagcaaagacactcaaaaaatgaaatctggttatggtttcaaatacagcggagacaagtggaagatagttactgactatgatgaaccacaattcaaaaatgagtctgacgtaataagaccaaataaaaacgtagcacttaaattaactggaaacattaaatcacaaacagaatattttgatccaaatgttaaatataatagtgcaaagaacgcaccagagagatcatcttcaaaggattcaagatacattgaagaaagaataaaagcaaataaaattaagagtgattttaataaaaatgctatatctaaatttgtatcaaagactaaagatgattcaagcctattgagaataagaccatatacaaaggattcaagtgtaagtggagaaaaaatcatttatagaggcaaggctataaacatggagactcaattcgaatcgcaaagtgatccaaataaatattaccatgcttattgggtaactaaaggggaacctaatttgataccagcatacaagcaagcacctctacactatgttcacttggactatccatctggaactatgtatgacatatactcaattaacagaacatatataagaaacggttttacgattgatgcatataacaccggctcaatcaagatagtcggcaacatgtgggaggacagcttctcaagaccaaattttaagaagtaaaacacaaatattagagaggataagtaaataagaattttcatttagaacactttaggatgttctttttttatgctcacagtaaaagtattattagcgaggcatgtacttaggagcttgctatgtataagtaagtcaactatatataagcaagcgtactatacatatgtgagtctactttatagtatggagcctctcatatataagtagctttcatatatattagcaagcttctctctatatacaaagcgttatatctattcaccaaaatgctctagaaattatacttaaactcgcttactttttatgaatatttcttattgataattaagtttcatatgtgatataatgtttaagaggtgtaagtatgaacggaaaatatttaattaaagcagcttttattattttgatagcatttactgttgctaatttattttacaagcctatacaagagtacactgtatatgctttgttacttgtcgacttacttttaattgtgggcttatctacaagtaagcctgaaagaaaggaaaagaagactgatgaaaaataaattatcacaattcttaatagatgcaaaggaatgccttgcaaagacggttgacctgcttagcgaggactttgcttatgtatcgatacttgctactgatactgactctactaattatatggtatcaaaaagtataacacgtgtaggcgaaggcatggacagcgagagaggctttgttgcgcgtgtatttaataatgattattatggtgaagtatcttttgataagcttcaaagcccagaagaactttacgagatgataaaaaaagaaattactgaaaattacagattttataagaagaataatttctctatgagaaaatattctttaattgatgaggaagaatttgtaaaggatttttcatctgatttagagatttctcttgatgagatgagtgttcaagagaagataaattatttaacagacataaaggataagatgcttaaagagtctgatcttgttgtttctgcgagagccatgtacatagaaactgaagttagaaagctttttgtttctaaaaagatgtgtttaaatcaagcatatacctttactagcgtcatggctgaggctgacgttcaaaaggatgatgacttcagatatgattacaagggtgtaagtagactaggcggcttggaagtacttaaggagcttgataatatttataaagaagttgttcataatgcgatcgaacttcttggctcagaacttgttaaacctggttactatgatttgattagtgcgccagacattagcggcctacttgctcacgaagcttttggtcacggagtagagatggatatgtttgttaaagacagagcattggcaaaggattatgtcaataaaagagtggcaagcgacataactacaatgcatgacggcggcacagctattgacgaatgctcaagctacagctttgacgacgaaggcactttagcgtctgacactgtaattattgaaaatggtatacttagaagaggtatggctgataaactatctgcaatgtctttaggcgttaagccaactggcaatggtaagagagaatcttttagaagaaaggcttatacaagaatgacaaatactttctttgaaggtggcaatgacagcgttgatgacatgattaagtcgattgactacggatttttacttgacggcatgaacaatggcatggaagaccctaagaactggggtattcaatgcactgcaatgaaggcgagagagataaaggacggtaaattaaccggaaaagtatttagcccagcaacactaacaggctatgtgcctgatgtgcttgagtctatatccatggtttctggcgaaatcgaaatgaatggcgctggttactgcggcaaaggttataaggaatgggtcaagacttctactggtggcagctacttaaaatttaaggggagattaagctaatggatagaattaaacatattattgatataataaaagaaaataaagaaatctctgattttaagttaattagaaagaaaacatccagcaaggagcttttcttaataagagatcaggtagatatggacagaagcgttgagactgatgacgtgaacgtgactatatatgctgacactgaggagggtgacaaaaaatttagaggcgactctttatttaacacagctccattggatagtgaagaagaaatttcaagaaaagtgtctcttgcgtatgaaagagcaaagtttattaagaacaagtactttcctttagctgaaggaactgaattagtagatgaaaaagcatatatagatgagcttgagactataaaaaaggtaaaggacatagtttacaaggactatggaacaaaatctaagattaactcatgcgaaatctttgttaataatattgaggaaaatctcgtaaactcaaagggctgcgactgcaagtctaaaaagagcgagataatcgttgaatcaattgctgatgctgttggtgaagcaggctcaatcgaagtttatagaatgtttacgttttcaaagctaaatgaaaaagaatttgaagagaatatatatgaagagcttaaagaggcagaggacagagctatgtcaaagccagctgaacctatagaagcggttgatgttatcatcaccggtctagatgttccagccttctttaacttttatgattatcaagcaagtggctctactcattatatgaagctaaataaattaaaattaaatgaagaggctcataaaggtgctaagggtgatcttgtaaatataactttaaagcctgagattgaaggctctgtgcacaatagcaagtatgatagcgacggtgttaagctaaaagaaacacaaatatttaaggacggcaagatgataaatttatcagctggtcaaagatttgcgtcatacatgggcattgaggctacaggtaatttagtaaatatcgaagtagctcctggatctatctcaattgatgagatgagaaagactagacaccttgagataaagagtttctcaagcttccaagcagatgcatccatcggtatatttggcggcgagtttaggcttgctaagtactttgacggtaaagaaacaaagattattaacaacggtgctttttctgctaatatcatggaaaaaggattagatatgtatttttctaaagagatgattcatatagataattactatggaccaaaatatattttaattaaggatgtgaacataggataatgtcatacaaagaagattttatacatttaatgcttaaatcggatgttttaaagtttggcgagttcaagactaagtctggaaggatgagtccatactttattaacactggatttttcaataactctgaggagatagccaagcttggcgacttttatgccaaggcttacatggacaatattaaactagataagcctttactatttggacctgcatacaagggtatacctcttgttgtttcttgcgctgtaagtctttacaagaactatggcatagagatcggctactcatttaacagaaaagaggccaaggaccacggtgaaaaaggtattttcgttggagagactccaaatgctgactcggatgtagtcatcattgaggacgtaatcactgcaggaactgctgttagggagtccatcgacatacttaagcactatgacgcaaaagttaaggctctaatcatctctgttaataggatggagagaggtactggcgataagtctgctatacatgagcttgaagatgattatggtgttaaggtttattcgatacttgatataaaatttattgctgactacttaagaaataaagaagtagatggcaaggtatatatagatgaagagatgtatgcaaagataatgaagcatctcgatacttataaggaaagataatgcaaatagaaaataaaaatcttgagatagctataacgtttgtggcattgacactaactatgcttgtaactaggtacttgggcattttcgcaatgccgttcgtgcttggtgcttacttaattaactcaattgcaaacaaagattacagctcgctttacttatatgtagcgtctcttggtatattggcaatatttctagagcctacgtttataattgagaaggccatgcttggcatacctttcttgcttgtggctgtgactttaataaaaagaaaacttagaggggacaagctagtcatcgttatgacttttacttttgtcgtttctatcatagcttatcttgcgctgctaagggagttttttgatataaactttgtggaaatctttaacgcgagcattgacaggcaggtagagatgatcaagtctttagaaggcgagtttgttttcgataaagatatggtaacactagcttaccaagagtttaaacgctacctagcgagtatggtgttcttcctttcttttgtagtatctttcatagcactaaagctaccgcattatatagttagaaaaaggggcgacatcaacttgagcgaaccattcatagaggctctaaagctaaataagtcggcattttattctatgcttgctatattattagtttttatgatgacggacttaggacttaatcagcttattgtagacaatatatcctttatgatatttatcactcttgcaattcaaggtttgtcatttacaatgttcgtcttaaagatacgctataaaaagaagatggtggcaaatttttactttgcattttcaataatctttttaggatttatgttttttgtaaatattatatttggctttatagacggagctacaaagataaggggtgcataaaatgcttaaaaaaattgaagcatatataaaagaaaacttaatagaagtaatttttgagcttgtcttagtcatgttactaatgatactaaatatcatcattggctttatagcgcttgttgtctttgtatcaatgcatcttagcttcttacaaaactttgaagatcaaacaacgcttagacaaagaaattatgagaacatcgaagagaccatcgactcattgacaaagcaagctgtatttaagatgccatttcctatggttataattaatcaagatggggagattaactggtataacagcaagtttataaagatgcttgagattgaagatgagcctgaaaacaatatacttgatgcgatatcatctcttaatcttaacgagataataagtgcaggagatgatccactaaagatattatacagggataagtactatcaagtctatgtaaacaaggttaaggcgaaagacagcaaggaaagagaaatgcttcttctttactggatagacagaactgaccttaaagaagcaaaggatagcatagagaaggaaaagatggctaccatacttgtatatatagacaaccttgacgaggttaaaagcagtgttgaagatggtgttaaagcgactatagcaggtaatgttgaaacagaaattattaactacttcaacgcgttcgaagcaagtgtaagaaagtatgatgacgatagatttttaatcattgctaataacgaaaacttgcaaaagatgatacaaaagaagtttgatatactagatagagttcgtgatcttaaggtgcaaagcatcataccactaacactatccatcgctgcgactcttgatggcgagacaccacttaagcagtacgagattgcaaggagcactatggacatagccttaggtagaggcggtgaccaagctgttcttagaaagggccacaactacgagtactttggcggcaagtcaaaggctgttgagaagacaacaaaggttaaggcaagagtcgttgggggcgcactaaggtccttaattgacgatgcatctaacgttgttatcatgccacacaagaatgctgacatggacgctataggctcggctataggtgtagtgaagcttgttaggatgagaaaaaagactgcctacatcgcgcttaactctgttaatatgagtataagaaacatcatggcaagacttaaagaagaagagagtctaaagggtgtagtgaagagtgaggacgaacttaactctctaatcgatagcaagactttgcttatagttgtcgaccatcataagaagtccatctcagaggcaccggacttggttgataagatcaatgacagagttgtaattgaccaccacagaagaagtggggagtttatagagtcgactgagctagtcttcttagagccatatgcatcatcgactgcagagcttgtaacagaattgttcacatatatgaccgacaatgtagtgcttagcaagttcgaagcggaagcattgcttgccggtataactgttgacactaagaacttcactgtgcaaactggtgtaagaacattcgaagcggcatctatgcttagaagatttggtgctgaccctgaagttgttaagaagtacttcaaagaagattacgaagttattaaaaacagagcggacatagttagacactctgagatatatatgaacgacactgtcataggtatacttgaagacaaggtggataactccatacttattgcggcacaagctgctgatgagatgctaagcatcaacggaatgaaggcatccttcgttgctgtcaagatatctaacaacgaaacacacgtgtcagcaagatcacttggagagattagtgttcagctaattatggaaaagcttggcggtggaggtcacttgaaccaagcagcaactaggatagacttgtctgttgacttagctgttgaagagctaaagagaaagattaaagaatataaagatgaagaaaaagaatcaaagaaagaatcaaagaaagaatcaaagaaagaagaaggtgttaaataatgaaagttattcttatagaagatgttaaaggcctaggcaagaagggcgagatggttaatagcaaggacggttatgcaagaaatttcttgttcccaaaaaagcttgctttagaagcaacagaagagaacgtaaagaagtggaaggaagaacaagctgaacttaaagctaggatagaaaaagaaacaaaggaagcaaacattatcaaagctgacatagaaaagaaagttttaaagatgaaggctgaaggcggtgcaagtggcaagctattcggtgcaatcacatcgcaagacatacaaaaggctttgcttgatgacttcggtcttgaaatagacaaaagaaagatagagatgaaggaaaacattaaacaagcaggtgtatatactgttgttttaagattatatccacaaatcacagctaacttaagggttaatgtaagcatataacagaggagtactatggaagttttaagagaattacctaacaacttaatagttgagcaggaggttttagctaatgctatgcaaaacaaaactgctgctgtcaaagctattgaaggcttaaatgaagtcgacttttataacgaacttcacagaaagatcttcaattctattaggatgcttttctctttaaacaagcccatagacatattgacagtaacagagaaccttgaaacaaatgaaggtatagatgctgagacgataaagtatatagcaagcatatatgctaacaacgaaggacttagttcgaaccaagacgcatatatagacatacttaaagagaagtctatacttagaagtcttgcagagttctctgatgagattaaggccttgtcacttgaggataagtcgccagcaaagaacgtgcttgaaaaggcagagaaggaactttttgaaatttctcaaggtggacttagaaactctctaactgcacttgacgtcattatgagcgacactgttcaagctataattaagagagtgcaagagaagggcgagcttagtggtgttacaacaggctttacggatttaaactcactactaggtggcttccaaaagtcagacctagtactattagctgcgagaccttctatgggtaagacagcacttgctgttaaccttgcagtcaatgcagcaaagtctggcaagaaggttgcaatgttctcacttgaaatgagcaagcttcaaattggtcaaagaatacttgcctcctttgcgcaaatgaacttatcgaacttattcaagggtgagcttgaaggtcaagacatagcaaacctacttactgcttcaaacgaactagcaaaatacaacttgcatgttgatgacacggcagccatatcattaatagaattaaaagctaagttaagacgtcttaagatggaagagggacttgacttagtagttattgactacttacaacttatgacgactggacaaagaattgagaacagagtgcaagaaatttctcaaatatcaagaggccttaaggctatagctaaggaactagatgtaccagttcttgccttgtcacagctatcgagagctcttgagcaaagaccggacaagagaccaaagctttctgaccttagagagtcaggtgccatagagcaagacgcggacatagttatgttcctatacagagactacgtctacaacaaggaaactgaaaatccaaatctagcagaagtgatcgtttcgaaacacagaaacggtcctattggcgtggttaatttaatctggaaggacgagtatacaaggttcttcaacgtatcaagcaaggcgtatgaaagctagtgagtacttaataaagcctttagagcttgaagacgtatataagtttaagtcttggcataggggtaattactacctacttaatgactacgacttcatatatgaagaggactgggagttaaaggcgtggcttaagactaagaagggcatattcaaacgctactttgtgatatactacgaaggcgacgccatcgcatacattggattaaaagagataaacattataaagaagagtgcagagctatccatcgttatggatgtacgttatcaaaaccgtggacatggctataagatactaattgaatttttaaattttgcattcacagagctaaaactcaagagaatttggctcgatgttaatgcctttaatgaaagagcaattcacttatataagaagcttggctttacaaagaaggcgtactacctagatacatataacattcaagatattgataaaagtagacaagagtacttggacaacaagtgcgagttcgtacaaaacggcagagagcttctctgctatgtctacacatatgagataaagagaggtgagttttttgagcttcaagctagagaaaattaattcaaacctattagacacatcggtaaacaatatatttatcagcgagtttatgccgcaagctgacggtacctttgtcaaggtgtacttgcttgctcttaggtttgcacaagatgacgatatcgaagcaagcaatgagaagatagccgaagttttaagaattcctatcatagatgtagtttctgcatggaggttttggaagtcggttggcatagtcgattttgatgacgatggagagaacttgaactttaatcttgtttttaaagacttaagagctctatacttaagaggaactaacagcagcagcactactactagcgttattagttctaacacgagagcctttagtgaagaagatgatattagcgatgacgatttaagcagtgacactaaattgattatagaagtaaacaaagacgaagctgtgaagaagatgtttcaagacgtcgctcacatcgttagaaggccacttaacacacaagagaagatcaagatcattaagtggctgcgtgactacaacattagctgcgagatgatatcgcacgcctactcatacgcgtatgatgttttgaagaagaagtcacctgcctatgtggagagcataatcatgaactggtacgacaagggcttcacaagtctatctgaggtgatgaatgacttcaatgtaatgaatgatacacaaagaaattacaacaagcttatgcaatcgcttgcaatgccatttaagaatgtatctgactttgaaaagaagattatcgataagtggtacgacgactttggctatggtaacgacgtcataataaaggctgcagagaactttatatatacatctaagccgtctatagcctaccttgatgcgatacttgaagcgtggcacaagcaaggcatacagactgttgaggatgcgcaaaaagcaaacgacctttataggtccgataaaaatgcaatcactactaagaggccaagcaagaaggctaaggactttgatgagagagagtacccagatggttatctaagtgatacctatgaaggcaattggaggaagtagcatgactttgttagacgatgtttatagacaaaaagcgaatataaaaaacattagagagagacagagaagcgaaagagtcgaggctatatataagaagtatcctgaactattgagacttgagaatgaaaaaaacgatgtgcttaatgagcttacgtccatgaacttttcaaattatgaagatattaacaaaaagatacttgatatagaagcgaagaagcaaaagcttatagaggactatggccttgaagatgcatttaaggttcaatatgagtgccctaagtgcgaagacactggtatatatcagtcgaagaggtgttcgtgcatagacgatatgcttagagagaagatgcttgaagctaatgagcttaatactgagatgagacagaagagcttcgaaagtttcgatgctaatgtattctcagatgaaaaggaaggcgatgctccatcgacaagggagtatatgcttgctatcaagaagagccttgaggactatgcggataattttactaatgaggctaagtccatcttattctacggtgatgttggcacaggcaaatcctttatggctgtctcacttgcaaagaggctcattgaaaaacttatcaaggtaacatacataggctcctatgaaatgtgtcaagtgataaacgatgcgatatttaaaggcgatgacgcagccattgccaagagagatatgtattacaacacagactttttaatcattgatgaccttggaacagaaatagatacacaggtaagctcaaaatccatacttgaccttgtgaactataggttaagcaaaaacttaaagacgcttataacaagtaacctcaatgttgatgcaataaaagaaaagtatggcgagagactatcatcaaggctactatcgaattattatatatatcgcttcagaggacgcgatttaagattaagataaggagtgattttatgttagatataaaaagaatcagaaaaaatccagaggaagtgcttgaggctctaaagaagagacacggaagctttcctatcgaggaattgcttgaagaagacaagaagagaagagagcttttaactgttgttgaaactatgaagcaaaagcaaaacgccatctctaaagaggtgcctaagctaaagaaggaaggcaaggacgttagccaaatctttgatgagatgaaagagctttcaaacgagattaaagattatgatgcgcaagttaaacagatagacgacaagatatctgagtacttattaagcataccaaatatacctaataagaacgttgtatatggtaaagacgacagtgacaacgttgaagtaaagaagtatggcactccaactgagttcgacttcgagccaaaggctcactgggaccttggaactgatcttgacatacttgacttcgatagagcgggtaagatatctggatcaagattctctatattcaaaggtgacggcgcaagacttgaaagaagcttaattcaatttatgcttgatcttcatacacttgagcaagactacactgagatgagcactccattcatggttaatagagcgtctatgctaggcacaggtcaacttccaaagtttgaagatgatatgttctaccttccatcaaaggacttcttcctagtgccaacagcagaggttccactaacaaatatgcttagagacgaaattgttgatgcatctgacttgcctataaatataacagagtacacaccatgctttagacaagaagcaggagctgcaggtagagacaacagaggccttatacgtaatcaccagtttgataaggttgagcttgttaagttcgtagagccaaagacaagctacgacgaattacaaaagctactagcggatgctgaggcagttctacaaaaacttgagataccttatagagtcgttcaactatcgacaggcgaccttggcttctcgtcagctatgacatatgatatcgaagtttggatgccaagctatggtagatatgtagagatatcgagttgttcaaactttgaagactttcaagcaagaagatccaacattagatatagaaatgaggaaggcaagttaaacttcgtacacacacttaacggatcaggccttgcagtaggaagaacatttgcagcccttgttgaaaattatcaaaacaaagacggttcgatcactataccaaaggcactacaaaggtactttggcaaggaacgtatagttaaaagagtaaagtagttaatcagcttatatatgataatagagctatgtatatcaattgatacgcatagctcttttcttatgtctatattttattcttcgtcatttacataggccttcactatctcaccaatatatacatagtgaaagtcgcgctcagggtagttcttctttagtatcgtttggtctatgaagccttcctcacgaagcttatctctatagacttttctgcatacgaagaccagctttgcctctttaaagtagacagtttcgtcactaaagagaggagtaagtttagtcttagagagcttatcttcactgcgaccgctatgtgtacctaagtacaataagtccttcttgtaagactcatcaaagaaacttagtgtgtagtagtcttctttgtcaacaaattctctagtatacctttgtggtcttagatagatgaccgaggtaggcatatcgccgttccatatagcacccaagtgaccccactgtgcagtcatagtattgaatgccttctcattacctgcgcttacaagcatccactccttaccaataagagtcatcggattaaactttaattctttcatgtcaatagcctttaagctcatagcatcaccccttatatgaattatatcacatatatctaaggctcgctatatatattttacttagcgagtatagaaaaatatatctctttgtgatataataagtcttggtgattatatggagctattaatcaaaatatttttagttttctttaagataggcctcttcagttttggtggaggctatgctatgatgccactttttgaaaaagagatcataaacggtctaaagtggattagctactccgacttcatagacatagttgccatagctcaaacgacacctggaccctttgcagttaactctgctaccttcataggtaataagcttgcaggcttttggggcagtgttgttgcaacatttggagtgacactaccgagcttcatcatcatgagcatcatattcttaactataaacaagtttagagactcaagaactgttaaggtatcgattagaggcataagaccagtagtcttagcactagtacttgctgcagtggtaaccattggcaaaggagccatcatagattacaagtcagtcatcatagctgtcattgccttcatacttgtaagagtgaaaaaactaaacccaatacttattatggctataggttttgtggtcggcgtatttatatataggtgatgagatgaagatacttaatttatttataacattctttaagataggtgccttcacattaggaggcggctttcccatgctaccaatcattgagcgtgagatagttacaaagaagaaactcatgacagacgaggagtacatagactcgataagtcttgctcagacagcaccagggcctatcgcagcaaacatatctatactagttggctataggatatatggcttttcaggtgcactcgcggccttcttcggcgcagttttaccaagctttatcatcatattagtgatctcacacttctttatgggtgtgcaagataacccatatgtgcaagcggcctttaaaggtgtaagacccgttgtatgtgcactagtctttgcagcacttgtaggcttagtagagaaagcgcacttaaataagtttgagtacgtgataagtcttttagcttttttaatagtagtatttttagacatcaatcccatcttcgtaattattggcggagttgtgattgctcttagtaaggataaatttatcaagaataaataggaggttattatggatttatttgaagaattaaaagttgaagtaaaagaaaaacatccatcgatcgtttttccagaaggtgaagatgaaagagtgctaaaggctgctttcagattaaaagaagaaaatattttagagcccatagttctaggtaagagaagtgaagtagaagagactgcaaaggctatatctaaagaccttaataatatcaatttcattgatccagctgaagctaaggacatagatgagatggctcaagtattctttgaaagaagaaagggcaagatcactttagaagatgcaaaggctttattacttaaagacgttaattacttcggaactgtcttagtatatatgaagaaggcagatggccttgtatcaggcgctgcacacgcaacaagcgatacagttagacctgcactacaaatcatcaagatgaaggaaggatacaaaaaaacttctggtgtcttcgttatggttaagggcactgaaagatatatctttgctgactgcgctatcaacatcgcacctgactcaaacgacatcgcagagacagctatactatcaaatataactgctaagagctttggcgttgatccaaagattgcactactaagcttttcaacaaagggcagtgctaagtcagatgaaacagaaaaagttattaaggcactagagatagttaaggaaagagacgcatccattgcagtagatggtgaactacaattcgatgcagccttcgtaccatcagttgctgaaaagaaggcaaaaggctcagctatagcaggccatgcaaatgtattcatcttcccatcactagaagcaggtaacattggctacaagattgcacaaagacttggtggatacgatgctataggacccatacttcaaggcttaaacagtccagttaacgacctatcaagaggctgcaactcagacgacgtttacaagcttgctttaatcacagcaaaacaagctttataatgatactcgtaatggcagtcgatgccaagtgggcaatcggctacaaaggggacatgcttacaaggatacccgaagaccttaagcgcttcaaagagatgaccatgggaggcgtcttagttatgggacgcaagacctacgactcgacaggggcacttcctggtagagaaactatcatcatgtcacgctcacttaaagatgtggatggtgctcacattgcccatgatcttgatgagttaaaaaagatgataaaagaaaaattttctgataagaaaatatttttagttggcggttctcatcttatagagcagctcatagatgaagtagacgaggcagagataacttttattaaaaaagattttgagccttatgatactgttatgaggaacctcgataagaacgaggcatttgaattaagtgagattagtgaagaacatgattatgacgcaatgaagtttgagtatcgaaagtatattagaaagaaataaaattatcaatataaaccctctttactaaagcagtagagagggttttattttgcatatagattattttgaagtgcatattatttaaaataatttattaaaaagttacttattattttgaattataaaaaactctcaagtattacacttaagagttttgatgagaaatcttaattatctacgataagtaagattgtatatgttcatatcttcatcgtaaaaaaagtcataataaagtattggtttagtagcatcgcccaaatacttaattagtatctcgatagctttgccttgcatacttttatcagcaaaaacatcctttgcttctttttctgcaatattaatctgaggctctgggtaattgctatttaatgaatcgatatcattaagaatcatatcatatagatttttaatgtcttcttcttttgcacctatattaccaaagtatgctttgaatgcttcgtagtctttagacttgactgtgccaatgacttcaagcgatttatttataaatgccttgtatttttcttttagctcatcttgattttcttcaaagtctgccgtacttagctggaaacttataagctgattagcaatatttcttgcaagattaaaatatatctttttcttttcgccttggcatagcgcttggtagatgtaagccttactaccatctccatcttgacctgactcgattgataccttttcaatctttacaatatcgccagagatttctagtggttttagagcctctataattagatttggatctttatctaccgcagtttttgcactgccggctaggcttgactttatcttgtcaatatccttagaacaaagcagtttaatatttttttcaatccactctttatcattatcagtcatttcaacttgccatacagtatctttgactagactattgtcatttgccgcatcatttgaactttcttcagatgtttcctttttttcggtacttgagcttgcttcttttttatcttcactcgctatctttgtttcattatttgttttagctttgtcgttaggcttatcacttgagcaggacgaacagataagcatcataatagttaagctcatacataaaaaaatttttttcatagatttacaccccctatgattgattaattatacatatatattgtaaagaaaaagacaaaaatatattaattaagtgttaaattcacttatattaagattactataatttatatatactttatatgctatgatcaaatcaagaatacaaagacaaaggagaaggtcttatggaaaaaaacaaaaatgcaaagaagggttttcactacgcatgggtcatgttatttgtggcgacacttacattaggggtctacgtgcctatagtgaactcattatctaacagctgacaactagctgtaacaaaagacttaggtttctcaagaactgcctttagcttaggaggcaccatagctcaatcaattggtatcttcttaggacctatcatgtcatactacttaacaaagtataacttcaaacgcatatggacagtggcggcagtattatttgcttgtgcagtcttcggttattcgatggcacaaaaccaataccacttctacatattagcagtagtagtaggtgcgtgctacatagcgacagcccacatacctatgatgatgcttatcaacaactggttcgaagacaaaatcggccttgcgacatccatcgccgtatctggcatttcaggtggtggcgcactacttagcccaatcatcaacagtcttatcaaaaacgttggttggagaatgtcatatcgtgtttatgcattcattatcctagctttggcaatagttttcggtgtcttcttaatatatcttaagccagaggacaagggtttacagccctatggtcatggtgaagacgatgaagcaaaagaaattaaaaagaagaaagacaacgactactcgctaaatgttggactatcgatcagtgcatctatcacatgcatattctttatattcttaatattgggagccgtgatgaatggtctttcaaacggagcgacactacagtttccacctgcgcttataggtgcggcaggctacgacgttgcaagcgctgtcatggctacctacttagtactaggcgtcttcggtaaactattgctaggaaggatagccgacaagtatggcatctaccacgcactagccttcggagcatcaatgcttgctttaacattcgttgcaatgctatttatagacaaggcatggggaccatacctaatggcagttatcttcggttttggcttagctatcggctcagttataccaccactaatcacatcaactatattcaacagagaagtctacggtgaagcatatggctttgtaacatcaggcgtgcaaataggtgctgcgatgggaccacttatcgtttcatatatattcgacagccaaggctcatacacatgggcgtggatactaaacatcgcttttgcactactaacaggtttcttctggttcttagcacacaagagcgctgaaaaatataaagacaagagtgaaaagtaggaggacgatatggataaatatattgaaatacttaaaagacttatagagtttaaatcagttaacgacggcgaaaaagaagtagctgagtacatcgaaggcctattcaaagcttatgacaatgttactacagagattatcgactcatatccaggtagatcaaacatcatagtcaagcttaaaggcaaggcacctggcaaagtctttgcggtatcaggccacttagacgtagttgcggctgctgatggatggacgcatccgccatttacccctgaaattatcgatggcaatatgtatggcagaggtacttgcgatatgaaggcaggagttgctgcaggcctttatatgttacttgacttcatagaagaaaaaacagagttcaatggagaaatttggttcataggtacagttggtgaagaggttggtatgcaaggcgcacttgatttagtagaaggcggctaccttgatgatgtagacgcaatcattataccagagccaacaaagagagacggcgagaaccaagcaatatttgcatcaaaaggatccataatgtacgcagtgaacgcagaaggtaagactgctcactcatcaatgccagaattaggcatcaacgccatcatgacacttgctgagttcatactcaaagttcaaaaacaatttgacgaagtaacagtgactaaaaaatatcaaaatgccaatcttggctcaactataaatgtattttctatgatagaaggcggacttcaattcaactccgtgccagataaggctactgtgaagggtaacatacgtacagtgccagagtttagctgcgatgactctatagacttattagagaaagccatagaagagaacaacaaagacgagagcaaggcaaagctatcacttgatctagttcaagttctagatgcagcagagtcgaagaaagacagcaaacttattgaagcacttaaagcgtcagcaccaaataagaacgtttgtgttaagccacttatcggtacatgcgagctatctcgctacatccacatcaaagacgacatagaccctgtggtttatggaccaggtcttacaaagatggcacacaaagtagatgaatacatcgaactagacgagtacatcgacactatagagatatttaagaaaacagcattaaaatatttaaacgaataaaatttgtataaagtaaggctactcatctgagtagcctttttcatgtgtatattatttttcttctttttcttctttctcttcttctttttcttctttctctatctctttttcttctttcgagcctgtcattatctcttgatatatttccatgaagagacttaggtcggcctctctcttaaaattatctacaacggactggtataggtcctcggctagtgacataacgacttctttattcttatcgctcgcagcgagctttatgactagtagtccttggaagatggctcttactacgcttgcgtcactttcgccataagtaatgagtggatgtgtaaactcaacaagcacgtctttgaagctcttgcttgtgtaataaattcttgccttgccatcagttttgatgtagtgatggttcgagtcgacattagcaagatgcgaaagtagtattgagagctttcttatacaatgtatcgctgtgttgggatcgttgataccaggtgataaagcacgagcagcgatttcgactatctttcttaagccaactttataatcttcatcagaaattcttgtttcggtgaaaagaaattgtttttgaattttttcaattgtctcatcgtcaagtgagtctttgctcaagtagccaagtgtttgcttttgagtaatgaagtcgcccttagaaacttctatggtgaagactatgtcctcatcttcgattatctttttaatcttatctatgtctatgatttcaagatagccagactctaaagcggcgattctcttttctttcttagtccactctgctttctctagtaattcaaagtcgcgctcttcaagctcttttgctatcatcttgtcagttttatctgctatgtcttcaagaagcttagaataatttactccagataaaacattttgcacgaagataacgaagtatattgcgccccatattgcatatatcacgccaatggtaccagcgataacaagtctttggtcctctccagacttcataaagttaaggctcactaagcagtaaacgaagccacctatgaatatacctaagaccttcatagttatcttcttgtctaggaaattttcaacgcttctaggtgtgaaggagttgtgatacagagtgaaaactgtaagtatggtcgagaatgtaaaggtagtgattgttaatagggctgatactagtgatgaaagcactgtcattgctagttcaacacttgatagcatgatgcgcggcacgtacttagttagacccgagtagctgctgtctatgtaggttactatcgcaagtagtattacagagtagaaaatgtattcaaggcagtatatccaccttctgttgttgtagaaaaataatttaattttgtttttcatatcctcaccatccttttatatattatagcacataatgtgttaataaagaaagccactgtgggtatatatagttagcaatagctaaggaaataatttgctattagtgaaagaggtgtattatggaaaagattattgatttggatatgactgttgctgatttagtaagtaagtatccagatattaaagatgtactaatcgaaattggctttaaggagttacaaaacaagcttatgcttaacagcgttggtaagtttatgacattaaagaggggctctgttgttaaaaatattagcatggatattattaagaagaagcttatcgaacacggctatacgattaaagagagtgaaataagtaatgatgacaaggcaaggcttgacaagcttaagacatttatcgaaagactaagtcaaggtgaggacatcgagactgtgagagctgactttgctaaggagttttctgatgtcgatagtaaagagataatgaaggcggaagaagagattatcgcctctggtgtgcctataaaggaagtgcaaaaactttgcgacgttcacagtgcactcttccatggtgcaactgagacagagaagggcaagaagcttaaggcgatagacgagctaggtcatcctatatataacttgcatatggagaacaatgtcatttctgagcttattgatgaggcgcttgcattattagataaaaaggattatagtgcagttgacattgagaaacttagaaagatacgcgtgcattacacaaagaagggcgatcttatatatccactattaaaggttaagtacaatatacccggtccttcggatgtaatgtggtctgtcgatgacgaaattagagatgcatttaaaaaacttgatacaagtaatagagacgaggcatgggcagatgcacttagaaagaatcttcaaagagcgaaagagatgatatacaaggaagaaaacatattgttcccaactattgaggacaagtttactgatgaggagtggcacaatatatatgaagacttcaaagcatatagcggtggtcttagagatgatgatgagtggaagagagatacttctaatactaatgaggcaaagtcttcttatcaaagctctatgatagaacttaagggtggacactttaaacttgatgagcttgaagcgctattaaatacaatgccttatgagattacctttgttgatgcaaacgatataaacgctttctttaattataatggcagagaaaaattattcaaaagaccaatgacagctatcggacgcgatgtatatagctgccatccaccaaagattgaagccatggttagagagataatagctatgtttaagagcggagcaaaggatcaacttggcatatggatgaataaggaaggtcatgattgctacgtcttatacatggcggtaagggacgagaccggtaagtaccttggaactatggagttagttcaagagatggactttgcaaaagaacactttaaagataataaataaaaattattttgattaaaggacttgaggcaattgctttaagtccttttttacacataatgtttctttgataattgatttttgcacctgattgtggtaaaatgtatacataatggaggggatgaaatgagaaacaaatatgaagatgctatcaaacttcttgaagacaatggtatcagatatgaatcagttaagcatccacctgcatttactactgaggaggctgacaagtatatcgagggtaagattggctgtagaactaagactatgtttatgactgatcaaaagaagagacgcttttacatgcttgttatggatgacaaggacagactcgatatgaaagagttcgctgaaattgcaaacgaaaagagagtgaagatggcgtccgaggagactctatacgaaaagcttggcaatgaagctggatgtgtatcgccctttggtcttcttaatgacacagaaaaagaagttcagttctactttgacaatgctatattaaaagaagagataatgaccttccacccaaacatcaatacagaaacattattttttaaaactgaagatttatttaagatgcttgagactatgggctacgaggttcatttcgttgacttaaataatgaagaataaaatttttgcactggcgattgttttattgctggcgtttctagctttttcacgagtagagactactgaaaaatgcatagttatagacgaggaacttggcgaaatagagatgagcttgtccaagccaatatttgcgaggttttataataaagttacttttacaaaagataatttatctaaaacaaaaacttttgatggtaagtacaagctcaatatatacaaggtcgacttaggtagggttaatgatgagaacaagtttgacatcgcttttggtgtttactcgatagctccttggcacagaacgccatcgaagcgagtcttcttgtataaggtagtgggacttgagttgaagccaaagtttcgctgctcgaggctaatcaatccaatgtatgattttatcttgtatgatatcgatggtgacgcatttgatgaaatcgtatctattgaaaaatacaaaggcgtttactcaatcggcatatataagcagtacgatatgctcatagagcgaatcgcgactaaaaaaataaattttcgcccaacaaaattaataaagagcgataaattatatatagagggtataaatataaaaaaggaaatacaattttcaaaggagggtattgatttaaaatgaaaaaaagattattagcaataattttagttttggtaatgagcttaagtgcatgcgcttttccatttaacaaaacagacaaagatgaggacaaagagaatagtaaagagaatagtaaaaatgaaaatattgaagcaggtgaagcagacttaaatgctttgcttggctacgatgcggaaaaattatttaacacagaggaagtaaaagactttgaagacattgacatcgaagcaaatgttaagccatatgatatcccaaaggattctaaaaatattggcggttttgttcaagatgaatacactcaaaaatataatgctaaaatgatgaaaaatcttgaagacaacggattttttatagattacgcaaaaatacaacagccatttagcatttatgaaactaatcaatacatgggtaataacaattttatcactaccgactccattgttcacctatatcacatcatctatcttggcatgatggaggatatggagcaaaactcattgaagcaaaagttaattgatttatctaaaaattgtttggacaatgctttaagtgattacaaagaagcaaagggcgaagaaaaagaaatacttatgaaaaacgcagcattattcctatgcgcagttgatttgcttgaagcaaattacgatggagaagtgccaagcgaagtaagggaaatagctgataaagagcttgaaaatattaaaacagaaggaactgctgtatcaaacataacaggtaaagaaattgattactcacaatttaaggttcgtggcaattacagtaaaaatgaaaacttgaaaaaatattttaaagttaacatgctttattcacaagagttaattcatttagaaaatcctgataaatcaataaatctagaagcagttaagcaagctatgcttatctcaagacatatgcttaaggacgaagctagttttaaattatggaaagacatatataaaccaattagctttttagttgaaaacactgaagatactacccctatcgacatatacaagagcataagtaaagttactaaagataattcggtagaggcaatacttgagaaaaatgttgtaaatgctgttgctgatgatatcgctaataaagaagatccaaagattaaacctgactcaggaaaagtttttgctttcttgccacaaagagcggttgttgacaatacttggttacaaaacttagttgatactgatcctcacagcaaaagaccggttgtttcaggtgtagaccttatggcacttcttggcaatagtcttgctgagagacttactctaacaaacgaagacaatttgaagtgggacaagtttaaagaaaaatacgacgaaacaaaggcgatagttgacgcaagaacagataaagaagaaaaagcaaatatttacagaacatggctttgggttttaaaagcttttaataacgaatatggcgaaggctatccagattttatgagaagcgaaaagtggcagtataaagatttaaatacagcgcttgcatcttgggctcaattaaaacacgatacaattttatatgcaaaacaatttggcgctgagtgtggcggcgacgaaccgatggacatgaggcactatgttgagccaaatgttaatctatatagaagagttaagtatttagtgggcttaactatggatgcggatgaaaaatattctttattaaatgatgagcaaaaagcaagattaaaagattttgctgatatgcttgaatttttaatcaaggttagtatagaagagctaaaggacgaaactactagcgatgaagataatgaaagacttaaattaatcggcggagagatggaaaatatctttatagcgtttaacaaagatgaaagcggtggagaatttgaaattcctccagttgatagagacacagccaatgttgctgacttacaaaaaattggaccgaatgtggttgacaaaccagaaggttcattcttagaagtgggttctggaagattctcgactatatatgtagtttatagacttaatggcaagtattatctaggcagcggctctgtaatgaattactatgagttctattctgaaaagagacttgataacaacgagtttaaagaaatgcttccaatttacaatgaaggcgaaaaagataagatagagccattctttaagaaagaattatttacaaacaaagtagaaagtttatattaatataaagggagaaatttatgaaatacatcaaagacggcacatcatatatagtaaggatcgacagaggtgaagaagtgcttgataagcttaatgagtttgtcaaggagactgatataaaggcagcaagcataacaggtataggcgcttgttcagaagtagagctaggtgtttatagcgtaaaaaagagaaagtatagcaaatacaaatacgaaggtgaatttgaaattctttctttaaatggcaatatcactagagatggcgatgagccatatatacaccttcacatcatgatttcagacggcatggtgctagcaggcggcttaactttcggcatgggcatcactgttggcggtcaccttaataagtgcataataagcggcacatgtgagctacgcatagatgagtgcgaaaacgcttatcaaagaaaaattgatgatgagacaggaattaagatcttagacatctagttaataaaatttataagagcaagtccatatacatgggcttgtttttttcttgataaatgtttcgcttttctaaataaaaagtggctactccttgtatgagttttaaatatgtgttataataatttaagttgttttttatagatatatgagatatggaagtgattaattgatagataatgaatttttgaaaagagtttttaaagtagcgtggccatcggtacttgagagtgtcttcatagcactagcaggcataattgacacctacatggtatcgagcttaggtacatatgcaatatcagcagtaggcttaacaacgcagccaaagtttataggccttgcgatattcttctcgataagtatagctgtctcggcgctcgttgcgaggagaaagggcgaagaggatagacgctcggcgaacgaagtcttagttacagcctttgtcgttgcacttattttttgcctagcaataacaacggtaatggtatcactctcagacccaatactaaagcttgcaggtagtaagacagatacacataactacgcgatagagtactttaacatcatcatgggctttagcgtgtttaatgttataagcatagttatcaatgcggcacaaagaggtagcggcaacacgaagattgccttcacaacaaatttagtctcaagcattgttaatattacttttaactatatacttatcaatggtaagcttggttttccagctatgggtgtaagaggtgcagcgatagcgaccatcttaggcactttcgttgcaagcataatgagtattagatccttattcaagaaggactcatatgtaagcttgccatttataataattaataaaataaaaccagccttcgatgcttttatcaagataatgaagctcggactaaatatgtttgcagagaaccttgcgatgagagtgggcttcctgtcaacagcacttatggcagcgtcacttggtacagatcagtttgcggcacataacgtaggcatgaacgtactaagtataggctttgcctttgcagatggtatgcaggttgctgcagttgcattatcgggcgaggcacttggcgcgaagaagtatgacgacgcggttatatatggcaagacttgtcaaaaggtcggcttcgttatatcacttgctctgtcagcaatattgttattattcggtaaatacatcttcggcgccttcttccaagacgaaacagttattaactacggcatcatgataggacgcttcataacagtcatcgttatatgtcagatatcacagatcatatatggaggctgcttaagagcggcgggcgatgttaagtatacactcatcgcttcaatcataagcgtaagtattattcgtagtgtgatgacatatgtgcttgtaaacatattccacttaggactaatgggtatatggcttggtgtattatcagatcaattctcaagattagtctttatgagcacaaggtttaggcaaggtaagtgggttgaaaagaagatataaaatttaacacggagataaaaaatgatgtagatcaattgacctacatcattattttttttctaaagtaaattttagtaattctcaacgaagatttcgaagtgtgcttgtgggtgatcacatgcagggcactttttaggtgcttccttaccttcatataggtaaccacagtttaagcacttccatatgtaaacgtcgcctcttttaaataccttaccagcttcgatgttctcgataagctttttgtatctgttgtagtgagctttttcaacttcacctatgtgtgtaaagacagcggctatctcattaaagccttcttctttagcaattttggcaaactctggatatacagttgtccactcttcattttcgccttctgcagcagcctttaagttagctagtgtgtcttgtagtgctactggataagtaccacatgcctcgatcatctctccatcaagctcatcctttaagaacttgtagaacctcttagcatgttgctcttcgttttgtgatgtttctaagaagatgttttgtatttgcacataaccatctttctttgcttgcgatgcatagtagccatatcttattgaagcttgtgattcgtttacgaatgacttcataagattttcgcaagtcttagtaccttttaatttcataaaattaccccctttttttatgatgtgtacattatatatcaaataaatttttttgtaaaggaactcagtcatatatatcttgcaaatattattgcaaatatcaatcaaaatgcttgaagacgcactcatattgtggtataattgatgtcacgttcaaaagaatattattaaatttatttatagaaaaggggtaaactatgaacataattaatgaagaaaaaaatttaaagagggataagatacagcacaagtacacagtgaaagaggtagtgcttatcatcatcggtatactacttgttgcgtcggcgatacatttctttctagtgccgtctaacctaacatcaggaggcgcatcagggatagcgatcgtacttagtcactacataccacttggcattggaccactgtttatcttagtcaacatagtcttattcatcatgggcttcatcttcataggcaaggacttcggtactaaaacaatcgtagttacacttgtactttcaggccttgtgtggctctttgaaataatatttccaaatccaaagccgctttcagatgacctatttctagtaatcacacttggtatgatcatacaaggcatcggtgtgggcatggtacttaatcagtatacatcgacaggtggtacagacatagttgctaagatattgcaaaagttcttgggactcgacctaggcataggctgcctaatggcagacctagtcgtatcattcttcgcaggatccgcctttggcatgaacatatttttatactcagttatgggcgttataatcaatggagctgttgttagcatcaccatcagtggcctcaacacaagtaagctttgttacattaacactaaagaggtagagcttgtgtctaagtttattatagaagaccttgatagatccgcaaaccttataccatacaagggcgcctatacaaagaatgataacgtacttatacaaacagcagtttcaacacgcgagtatataagacttaaggagttcgtaaacgatgcagacccaacagccttcgttgtaacgagcagcgcaaacgagatactcggagagaagtggagaaggtttatctaagttaatattttatatagactgagctagtgttggctcagtttttttgtgatataatttttgtgttataatatagatagacatagtttatattaagagctttttgtattgattattctttaatggcatgactcttaatatatgttataatataatgagtgaggagattgatatgcaaacgaaaggatgtattgagaagtataaaattgaatttgaagaagagataaggtcgctgttttggtcgggcgatggaaggcttaagaagaagatatatggcaaggtcaaagaggatgcactgcgtgaaattgtaagtgatgtctttgtatacgatgacgacttagtgaagtcactaaacctaagtgcatctaagataagtgtcttcttagagactaagtacaaggctgttgactttagaagcttcatcgcaccactatcgagggtcttgctacctgttggggtgtcacttgcgacatttttcctaacaacgaagtctttgaagtacttcgacgtggaaaagatatttggcgttacactaaagactttctttgcctttgcaatgagtgctatggctgttgctatgatttttagtgtctactacaccaaggcaaatgagaagaagctctacgctatatacataagagataggcttaactttgaaatcgaaagactactcataaaagacaagaaagaggtgtaagatggcactattcataattatattcgccgtattagtatcattaatcaatggcggcaagataaataatttattcagagtaaatttaagatatctgttctttttattgataacagtcattataaacatagcagtacttgtatatgttacgaggtttaacttcatttacagacgcgagcttataatgatatatccatatcttaatatatttacattttttgtattgatatttttttctattgcaaacaacaagtactttgccttcaacatcattgccttaggtcttgctttaaatttaattgcaatgataaactacttagggcttatgccagtagtgaaggacgctttagtatatcttggctctgctaatgaattagctgtgttagaaaagtcgatgtcgatgacgcacacgcttgctgtgagtggtaaggcatttaatgttttagcggacacaatacctgtgttcaagtttacagggcttagaactgtactaagcataggcgatgtatttttgtctttaggcttatttatgcttgtagaagatgtgatgaagaggaggccctagtatgttttttagacaatgcaccatctttcttatctgccttataaacatagtcttaggacctataacatgtaatcacgcagcaaagctggcaaacgatggagctagcttaacttatgttcatgatgtaaaagagatacccatcattgaaatcaagaaaaaggagccttctatcgatagcgaggtcaagatatttgcagcgggtgactatatgctgcacggtcctcagctaagaggcgcaaagcaaagtgatggcacttacaattttgatgaatattttaaatacttgccgcactttaaggacgcagaccttgctatgcttaactacgagtcgactgtctctgttgatggcaggtacacaacttatcctatgttttcatctcctatagagagtattgagtcgatcaagaaacagggctttgatatcatatcaacatcgaacaatcacgcttttgataaaggttttgcaggtgttaacaagaccatagacacgattaagagctatggtatggagagtgttggcacatacaaggatgcaaacaatatgccgcttattaaagaagtgagtggcatcaagcttggtatcagcgcgtatactttctccatcaatggatttgagaagaaggttcaaggcacggacaaggcttatgcgataaacttcatcgacatggataagattaagaaagatgtagagtttatgaatgagaatgatgtcgacttcaaggtgatatatgtacactggggcaacgagtatcaattaaagccgagcgcatggcaagaaaaaatcgcaaaagagcttaacgaactcggtatagatgtagtcttaggttcgcacccacatgtaatacaaaagtctgaagtcattgaagcaaatggcaagaagacatacgtctgctactctatgggtaacttcatatctaatcagagacgtgaggccatgggtcagagatatagcgagaacgaacttatgatggaagtcattttgaagaaggatgctaagggtacaagcgttgcaaagtttgaagcgcatccactatgggttgataagtacgtaactcaaggcagagcgcactataacataatcccagttaaagaggctcttgatggcaagatcaaggtcgaaagatttaatcaaatcaagccaaagttagtagaaagtctaaatgatttcaataatatatataaataggagatggtttaatgtattttgatgatgaaatgacaccaaaagaaaggatgattgccttttcaaagggcgaagcaattgacagaatacctgtagtgccagatatgggggttactatggcatggtatataggtaagaagacaaatgattattacacatcatcagatgtaataactgaaactgagatcgctttattcaatcgcttccaccacgacaacatctgtgtctctacaacactaagaggtatggctgaagccatgggctcagttatgaactaccctgatgacaacatttcaaacttaagagagccagttgtcaaaacagaagaggacatcgataagcttgagcttgttgatccgtggaaggatggtcacctacacgtactacttgaagcacttgaaaagcttagagacgctcttggcgatgtagcagacataggcgcatcgatgactgcaccattcacagtagctgcctcggtacttggcactgagaacatgcttagatggatagttaagaagaaggatgctttccatagacttatggacatcattacaaagaacaacgctgagtatatcaaggcacttggtaagattggtttcggaacaggtttttgcgaccctgtatcatcgacatctatgattagacctgcacaatatagagagttctcactaccatacttcaagagaaatgttgaagacgtaaagaagtattgtggaggcgcaccaactatacacatatgcggcaagagtaaagacatatgggaagatgttgttagtgccggtgtaggtaacttctctatcgacaactgtgaggaccttgaggaagctaagaggataatgggtgacaaggttgttatcacaggtaacgtgccaccagttgacgcgatctacttaggtaacgatgacatcatcaaggaagaagtgaagaagtgtgttgctaaggcttgggactcaccaaagggttacatcttatgtactggatgtcaaataccaaagaacagccctatagagaacatcgactcctttatgaagtggggtaggtattacggcaagttgccaatggatacatctaaatttatataatatttttttatagactttggacattagaaataatttactgaattaatgtgcgtgtagcaatgctatatgcacatttttattgtataaatttcatgaatacctcttaaatacatatgtttgcgcaattcacaaagctgttatataatatttgctggtgagggcgtgaagaagataggagatattagagtgtactcttgtactgcaactaacgagaaagagtatactgatttgaatttgaatattaaagaagaagacttgttcagtgatgctaagatgtatagagaagtagctcaaagaatgagccttggttttgctgcaattttttatcctattgcaggcactcttgaaggtgaacttgccggcatgatgcttgacaaggatgctaatcttagaagatttgttgaacttaatgatttagatgaactatacaagttaaaagattttaattttaatttggagcactttacttgtatgcaaaaagctatggcaagtgaagaggctcctatttgttttaagcttaatggtcttttgtccttcttatcacaagtgatagatatatcgaagctgctattagcttttagaaagaagcttgataaagaaaaaatttatgcatactatagacgaaacgttttagacttactagcacatcttgatgaagagaaggtaaagatcatatgccttgctgacccgctacttagtgttgagacattaggacctaagattgttaaagagctagtgaatgatttctactttccacttattaatgacatattgcagtatacaaactttaagatacatatatgtcctaagctcggctttgcattgtcagacctaggactatttaatgaaatcaaagtagagactgataagatgacttatcaagaagcgctgttaagttcatcttacagactctttagcaatagatgctttaagattttagctaatgttagaacgattacagtattaggggggaattatgaataaaaaggaaagactattaaagatacttcacggtgaaaaggctgataggccagctgtcatctgcccaggcggcatgatgaatccatgtgtaactgagcttatagaaaagcacggcattgattttgcaaaagcaaactcagacgcagaagagatggcaaagctatcgaagctagttgttgaagaaaatctgtttgagaactacgcagtaccattctgtatgagtgttgagtcagagatgctaggatcaaaatgcgtttacggtaataactgcgaagaagcacacatagttgagtatgcaatggacaagcttgatctagataagcttaagcatgtcaaggttgattttaatagagaagacgccctgataggagcgattaaaattttaaagaatgataccataccagtcattggtaatataacaggaccgttctcagttgcaacaagtcttgttgatgcaaaggaaatctacgttggactaaagaagaacaaaaaagtttttgaagaattcatgacttatatatcagataagattgctgagcttgcgattaaagaggtcgatgcaggagccgaccttatagctatcgcagacccaagcggcacagcagagatacttggaccaaagtactttaaagagtatctaatacactatgtcaactacatcatagacaagatcaaagcacataaagaggtgcctattatagttcatatctgtggcaatatgaggagcgttatcgatatagttgatgagattcacgcagaggcattctcctttgatgccatggttaatctaaagaatgcaaaaaaatatatacacaagcctgtcatgggtaacgtgtcgacatatttaatagaaaataacagagctgatcaagtttacaaggtcgctcaaaatagagtcaaagacggtgttgacatcatagctccagcctgtgggcttggcatgggatcgcctcttgacaatgtaaaagctatattaaaaggagtagaagatgcctaaaattcacatacttagtgatgacaatataatcgaagcaaaagaggaaagcgttcttttagatgtactaagagagaacggttactttatagaagcaccgtgcaatggtatgggtacttgcaagaaatgcaaagttaggattatagatggcacacatgaagatgtagttctttcgtgccagtacaagcttaagagtgacataagccttgatttctttgatgaggctaaggcagagaacctacttacttcagatatagatacttttgatgcaactgagtcggttcttactatgaagactcacagctttgaagacagtagagacgccgatacttcatgggaagatgagtatgagaaggtcttcggtcacatctcatacaatgtattaaagaatacaaactttactaagggtgtaaagcatgcgatatatctaaacgatgatgtgatagcaatccgcgatgaaggtaatgacaagatatatgcagctgctgttgatataggcacaacaagtgttgcaatatcagttcttgatataagtagtgctaaagttgtagagagagcatcctttgtcaatccacaaattagtttcggacttgatgtcttgtcaagaatgagcgcagctatcgacctaaaagacaacttatataagatgcaagaacagattactaaggcaatcgaggagaatataataaaaatatttaataagcacagcttggatatagatagtttatacgaagtagtcttctcagccaactccgttatgatgcatatacttatgggcgtcgacccgacgagtcttggcgaagcgccatacaagatagttagctactttaattttgagatagatgcaaaggacattggtatgaaatttggaagatatacaaaggcgttcactataccatcgatctcgtcatacgtcggtgcggatatactaagtggcgttaatcatatagacatagagagcatagacaagaacgtcatgtttatggatataggcactaatactgagctagttttaaagtacaaagaccactactatgcaagtagctgtgcagcaggtccagcacttgaaggtatgaacatcgagtttggttcgagagctgagctaggcgctatcgaaaatgttttctttgaccttgatagtggaagtaaaaacatagtcgtgataggtaagcaaagagcaaaatcgatatgcggttctggtgttttagctgttatacgcgaggcgcttaaggtgggtctaattgattacaggggaaggcttgtaaagctagaagaccttgatgaaaatgataagcgaaggactttcttaaaggatcttgatggcaagagcgttatcgacttaggagatgtctacatcactaagaaggacatacgtaacattcagctatcaaagagtgcaatactatctgggatagtattattgttcaagaagcttggcatgagagctgaagaagttgatgacttattcattgcaggtcagtttggttatcacttatcaaaggatatgcttttaaacacttactttataccaaagatagatgaagaaaagatttcgtatcttaagaacacttcacttgatggcgcgatcagtgtagttttatcaaagaagaagagaaaaaatcttttgagtttaagcaagaagataaagtttttggagttaagttatgatgacaactatcaaaaagcttttatcgactgttcatattttaaataggaggaagatatgagaaaagaagagtactacaaaattctagacgactacgtctacgaatacgaagacgaaaagatagcagaggtggcacaaaactatattgatgaaggttatgacgcacttgatgctatagttaacggattggttccaggaatgaaaagagcgggggaagcttttcaagaagaggaatatttcgtaacagaccttttgttatgttcagatgcaatgaacaatgcacttgatgtgttaagaccacacctagagaagaacgagcttgaacacaatcacaagatagtcataggtgttgttgaaggggacactcacgacattggcaagaacttagttaagaccatgtttcaaacacaaggttttgaagtcatagacctaggcagagatgttgaagtgcataagtttgttgacgccgcacaagagcatggagttgacatcatatgtatgtcgacacttatgacaacaaccatgagaaacatgagaagagtcattgagatacttgaagacagaggcataagagacaaatacaaagtaatgataggtggaggacctatctcacaatcatttgcaaataagattggcgcagataagtatactgtagatgctgtcgaagccgttaaagctgctaaggagttattaaaaatataataaaaaagtaggaggaatttgtgatggacgaaaaatcatcaatcaaacctaatggattggcactgataccattcattgtatttataggttttttcttgttatcaggaatcattttagacaacatgggtgtagagatggcattctaccaaataccatcacctatagcagtacttattggtactatcgttgccttcttaatgtttaagggatcgatagactcaaagttcgaagtattcgttaaaggctgcggagatgacaacatcatcatcatgtgtttaatctacatcttagctggtgctttcgcaacactatctaaggcatctggagctgttgactcagttgtaaacttgggcttaagcataataccagttcaattcataacagcaggtttatttgtaatcgcttgcttcttatcaatcgcaacaggtacttcagttggtactatagttacagttggtcctatcgctgtaggtattgcacaaaaagcaggtctaccagttgctttagtattaggggctttagtaggtggatcaatgtttggtgacaacctttcagttatatccgacacaacaatcgccgcaacaagaactcaaaatgttgatatgaaggataagtttagatcaaacttcaaggtagcactaccagccgcaattgtaacacttattatcttattaatagttgctaggacatctggaccagttaactttgatgatttaagctacaactttgtacttatcttaccttacttgttcgtacttatagctgctttatgtggcgttaacgtattcgttgtacttacacttggtattgtatttgcaggcggagttggtatcgcaactggctcatacaacggacttgaactttgccaaaacatttttagtggcttttcaggacaatttgaaatattcttactttcaatgctaactggtggtcttgctaatatggttagagctaatggcggtatcgaatggctagtattaaagatagctaagatggcaaagggcaaaaactctgcagaactatctactgcactactaactatgatatcaaacgctgctcttgcaaataacactgtatcaatcatcatatgcggacctatcacaaagagaatttctaataaattcaaagttgaccctagaagaacagcatcactacttgatatgttcagttgtataactcaaggacttatcccttacggtgcacaaatacttatcgcttcaggcttcactgaaggggctgtatcaccagttgagttagttccatatatttggtatccaatgatattattagtatttgcagttctatcaatctttgttagatacgctgaccttaagactaaatggaactttgaacttgacaaagtagaagaagcataaattatatttaattgatttatagaggaagatattttgataaacataagaaaagatttaccagagatttttgatgaatttaaagacaagagaagagaatcgtttttaaaagtaaaagaaattaaagacaagaatatacctgtcataggtatattctgtacattctttccgcaagagatagctcttgcggcgggagcgacatctgtttccttatgttcaacatctgatgaaaccataaaagatgctgaaagggacttacctacaaacctttgcccacttatcaaggcaagctacggctttgctataacagacaagtgtcccttcttttatttctctgaccttatagtcggagaaacaacttgcgatggcaagaagaagatgtatgagtaccttggtatgattaagcacgtctatgttatggagctgccacaaaagaggtctgaggagagccttaagctatggaaggctgagattaaaaagcttgctgcatatgtatcgaaagagtttggatgtgagataacagaagaaaagcttagagaagcaactgtgataaagaacaatgaaagaagtgctgttaaagacttttatggcataatgaaggctgacgaacttcctatcatgggtttagacttgtggcatgttttaaatggagtgcaatttgaattcgataagaaggcaatacctaatgagctttcagagcttaagaagaaaattttaagtgagaacaaacacatcacaggtaagaagaggatacttattacaggttgcccaataggtggagcgactgaaaaggtaataaaggctgttgaggacaacggaggcattgtagttagctacgaaaactgtggtggcgctaaggcgatagatgagaacgttgacctaagtaatccagacatatatgatgcgcttgctaagaagtacttaaacattggctgcgcatgtatcagtcctaacacaccaaggcttaatctattatcaagaatgatagatgagtataaggttgatggcgttgttgatatgcagcttcaagcatgtacaccattccaagtagagacaaaagttattagagactttgtcacaaaagaaaagaatactccttacatccaagtagaaactgattactcagagtcagacttgggacaattaaacacaagaatcgaagcattcatagagatgctttagctaaaaagaggccctcctagtgagagcctctatatgtttttagcacaaaactaaagagagtgagtatatactcactctcttttgatatgtaatcccattatgtgccgtttttcataagtaatttatccccgcatatacgaggtgggttcgttattcacaacttctaatgtccacttaaggcatattatccattgtaaaaaaatcacggtcccatattattattgtcggttaaattaatatgaaaagcgcgcactacaggatagcttatatatattatatagcaaagacttttaaaatgcaagtcatttacacaaaatttttagaaaaatttattatatcagagtgatcactcactatatagcgtctctcttcattagtccttggatccttaaagcttatctcgaaggaatgcaatagttgtctatcaacaccttcataagtcttctcattgtatagagtgtcacctactataggaaagcccaagtacgctaggtgcaaccttatctgatgcgtccttcctgtacatagatccgcttcgactatagagaacttttctgtacttagaacttttttgaatatggtctttgcataatcgccctcgtcactatcgcagactttcttttttatatgatcagtctcgtcggtcttgatgttcttctcaactactatctcatcataaggaaagcctccatcgactactgcatggtacttcttcttgaaggtaccactctccatttgaagcataagattgtagtgggcgaaggggttctttgcaacgaccatgagacctgttgtgttcatatcgagtctattgacaaggcgaacgcgcctcttaagagagcgtgactgaaatagattgttaagagcattatacatagtcgcaccttgattgttcttcgtctcgtgcaccaagatgcccttctctttgttgatgaccatgtagtctatagtctcatctactatgtccatctcgcatgtgaagtcatcaggcactgtgtcctcttcgggcatatgtatatgaagcacctctcccttaactatgggtaggtccttgcgtctaaatttttcatttacaaatatatctttattaaggtagcttcgtctaaagagtctctttgatatattaagctcgtcaatcatctcactcatcttgtcatatgacctctttgcaacaaagcatacattgtactcatcgttaatcacattatcacctacgagtaaattatattatatattaagagtttttacaagcaaagagcatttaaaacattgaaaaaatactatttttgttatataattaagtaatagttcatacagaggtgacgatatgagtgagagaattataaatatactcgctaaagacgacgacttaagtaagaagatactcttagagcttgaagacaagcttggagagcagggcttcattacgactagagattttaataaggacgcagagttatctatagtattaggcggtgacggctccttcttaagaagcgtgcatcaaaatgattttcccgaagtgcctttcgttggtttcaatacaggccacttaggcttctttcaagagctttcaattgacgatgtcgatagatttgtcgaggagtatattgctggtgaatatagacaagagtcgctgcacttaatagagactaatgtctcttatgagggcggaagcgaaagactgctttctgttaacgagatggttgttaaggcaaacaactcaaaggcggttgagcttgatgtctttattaactcaaactacttagagaggttctttggtgacggacttatagtctctacaccagtaggcagcactgcatataactactcggtgcgtggaagcgttgtgcatcctaagcttgagtgcttacaaataacaccactcgcacctatcaactcgaaggcctttagatccttacaaaactcacttatagttccaccgaacttcatagtaaggcttgagccaaagaagagatacgaaggcgagattatacttcttaacgatggtgaggagaccatattcaaagacgttaagtacgtagagattgatatgaactacaagaagatttatagaatagtatttgctaaagatagttattggaacaacttaaaagataaatttttataggaggcatagatgtacgattttcatttgcattcaaatttttcagttgactgcaaggtcccacctgaggatatggttaaggaggctatcaaacaagggcttaaagctatatgctttactgaccacatagacctttcgcttgaccaagacaaaagtaaaacagttctctttaacatagaggactacctaaaagagataaataaattaaaatactcttacataaacgagatagaagtattaaagggagtggagtttggccttcagcttggtcttgttgatgagtataacgagctaagcaagaaccccttcgactttatactttgctctatacacagtatagatggagagaaaatcttttcaagagagaagaacttcgttagtgactatgaagaaggacagattaagtactacacacagatgctagagatcttaaagaactttgatagctttgactcacttgcacatatcgactttatcgataggtactacaagtacaaagacattgaatacgagtttacagatgcagctaaagagatagtctacgagatattaaaactgctcatagacaaagaaaaggcattggaaataaacactgctgcacttcgctttgatatgaagtgcttccatccgcaagatgacatacttgatatgtataaggaacttggtggcgagctaataactcttggttccgatgcgcactatacacaggaccttgcatatggtataaaagatgctcagaggtatctaaaggataagggctttaagtacctatacatctacaagaagagaagaccatatccaatacatttgtaaaaattaataaaaaacaactatcactccttgattatttcttcaaggagtgataaagtatatttagggacacgaaacatttgtaaaggaggagcaatatgtttaaatcactaaaacctcttttaagatatttcagaaagtacaagtggggttacatactagggatattcttcctactgttcatagacgttgttcagttatacatacctcaaatacttaagtactttgcaaacgactaccaaaggggagtccttactatgaagcttgcgacaaagtatgcacttcttactatagctacaggattaatggttgccgttgcgagatatttttggagaaactacataataggtaactcgatgagagttgactatgatttgagaaaagatttcttttggaagttaacgagtctttctcaaaatttttttaatacgcacaagacaggggacctaatgagtcttgcgactaacgacataaacgctgttaggatgactcttggtcaaggcatcatcatgtttatcgactcaacattcttacttatacttaactttgtaatgatgattgcaacaacaaacgtcttgtttgcatcaaaagttttattcacaataccacttatcatactattagtaacaagattcggtggtgttattcactcacgcttcaaagcagtgcaagctcaatatggcaagataacaactagggcacaagagaacttctctggcattagaatcatcaaagccttcggtcaagaggaagagaacaagaagctctttattgaagagaaccttaagtactacgacaagaacattgaacttgcaaaaatgcaaagctttttcaatccatttatacaagtattaagcaacctaagctaccttttcttactcttcttcggagcaaaagaggttatgcaaggcactatgctactaggggacttcattgccttcaatgcatacttaggactaatgatgtggccagcgagagcccttggtatggttatagtctttatgcaaagaggcgctgcatccatggacaggcttaataatatattcaataccgagccggagatagttgatgcgaaagataccatcgacttgaaagacacaaaaggcgaggtcgagtttaaaaatgtttcgtttaagtacgcagaggaccttccatatgcacttaaagacataagctttaagatacgcccgggtaagacacttgctatactaggtaggactggtagtggcaagtcgagtatagttaatgttatgctaagactatacgaagtgaatcaaggtcagatacttatcgatggtcacgacataagagaaataaaactaaactcactaagggagaacatctcttatgtgccacaagacgactttttattttcaaagactgttaaagagaacatcgagtttcactacgagcatgagcttgatgatgagaccatagaaaagtacgccaagatagctggagtatatgatgacatcatggactttaaggacggctttgataccatactaggtgagagaggcgtaactctatctggaggtcaaaagcaaagagtctctatagcgagagccttagcaaaggaaaagaacatacttatcatggacgactccttatctgctgttgatactgagactgaagaaaagatattacaaaatcttaatagagacgaaagaggcgcatcgaagatcatcatctcacatagagtttcaactataaaggatgcagatgagatattattcatagaagacggtgctatagtcgagagaggtactcatgatgaactaattaagcttaacggtagatacaataaattatatgaagatcaactactagagcaaaagataaatagaggtgatgaatgatggaaagaaacatagacgatataaattatcaaggcaagaaatccaaaaacacctttatgagaatgctctcatatgcaagaccatataccctacagttaatcgcgactttcgtgatgataattatactaacaggtcttgcgctccttagtccatacttaattaaggttgccatagacgagcatatacaaatcgaaaagattaggatgtatgagtacccaagccctaatgaaaaaactttaagcgtagttcgtactaaggataatatgcaaggtggtattccatacttaataagagagagtgatcttagtaaagaagagaagaaagagtatgaaggcagaggcgcttttcatctaaaagaagatggagacggagcctacctatacaagtcgggtgacgaaacaaagaccgccatatacgaagtgagccctagtgagtttaaagcgtatagacagagggactttaaagccataaacagactgagtttgtacttccttcttgcaatcatcttaaccttcgtgcttgactacttgcaaacgatgtccataacagtggcgtcacaaaagatgatctacagcatgagaatcgaagtttatgatcacatcatatcgaggtcgcttagcttttttgatagaaacgccataggtagactaacaacaagacttactaacgacatagaagctgttagtgagatgtacacagacgtaatgataacattgttcaaagacatatttatgcttgcaggtatcatgctctttatgttgtcaatggacttaaagctaagtctactaagcttcattactttgccaatcatactagtcgtttctatatactttagagacaagataagaaagatacttgctctatcgagaaagaagctatcactaatcaactctaagcttaatgaaaatatttcaggtatgagattgatacacatctttggcaaggaagacaagattaacagagagttcgacgaagccaactctgactacagagacactatgcttagaagagtaaagctagtctctatatatagacctggtatagatataataagaaatatcgctatagcgagccttatctacttcggtgcgaaagaagtattaaatgagactatgtacttcggtatgctttatctattcatcgactaccttaagaagttcttcatgcctatcatggacttaacagagaagtataacatcacgcagtcagccatggtatcggctgagagagtctttgccatacttgatgacgatagcgagatcaaaaatccagagcatccacttaaatttgacgacgtacaaggcgagattgaatttaagaatgtaagctttagttatataaaaggcgagcctgtgcttaagaacatatcctttaagataaagaagggtgaatccatcgccttagtaggtcctacaggttcaggtaagacatcaatcatatcactattaacaaggttctacgagatagacgaaggcgagatactaatcgacggcatcaacattaacgacataagaaaagaagaccttagaaggaacataggcgttgtcttgcaagatgtatttttgttctcaggtactatcagggacaacatcaaacttaacaaagagatatcagacgaagagatacttaagatatcgaagtatgttaatgccgactcctttatacaaaagcttccaggcaagtatgacgagcctgttatggagagggcatcgacactgtcatcaggtcaaaggcagctacttagctttgcaaggacactagtatatgaaccaaagatactcgtgcttgatgaagctactgccaacatcgatacagagacagaacttttaatacaagacgcggtgaagaaacttatcaaaggaaggacatctatcgccatagcgcatagactatcaactatacaacacgttgacaagatactcgttattaagaacggtactattagagaagaaggtacgcatcaagagcttcttgacaagaagggtctttactacgacttatatagattacaatatgataaatagtttagaaagaaagctaatcaagttcgattagttttctttttttattctttatgttttattcatgcgcttagtgggtatataaataatagtaaaatataaaggagtgatattatgggactatttgatttcatatcagcgaaagcgagagaagaacaaagaaaagaaagaatgaagaacgctggcaacattgccatgggtactttattaggactagcagcaggtgctgcagcaagctatctatttgcaccaagaagtggtgaagaaactagagagatgattgctaagaagagtagagatacttataacgacatgagagaaggccttgctaatgcaactcaaagagcaaaagagctaggtcaatgcgctatggaaaaggcaaaagagtttaaggaagaagctgctcaaagagctgaagaacttaaagaagaagctgaagaaaaagctaaagagcttaaagataaggcagaagacaaagcaattgaagctaaaaaagaagtagaaaagaaggctaacgacgttaagaaggatgttgaaaaagaagtagaaaaggctaagaaataggtgataatatgggcatagattttggcaagattaaagatgaagcagctaaaaaagctgaagaattaaagaacgaagctgaaaaaaaggctgacgaactaaagaacgaagctgaaaaaaaggctgacgaactaaagaacgaagctgaaaaaaagattgacgaagctaaagatgctgctgaaaatgtaaaagatgaagcagtagacaaagctaaagaaattaaagaggatgtagaaaacgcatttaagaatattgggaaataggtgatataatggacgcaatgtatatattaaaatgtgtgctaatagtttttggcatagcagcactaggttcattagcttatctattcattaaaatcgcttcatcaattagcactatgaagaacatgatggaagagaacagacttaacatcggtcaaacagtagctaaacttcctgaagtgatgaacaatgttaacggtatcacaagtaatgttaacggacttgttgacgacataagaccagacatcaaagagattacaacagagactaaggaccttgtaagagatcttggaccaaacatcaaaagcgttactgatgatgtaagtagacttgttaatgatctaagacctaatatcgcaggcattatgaataacattaacggcgttacatctgatgtgtctagacttactaatacagctatgggtattactgatagcgcgattagtactgtaaacagaatcacatcacaagttgcaaacactgcaaacaatgcttatggtgcagttaatggtttacttggcaatgtgaaggactccatctatgaaaagaagatgaagtcaaagagcatgattgaaaatattatcttgaaggtaatggacatttttaaaagaagctaataagttctaaaaagctaataaattctaaaagaaggactcgtgagagtccttttttctttgcaatattagcaagatttaatttaatattgataattttataaaaaagaataaaaaactatataatattccaataataaattacatgtattagtgttataataatatgtgtgttaattttagaaagcctaaattaaaggagaggaaaaaatgaaaaaaattaaaattttagcaatcttattaatggtctcaatgttattagttgcatgcggaccaaaaacagatactaaaccagaagaaactaagacagctgaagcaactgaaacaaaagaatcaagcgacacagaagaaaaaacagatgataaagatactgcaacattaaatggcgttacagaagaaaatccactaaaagtggataaagactctaagagcgtaacaatctatgctaagtacaacggaaaatttgaaacagaagcaacaagacacttagcaatctttaaagatggcaagttaagcgatatgtcaatcttttcatcttatgtatctccagtagacttctacgacgctttagttgaagtaggagctgaagctggtaacaacatgaatgctgacaatgctgcaacaactaagacagaaggctctaagcttgatgtaagtttaacatgggaaggcaaagatagtccaataggtgttgatgaagtagttaaagattcaaacggtaaagctttagacatcagattctcaggaaacattgataattcgaaagaattcaacacaggatgcattacatgtcttgattcatgcttcgttggtattacaagtaacggtgaatacccactaggtgctattgaagaaacaaaagaagtgtcattctcagtagatgctgacaaagcaccagaagatggaactccagtagcaatcacatacacagtaaaatagttgaagaaattctttaatttactccttgcgatagtagtaggaattttagccgcatcgattgtatcaagccttattagcttaagcctttggctagatatgagggtgcattcaaggtatatatactacgtttttattgcacttgcagttataacttcactatttatgaacagagcaaatgaaaaagtctttttaattatagaatttatatctatagcattaattttatgtcttggtaagttcagaagaattatgtacgagctaagagaagcaatgcgtataaatatgaatataaatctatttcaaaatattataataataattttgatagtaattaatttaatggtttttctaaaatttataataaagaaaaagaagtctgcgtaattaaacgtagacttcttttttttcaatctaatattcgatttctttcaatacttcttcagtatatatgttgatgagttttatctttttgtcgtccatcatagcaactgaggcgatgccatctttaggtatggttgttgaaccagggtttaataagatgatgccgtcttttatatctaagacctttatatgtgtgtggccagtaactatcatcttgatgccggagtcttttgcgtactcaagccttgcaaattctgtttcctcatagccatgtataagcatagtcttaaggccattgatatcaagaactctcatcttgtttgtaaggtccttatctgttaccatctgatcgacgtcactgtcacagttacctcttacgtagataatgttgtctcgctcttttaagtatgcagcaagatcctttggattgtaatcacctggaagtgcattacgaggtccgtgatataagacgtcgcctaagtggtatatggtctcgcagtccttaagcacttcaagcgctcttagtgtttcgtcgatgccaccatgtgtgtcgcttataaaaccaattttctttctcattatatataaactaccttctctgttctttcttttgcctttggaacttcatcagcatatcccaaagccattagtccatatgagatgtgattagctggaatcttaaatgaattcaatacttctcttacgccttcgtccttgttgcctcttagttgattgatccaaacagatgcaagtccaagcgcatggcttgctaagtagatgttttccatggcagttgatgtgtctgcgtcgcctagctttagatcttcaggcacagttattatgattaaagcctttgcatcatatatgcggtagtcgtctctatcaagtgactttgcgatggcggaggctagtctttgtatatcttcttctttagtcacaacagtgaagagtctctcttgcttattcatacctgttggtgaagcctttgcacactctattatcttctcaagtagatcacgaggtacttcatcagttttaaactttcttatgcttcttcttgtcaataggttttctattgcgtccatatcatcacaacctttcttataattattataccacaaaaatgggtataatgataagggtgattatatgaaggataattttttaatacaaggtatgagctgcgctgcttgcacggcaaggcttgaaaaagtattatcaaggcaagatggcgtttcaagagctaatgtcaatctatcgtctaatagagcaagagttatatatgacgaaaatctaatttcccgtgacgatattttagctgtcatctcaagagcgggatttactggctactatcaagagagccgtgacatagctaaggaaagggagcttagagagaaggaaataaaaacacttaagcgcgactttatcatctctttagtatttgctttgccacttttctcagttatgttcctacacatggcaggagtgcatgtcttctatgcggatccgtggtggcagtttgcctttgcgactttggtacaaatttttggaggacataggttttataaaggagcaatcagctcattaaggagcaagacctttaacatggatgtgcttgtttctatgggcaccacagctgcctacctatacagcatatacaatatgtttatatcgaacccgcatctatacttcgagtcttcagcagtcatcattacactagtattactaggtaagcttatggaagctaaggcgaaggcaaagacaaacgaagcagttgataaattacaaaatttaaaagtcgatactctaactgtcattaaagatggcactgagaagactattaatatagacgagcttgaagtagatgacatcgttcttgttagaccaggtgagagggtcgcctcagacggagtcatcatagaaggcgaggcgtcaatcaatgaagcgatgattacaggcgagagccttcctgtgaataaaacggtaggtgacgcagttataggatcgactgtcaacggacctagtacgtttaagttcaaggtcacaaaggttggtgacgacactacactagctaacatcataaggatggttgacgacgcagcaagttcgaaggcgccggtgcaaaggatggcagacaagattgctaatgtctttgttccatcggtaatggctattgcatttttaacttttttgatttatactatatttaaggacgctaatacaggtattattaacgcaatcagcgttttagttattgcttgcccatgtagtttgggacttgcaacacctaccgccatcatggtagcaactggtagagcagcacagtcaggcatacttataaagtctggcgaagttttggaagcaaatgctaaagtcgatgcagtatgttttgacaagacaggcacacttacagaaggcaagcttgctcttactaagtttataaacaaatcatcaatgagtgatgctgacatcttaaagtatgcttacagtgctgagaaccaatcagagcacttaataagcgaagcaatatcatcttatgcaagggatagaggagtttcttatatagaagctgatgagtttgaagcaattcactccaagggtgtacgcgcgaagcttgatggcaaggaaataatattatcgaacgaaagatactttgacgagcttggcatagcttacgacaaagacataatgaaagaacttttagatgagggcgctactgtcatagtcatggctgtagataaatcagctgtagcttactttgcaattgaagacagcttaagaagtgacagtaaagaagcaatcgctaagatcaaggctatgggtataaagacatacatgcttacaggggacaatagtactgtcgctaggaacgtctctcgtaaacttggtatagatgatttcagggcagaattgcttccagaagataagcttaaagccatagaagagataaagcgcgagtgcacaaagcttgccatggtaggtgacggtgtaaatgatgcaccaagtctcgcaagttcagatgttggatactcaatcgcatcaggcacagatgttgcattagaagcaagtgacataagcttattaaacaattccatctttggtgttgtaagagctttagaactatcgcgagcagccatgaagataatcaaagaaaacttattctgggcgttcttctacaacgtggttggcataccatttgccatgctaggactactaacacctatgcttgcagggactgcgatggcattctcatcagtatgcgtagttacaaactcactaagattaagatataagtagaatagaggaggaaatttatggatagcaaaaaattagacatcgctagaaacagaaaaggtttcatagctgccttagaccaaagtggtggatcaacaccaaaggccttaagactatatggtattgatgaggataagtactcatctgaagatgagatgtttaagcttgttcacgatatgagaacaagaatcatcaaagcaccaagcttcaataaggatcacatacttggagcaatactatttgaacagactatcgatagagagattgatggtatgaagacagctgactacctatggaataaattagagatacttccattcgttaaggttgaccaaggtcttgctgatttggaaaatggcgtacaagttatgaaagagatgactaagcttgactcgcttcttgaaagagcgaaggaaagaggtatctttggtactaagatgagatcagttatcaaagagttcgactgcataggcatcaaagaagtagttaaacaacaatttgattatgctaaaaagatcatcgctaaaggcttcgtacctataattgagccagaagttgatatacatgcagagtataagggcgagattgaaaagatcttattacaagagttaaaagacaatattgaaaagctagataaggatgactacatcatgttaaagcttacactacctgaagaagacaatctatacctaccactatatgactacgacaatgttttaaggatagtagcactttctggtggatatacaagagaagagtctaatgaaagacttggaagaaaccacagagtcgttgcttcattctcaagagcacttactgaaggagcaaaggcaagtatgacagatgaagagtttaataaacatatggaagaatctatagaatcaatttataaggagtcgattaagtaatgaaaagaattttaaaagtaaacggaatgaaatgtgaaggatgtagcaaagctattgaaaaggcattagaaaaatttgatgaaattgacgttgtaacagctgatttcgcatcaggtcacgttaatatcgaaagcaaggaagaattcgatctagcaaaggcaaagaaagctatcgaagaccttggatatgacgtagaagactatgaaggagttaaataagagaatactcgatatagcagaaaatttgttaaaaatagattcaccatcgggcatgtgccagatggtgaatacttatatagaagagcatttcaaaggtaagttgagcttagagaaaacaaataagaatgctctttatgctatattgaagggaaaagattcatctaagctaaggatagttactgctcatgttgatacacttggaggcatagtatcaagagttaaggacaacggcagattagagtttgaaaacataggcggctttatgtacgcatcacttgaaggagagttagtaagagtttatacaaagaagggcgtagtgagtggaacagtgcttccaaataaggcgagcgttcacactatggaagacgaaagggaaaagactcttccaagagagagacattcgacagagataaggcttgacatagtatcatctagtaaagaagaaactatagagcatggcgtagctgttggcgacttcattgcctttgagccgcgcacaagagtaacagaagactttcttgtatcacgcttcatagataataaacttcatgcagcaatcatgatctatgagatggaagaagtacttaataataatattgagctcgcatgtgacacgatgttttactttacaaacttcgaagagcttggccacggcataagctatgtaccagacaatgcatatgaggtacttgctcttgacataggtatagttagctatgagaacaactcagctgaagacaaggtaactatagttgcaaaagattcaaggacaccttacccaatagaatttagagacagacttgaagatttagcaattaaaaataaaattgactatgcaatagatgttcatcaaagatatggatcagacggatcacttggtgcagtcgcaggacttaatttaaacttcgcctgcataggtgtgggaactgacgcgtcacatcatattgaaaggacaaatatcaaggcgatagagaacacagagaaactattgagagcttacttagaaaattaaataaggtatatactagataggcgggcagtacagatgctcgcctttttatatgcgcaaaaaaaagactccgaacttaatcggagtccatatagtaattattttaaattatttgccaagattttcatgaatcttatcaaaaacgaattgaacttgtggtccaataatgatttggattgaatccttatcaggtttgataagtcctaaaacttttgcttctttaattcttgcttcgttaaccttagcgccatctactaagcttgttcttagtctagttgagcagtagtcgatgtcttcaatgttatcttttccaccaaggccttcgatgatgatagatgcaacttcatcaaagtcattgttctttgtaactgtatctgcgcttacttcaacatcgtcatcttctctaccaggagtctttaagttaaatgttctgatgaagaacttgaagatgaagtagtagattacgaagaatactagtccaagtggaattagcatccaagggttattagctactgggtttcttaatgataagaagtagtcaacaaaacctgctgagaaaccaaaacctgctgtccagtggaaagctgctgcgatagcaactgaaatacctgttaatagtgagtgaacaaagtatagagctggagctaagaacatgaatgagaattcaagaggttcagtaacgcctgtgaagaatgatgcgaatgctgctgcaactaataatgatttagcaacgttcttcttttcaggtttagcttcttgatacatagcaagagctgcgcctggaagaccaaacatcattacagggaagaaacctgcttggtacatacctgttacacctttaacagctgtacctgcttcaagagaagctgcgccgcctaagaagttaggtatatcgttgatgccagcaatatcaaaccagaatactgagtttagtgcgtgatgaagacctgtaggtattagtagtctgttaaagaacgcatatatacctgcacctatagcacctaagctttcaataccttcaccgaaagcaactagagcgccaaatagtataggccatacatagtaaagaattgctgaaacgattatcatgaataaagatgtcatgataggagtaagtcttctaccactaaagaatgcaaaagcatctggtagttgaacttgatagaacttgttgtatgccaatgctgcaacaagacctgagatgataccaacgaatacgttaccgttgttcatcttttgccagccgtcagttagagctagttcggatacatctactcctctaaatactgcaacagtacctgctgaaagaagtgtagttgcgattaagaatgctactagacctgatagacctgctgcaccgtttctatccttagatagaccataagcaacaccaactgcgaatataattcctaagttgtcaagtatagctgcgcctgtcttgattaagaatgcagcaacgatgctgttagcgccccaaccattagggtcgatccaataaccgatacccattagtagagcagcaactggtagtatagctactggttgcatcaaagccttacctaggttttgaagttttttcatcataataatgacctccttaataaaattgaataataattactattattatatatattataccatattcattcgaaattagaaatactaaacaaaaatttgtttgcaaaaattagatatttattgtagaatgagtatagagacacttagtattaagtaaaattaatttaagtgaattatcagggggtgttactatgcttataaagggagctaatgtttactgcgatggtaaatttattagaagggacattgctgtgagtggagagatcttcactgtatacagtagtgacgacatcgttaaagactatgcagatacttacatcataccaggactaactgacatacatttccatggagcgatgggcaaggacctttgtgatggaactaaggagtccatcgataccatatgcgagtatgaagcaagaaatggtgttacacaagtcatacctgctactatgaccttagcagacgaagagcttgaaaggatattcaaagcgattggtgagtatgaaggaggcaagggagcagagtttattggtgtgcacatggaaggaccatatatatcaaaggacaagataggtgcgcaaaatccaaaatacttagccgtgccaagtcttgataactttgacaagtaccaaaagctttctaataatagaatcaaaaagataaccatagcacctgaggtagaaggagcgaaggactttattaaagagagagcagacgaggttgtcatatccataggacatactgactgcgattacgatactgcacttgaagcctttgaccttggagcaaaatcggtaacacacttattcaatgcgcttaacgacattaaacacagaagccctggtgtatgcggtgcagcttttgacagccctgaagtcatggttgagcttataacagatggtgtacatatacacccttcagtaataaggatgatatatgcaatgtttggcgacgacagagtcatacttgtatctgactccatgatggcaactggtctttctgatggcaagtatagccttggtggacaagatgtatatgttaagggcaagaaggcaactctcgagtcgggaactattgccggcagtgcaagtaatttatttgactgcattagatatgcttactcgataggcgtaccttttgaatcactagttaaatctgcagcagtaaactctgctaaggaagctggcatatatgataagtatggcagcatcagagttggcaagtatgcaaactttgttgtagtcgataaagatttaaacatagccgatgtatatataagaggcaaacaaataggtggagtaaatgaggataattaaaggaactatagctaacaaaggtcttgttttaggcaaggtaaaggtctttagtgatgagaagattgttattagtaaagaaaagattgatgactgcgctaaagaacttgcaaagcttgatgaggctataaaagtgtccatcaaaggactagattgcttatatgagaaggcaaaagtggatgcaggcgaagaagaggcacagattttcgaagtgcacaagatgatgcttgaagacatagagtatcaagacgaaattagaataaacataaacgaagagaagtttaacgctgcatatgctgtgagcttagcagaagaaaaattttacgaagtctttaacagcatggacgacgagtattttagtcaaagagcaaaagacattaaagacatatcgcaaagattaattaaaaacatacttggaattaagaattcatttagtgaaggacttgatgagaaagttattttatacgcagaagatttattgccaagtcaaactctaaacattgacaaggataaacttcttgcaatcgttacagttaaaggttcaacacaatcacacacagcaatactagcaaagtctatgaacatagcatcgcttgtaaacttagactgtgatcttgataaagagcttgatggcaagctagccatacttgatgcatataatggagacttcattatagatccagatgacgctttgcttaaagatgtaaagaaaaggatagagaaggaagaggcaagaaggcttgaattagaaaaattaaagacaaaagaagccatcagtaaagacggtacgcatataagcgtctacgccaacattggtaagtctaaagacttgccgcttgctattgccaacggtgcagagggcataggactatttagaacagagtttttataccttggcagagactctcttccaacggaagaagaacagttcaaggagtacaagtacgttgccgaggctatgcaaggtaaggaagtcatagttagaacttttgacataggcgcggacaaaaaggttgattatctaaatctacctgaagaagaaaatccagctttaggctatagagcaataaggatatgccttgacaatgaagaattattcaaagcacagcttagagccatcatcagagcatctcactatggcaatataaaaattatgcttcctatgattaacgatgtatgggaagtaaagaagagtaaagagattattcaagagatatttaatgaacttagagagaagggcgtgccatttaacgagaacatcgaagtaggcatcatgatagagacgccggccgcagcaatcatcagtgatgaccttgcaaaggaagtaagcttctttagtataggcacaaacgacttaacacaatatacgcttgctgttgatagacaaaatgaaaagatatcaaagcacagagacattcatcacaaagcactacttaagctgatggagataacatgcgcaaatgcaaagaagcacggcgtaaagataagcgtgtgcggcgagcttggaagcgaccctgagatgactgagttttatgtaaagaataaatttgacaagctatctgttaatccaggacagatacttgaactaaagagtagaataattaatttataaggaggttactatgaaagaattcgaatacacaatcacagaccctataggtatacatgcaagacctgcaggtctacttgtaaaactacttgcagctatcaaaagcgatgtaaaggtagctaagggtgaaaaaaacgttaacgcaaagtcaatacttggacttatgggcttgcaagcaaagcaaggtgaagctattaagttcatagttgaaggtgatgacgaggacgaagctataaagaagatagaggacttcttaaaagaaaatttataatcttgacttatagccccttatgcttgtataatataagcatagggggtattattatggaaaaagaaaatttcagcccgaaagagatattgtccatgaccttggacaacggtgtaaagaagacaaagcttaaaacgagaacacagttcttcttaggactacttgcaggtatgtatatagccatgggaggagctgcatcaactataatcaacagccttggcaaaggtttcaatccacaaataacaagactcttagttggattaacattcaccatcggcatagttgcagtagtagttgggggtgcagaactattcacaggaaacatacttatgtttggagcggcacttgacaagagaagtaaactaagcaccatcatatacaactggctcaagatatttatatataatttcattggagcacttatctttgtttgcgttgtttattattcgaacatattgtctgacagtacaaaggaattattcgtaaacatttttaacgcaaagacatcgcaaggctactttgtattatttgtaaagggcataggttgcaacatactagtgtgcttatcagtatggctgagcacagcaagtaaagagattacagctaagatctttgcgtcagcctttccagtagcaatctttgttatatgcggtttcgaacactgcgttgctaatatgttctacttgcctatagctatgatgataagtggtaattttgatatgcttgccctagtgcacaatctaatacctgtcacattaggtaacatagcaggtggtatgatcttaataacgatgtactactacgcttataaagattaatttaaaatatagttttagaacaagtactcatatgagtgcttgttatttttttgcataaaaaaggtcaagccttatatagcttgaccaagatcatatattatttttttaaatttaaaacttttaataggctaagagtcgagcccttctttggagtcttcaatgcattagttgtcataagagccatctcaccacgattaaggtagtcgtcaccgtttaagtccaagccatccataaggccatatgtcactgcatagtcagagacagcgtcccacttctttgcttcggatgtgtaggcaagtatccttagtagcactgcttgatactgtctaacggttacatagctaccaaagccaaacttgtccttgctcgcaccatgtatgtagccattggatactgcccagttgatatatggcaagtaaatcttgttaacattcttaagatctgtaaactttgtttcagagctatacttttttgctctctcttcatcattcatcagtctcgaaagaataataattaaatcttctctcttaagattcttatcaagcataagatcacctgaggcatcaccttgtattatattgtatgactttaactcttcggcactttttttgtattgatcgaccatattctttgcatatacattagcaaaggacgatatgaacatcaaaaagcataagaagagtgtaatttttttcttcatgcataccactccacttacattatactatataataatcatttcgtatattaagttcttgttacaaaacatattttttaattaatatatagtaaaagcctttatatttaacttgtttgtaacatttctttcactgattatgtggtataattaatacataagaattagaagactagttatgaaaggagtaaacttatgaaaaataacttaaaaagagtatttagtttagtgcttgcactaatgttatgtatgacatttatacctactaacacagtaagcgcaaaaactttcaaagacgtaccaaagtctcattgggcatacagctttattaacgagatgagcaatcaaggatatatcgatggatatcctaacggtacatttaaaccacaaaaatcaatttcatttttagaagcaatgaagtttgcagctatacttacacaatatgatcaaaacggattagaagctgcaagaaaagtttggctaaaggacgtagtagcgcttggagtacctgattgggcacaagataatgttgttaagtgcttagcaaagcaagttataaatatgaagacattacaagcagctaagaaattaaatttgtttagctcaaataagcaactaagcagacgtaatcttgcagagtactttgcaagagcaatgagtgtgaagtcaaatgacccagttatatcacttccttacaaggatacaagcaatattccagaagaatcaagagcattaattgctggtttgatagacgctggagttttatcaccacaaggtagtggaaacggtatgttcaatggcaacaaagctgttcaaagagatcaagttgccaagatggtacacttagctcttaagtatcaagctacacaaggaaacggagctaacacaacacaacctgttcaaccagtacaacctgtacaacctgttaacccaacaccaacagtagttacaggtactatcactgaattctcaactacaggtgcaacagctatattagtagtaaatgacaacacaagcacaggcaaagtattctcattaaacgctgcaacacttatcacagttgatggcaaattaggaaaccttacaaacttactagtgggacaaacagtaactgttactgcaaaacaatcaatacctgttatgcaagcaatctctattgatgcaaagggagtacaatttaaccttgaaggtgaagtaacaaacgttgataacgacaataaagaaattaagatttcttatacagacagcaataaaaacaaagtttcaagagtattcaaagttgactctgactcatcaataacaattaacaatagatcaaagagcctttacgatgttagaactggttcacaagttagagcaagtatctacaatgacaaagttaagacattagaagtaacagtatcttcagatgattataaaggatatgttaagagagtagactacagagaaatcactatcgtttcattaaatggtagagaaaacagatacaaacttcctagaagagatacagactatgatatatatgacgacagatatgacaacagaaacagctactacggaagagaacgcaaattgacagctgatgcatttagaagccttgttagtagcaacacagcagtatatgtagaaatcgaaacagactcaagaaatgatgatgaagtttcatacatcacaattggtgacggctttgataacgagtatatcgtatcttcaaactatggctatagcagatcaagagatcgtagagactacgagatagttttatatcctaagggaacatatgatgacaatagaaacagagaaacttactactatgattcagacctaagagcagatacctttgatttaagaagagacagagatgttagagttagagatataggtccaggatcaagagttgttatacttgataaggataaagacaataatatcaagaagattatggttatcgactcaagatataataacggtggaacttattatggagacgtaataagaggatacgtaagaaaaattgacggcaactatatttatttagatgactattcaaatagaaacattgattatgttatagatattaataatgtctcagttagaagtatagaagtaggtaagccttattactttagcgttgataaaaaagatgctagattaccaaaattatatgcatacagcgatactgacccaaatccatatagcaacagatatggcggatatgaaaagtcatttaaaattgcaaaggttgatgtcacaagtgtggatcaaactataatatatgatgatgtgaatagcagaattggttatattataaacagaaatacagatgtaactggggattatagcttaactcaaatgttaagtatgaatacaatgcaaattaacggattatatgcatctatcattactgatagaaataatcgagtaattaaattacttatcaaaaacaatagataaactatacaaaaaatcttagggcttttgtcctaagattttcttgcgttaaaagcattttaataaatgtaaatccattaaaaaatttttttcatagcaataaaaaataattgtaataaagattctcatatgttataatcttaacgaggtgaaaacatgaaacttggtttttcaaatgaactatatataaaggaacaaagcgactatattcttaagagggttgaaaagtttgagaagctttatatggagtttggtggcaaattaattggcgataagcacgctcaaagagtgcttcctggttatgacgaggacattaaaactgttttgcttgaaaagttaaaggataggatggaggtcatcatcactatacatgcgcaagacatcatatctaacaagcttaacaataacacaggtctaacatatgagagagaggctatcagacttatagagagacttaaggcaaagggtattaagatcaacagcgttgttatcaatcgttacaaaaaggacgaaaacgttgataagtttaaagagtacgtggaagcaagaggcatgagggtctaccttcatgacaagactgagggcttccctaatgatgttgacaaaattttatctgaagatggttttggcaagcatccatacattgagacaactatgcctatcatagttgtaactggtccaggacctggtagtggaaagatgactacatgtctatcgcagctatatcatgagtacaagcgcggcgttaaggcaggttatgcgaagtttgagacattccctgtgtggaacatgcctcttaagcatgaacttaaccttgcatacgaagctgcaactgctgacttaagtgatgttaatcaaatcgacccataccacttacaagcttatggtgaaatatctgtaaactataacagagacgtacaagctttccctatattaaagaagattcttgataggatcatgggtgaggagttctacaagtcaccaactgatatgggtgttaacagaatcaagtctggcattattgacgatgaagttgttagagaggcatcaagacaagagattatcagaaggtacctaaaggcgcttcttatttataagatgactaatcaaaagaaggacgaagcacaaaggataaagactcttatggaagagcttaaccttactgttgaagacagaaagtctttggttgctgcaagaaataaaaaggcggagcttattgaaaaaggcatcactaactcaaacgttactgctatcgagtatgaagatactatcatcacaggtagagacggcgagctaatggactctgcagcggctgctgtactaaacttactaaagtatatatctaagctacctgatgaattacacctaatcgacaaggcaatacttgaacctataaaagaagttaagggcatcatcgaaaagaaggaaagcccactacttaatgttgaagaagtgcttatatgccttgctacatcaaagatgtttaatccgagtgcaaagctttgcatagacaacctatctaagataagaaatttaagagcacactcaacagctatgttaaatctaacagatatagaattattcagaaagcttaacatagacttaacaagtgactatgttgatacaaaattttaattaatataatcaataaaagaatcctgatcaaacgatcaggattttttgcgttaaaaaaggccaagctttaataagtttgaccttgatatcttaattattttcgtcgatgtaggctatggctaagcagcctggtccgacatgagcacctatagcagtacctatctctctaatagttatgtcctttgcatcaaactcttcgtttatcatatcgtatagtttttgagcgtttgctaagttatcagtgtgaccgatgatagtgtgctctagtatctcaggattgcgtcttgcatcttctaagtaaagacttagtatcttcttatatagttttgcttcgccgcgcaccttgtcttttaaaattaacgcaccgttttcatcatttgcaagcagtggttttatgtttagaacttgaccaacagctttgattgcctttgatatccttccacctctgtaaaggtactcaaggttctcaacagtgaagaggtgtttaaccttaccagctaagaaattagctctttcttcaagctcttcgatggacttaccttcattattcatctttatcatctctctaacgataagctgctcacctatagtcatagacttggagtttatagataccatcttgatgtttggatacttatcctttagcatatttatcgccatgcaagatgagtcccacgcagtagtaacgccgtaggaaagacagatgtagatgaagtcttcgccttctttgcaaaccttttcaaagccttctaggtattggttaaggttgatctgactagttttgtagattttaccacttctcatgtttttatatatttgtgaagtctttatatcaagtccgtcacgatatacagtctcgatgtcatcagtatcaataacgcttacatataagggctctaaattaaattctttaatttcatcttgagtgaaatcactcgcactatcaattattattcttgtcattttttacctctctcatagctcaaattatatcatataaaattattaaagacaagcacaatattattcttgtataaataattagctatgactaatagtattagtactaaaaaatatatttttgtggtataatacatacataagggaggttttattatgtcaatagacgatagagttaaaagtttaagagaacttatgaagaagcatggcatcactatgtatatagttgctactgcagacccacatatgaatgaatacatcagtgatcattacaaggacagggtgttcatatcaggctttacaggttcacaaggtaatgtcatcatcactttggacaaggcgatgctttgggtcgatggtagatatcacgtgcaagctgaaaaccaattaaagggcacttcatatgagatattcaagtggggcaaaccaggtgttcctacctttatggaatacttaagagacaatgttaaaaaaggcgaagtgattggcttcaatggtaagactttctctgaagctatgtttgaaacgatagaggacttagttgaagatagagatgtaaaatttgttgacgaccaagaccttatctctgaaatatggacagacagaccagctcttaagaaggataaagccttcatactttcttctgaagaagcgggcgagagcacaaaggataaattatcaagagttagagcaaaattgaaagaagaaggtgctgatctaagcatcatcgcttcacttgatgatatatgctggctatacaatatcagagcaaatgatattcattcatctccagtattgattagctacgcttacgttgactttgacaaggctgctatatacacagaccttgacaagcttgatgagtgtgctatcaaggctcttaatgaacaaggcgtagaagttaaagactacgatgctttcgaagaagacttaagaaagattaaagataagactatctacctagatgaaaataagatgaacagatacatgttcaagcttatagaagacgacaactatgttattgatggcttaaacatcactacaaagtttaaagctgttaaaaatgatactgaaatcaagaatataaaggctgcacacataactgatggtgttgctcttgcaagatttatgaagtggcttaaagaagcggacaagactactcttgacgagcttactgtacaagataaattgcacgagtttagagcaatgtcaaaggactttatcgaagaaagcttcgacactatctgtggttatgcagataacgctgccatcgttcactatatgtcaacaaaagaaactaacaagaagcttgataacaagggacttttactagttgacagcggcggacaatacagattcggaacaacagacgtaactagaactatggccatgggacctctaacagatgaagaaagaaaaggttttacacttgtactaaagggcttcataagacttatgagtgttgtatttaagagaggcactaagggtatggctcttgatatgctagctagacttgacctttacaagcatcaaatggattacttacatggaactggtcacggagttggatacctactaaacgtacacgaaggaccacacaacatctcatctagatacaatgacatcgacctagttagaaatatggtattcagcgttgagccaggtgtttatgaagacggaaaatatggcgtaagaactgaagtattaatccatgtagaagacgcaggatcaagtaagtacggcgatttcttcaagctagtaccattgacatacgcagcaattgacaaggacgctatagataaagatatgcttacagctgaagaagtagcttggttaaacagctatcacaaagcagtttatgaaaaaatcagcccataccttaacgaagaagaaaaggcatggctagaaaaggcaacaagtgaaatttaatgtttaactttgaagaagagataaagaagctgcctaagaatcccggcatctacatcatgaagaatgataagggcgagatcatctatgtaggtaaggcaaaaaatttatctaatagggtgagaagctactttagaagcagtactaatcactctgaaaaagttaaggcgatggtaaaaaacattgccgagtttgaatatataattgttgataatgaggttgaggctctaattttagagtccaaccttattaagcgttatgttccaaagtacaatatcgtacttcgtgacgacaaaagctacccatacataaaggtaacgactaatgaaaagtatcccaggatacttaagactaggctcttaagaaaagatggagcgaagtacttcggtcagtatccaaacgctgcgagcgtcaacatcgccatcgacataataaacagagagcttaagcttagagactgcagcttgaacatagagaaggtaaagggaaagattagaccctgccttaactactttatcggtaagtgcatagcgccttgcaaggaagatgtgagcgaagaagagtacaaagagcttatcgatagagcgatgaggattttgcaaaacaaggacaagtccatcttggagaaatacaagtcaaagcttgatgaggcaataacgaatttggagtttgagaaagcgcaagagtacttaaacgttgtaaatgcatttaacgatatacataaagagcaaaaaattacatcgcctgacgccatcaacagagacgttcttagttatgcagaaggtatctctgaccttatacttgagctgttcattatacgcgatggcaagattatagagcgaaactactacctatttgagaacgagaagaagacagacatcaaggagatcttcaaagccttcatctcgcagcactactcagcaaacatcgatatgccaaatgaaatcatcaccgagatcgactttccggacatggatgagatggcggatgcactatcaaagattgcaaatcacaaagtcgagatacacgttccacaaagaggcgagaagagagccttggtacttatggcaaagaagaacgccatcgacatggtagagaaacatgctgacagatatataaggaagaaagctttgaaagatatggcgatgaagcgcttcaaggacatactttggcttgaagatgtaccaaacagacttgagtgctacgacatatccaataccatgggacaaaattcagttgcatctatggtcgtctatgaaaacggcgacatgcaaagaaatgagtacagacgctttaggatcaagactatagtcggagcggacgactacggctcactaagagaagtacttgagagaagatttttaagaagcaagaaggacaaggaaggttcattcgcagcgctgccagacatcatacttatagacggcggtcttggacaagcatcgagtgcacagatggttttagataaattaggtatagagataccggtagtaggtcttaagaaggacgatcaccacagaaccgactctcttgcatacatgggcgagattataaagcttgataaaagttcagaactttttaaaatacttacaaggatacaagacgaggcacataggtttgccatcacatatcacaggtcattaagagagaagaacatcaacagatccatactcgatgagatagttggcataggaccgaagaagaaaaagatactctacgaagccttcgaagatatcgatggcatacgtagagcgagccttcaaaagctcgagtccataaagggcatatcaaagacaaatgcaaaagatatatatgaattcttcagaaaagatacttaattgatttaagtatctttttttaattaagtatcgcttaaaattaaaatgaagagttaaaaaaataaaaattttagtaagagtcttattgtagtaatttttttttatgaaaatttaaagtttatttaactatttatataaagcacttgacaaattaattagctagtgctaacatagatttagaataagcttataaagctgtgaattaaaatattatataagaagataaaaagaaattttataaaattatttattaaaaggagaaaattatatgaaacaattaggttttaatgatgacgagaaaataaaagctgactacaaaaactgggttccaaaaagaatgttgcaggctaagattggtgaaagtatagtaagtcttattttatttggcatatttggtgcaagcgacttagttcttcaaggaaggccaaggattatctgcggatttattctaggggcattgtgcctaatacttatattaattactttctggcttagcattttatataagagttttgattacaagggtaaaagaaagctcgctaaagtcataatagaagggactgccgactatgtaaaaatcaaagatggtggagtgggcttagatgtgggctgcggcagtggcgcgcttactatagcctgcgccaagaaaaatccagaggcaatcatggtgggttgtgatatatggagtggcccatacaagagtgaatttcaaaagaagctctgccaggacaatgctagtgctgagggagtagcgaatgtgagatttgaagaaggaaatgcagtcaagcttccatttgaagatgaaagttttgatgcagtgacaagcaactatgtttatcacaatataatggggaaaaataaacaaaagcttttacttgaaacacttcgtgtacttaaaaaaggtggagtttttgttattcatgatttgatgaataagtcaagatatggagatatgaataaatttatcgaaaaactagaaagagatggctacgaagatgtgcagttaattgatacaacaaagggcctttttatgactcataaagaagctgttttgctgggactttctggctcgatgcttcttattggaagaaaataaaatagtatataaattattataaaaattttagaaaattaatgaggtatgcaagatgaagtacaatggtttttatttttgcttatttaaaagaccgatgaaaaaagttcttatagagaagtatgataaagtatatgcttcggatattattagaaagagcaaaggtgtctatagagatttggttgagaatatggatgacatcggtgctgacaacccaatggtttacaatgaaatgtttgcactagtatttgtatctccatatttagcaagcaataagaagattccgccagaaaccatccaagaaatgatgcgcagatctctctactatattaagtggttctttgctatgacagacttaaataccaagagaggtaaggccagcaacaaaaagaatatagttaagtattataaatggtacactccagaaaaagaaaaactttatccgacttcttttaaggtcgatttcgaagggcaaccttacgaagatgcttgttactatcgaataactcgttgtccaatatgtacatataccaagaagctgggggtagatgaactaatgccactattctgcgaacttgatgatgtgatgattacccttcagcatggagtacttcacagaaaagatactatagcaaatggagcagattgttgcgattttttcatcacaggagacaaagagtaatagataatttattatttgtagcctatttgatttaaaaaaccaatacctaaacttttattagataagcttatgggcaaggataatctaagcgtaatagaaatgacctatccaaaaatttcgaaaaatactattaaaaatgcctgcaagtttatctatcattacaagcatccaaagaatttaattaagttttcaaatccaataatgttttggaggggaagcgaagaccaactctgcaaaaagtgaaaaaatattaagagtatcttccacaaatgaaaacagaagtatttgaaggaatggatcatggacaatttctccacgatcatcccaaagaatacgcggagaaactaaaaatctttttgaaaaaaataaggagaatattatggatataactagagcaatattagatggaattgcaatggctgctatctttaacggtgcagtggcagcttttgtactgattaacccgagatttttctttgattcctatccaaagaaaatacaaaattcggctccagaaaagatgacaaaagaagaaaaaagaataaatttaatacttacacttataattttaggaatcgtatttatatatggggtgacctctcttttacatacgggaataagaggacttagagatcttttctggatgagctatattcagtggttaatattaaacttgggagatttctttctattggatgtgcttttgttccaaggaaagtacaaggataagatagtaataccaggtacagaaggacatgaggactacgaatttggaaattggatgaaacatttggctattaaagaacattttatcttaactccatttttgataattccaatcgcatctatagtccaagcgtggctagtgattctacttggattataaaataaaattttaaaggtatgacgaaagttgtgacacaaaagaagttcgaaaaataacactttaaaaaatgtgactgatatacgataataataaataaaataaattttagcagctttctatcaaatcgatacttatgagatagttggcattgctccaaaaagaaaagatatatatgaattttttagaaaagatacttaaaaggttttaggtatcttttttatatgcgcggcacaaacattgtaagtagcgagctactatatgatgcacctaaaacgatttttatgaaagtcgtaagaagcgaggaactatataggacgttaagaacgatttttaccttaagttttataagcctcttgtaattaaaaaattagtaaaagcttgcgcaaaatttaatttacaaaaaaattttagtataagaaaagcttataggtgatccaaatcacatttataaaatattcttgcaaatattgaacctttggtatataattgaaactgtaaaagataataattttaaataggaggaataaaaatggcaaaagtttttaaaaccatggatggtaacacagctgctgcttatgtatcttatgcatttacagaagttgctgccatctacccaataactccttcatcgaatatggcggaagctgttgacagctggtctgctcacggtaaaacaaacatatttggcgaaagagttttagttcaagaaatgcaatctgaagcaggtgcagcaggtgctgttcacggctcattacaagcaggtgcattaactactacatatacagcttcacaaggtcttctacttatggttccaaatatgtacaagatcgctggtgaactacttccaggtgtattccacgtatcagctagagctatagcatcacacgctctaagcatatttggtgaccaccaagacgttatggcatgccgtcaaacaggctttgctatgttagcatcaggctcagttcaagaagttatggaccttgcaagtgttgctcacctttcagctattaaaggaagagtaccattcttacacttcttcgatggtttcagaacttctcacgaaattcaaaagatcgaagttatcgactatgaagatctaaagaaacttcttgacaaggacgctctaagaaagttcagagaaaacgctttgaacccagaacacccagtaacaagaggtactgctcaaaaccctgatatctacttccaagctgcagaagcatctaacaaacattacgaagacatagttgagattgctgctgactacatgaaggaactttctaagattacaggaagagagtacaaaccattcaactactatggagcagaagatgctgaagacatcatcatcgctatgggttctgtaactgatacagtagaagaaactgttgactacttaaacagtaacggcaagaaagttggtcttatcaaggttagactatatagaccattctctaagaaatacttcttcgatgtatatccaaagacagttaagagaattgctgttctagatagaactaaggaaaagggcgctctaggcgaaccactataccttgacgttaagtcaatgttctacgatgcagatactaagccacttatcgttggtggtagatatggtttaggttcaaaggatactactccttcacaaatcttatcagtatatgaaaacttagaatcatcaaaccctatcaatggcttcactattggtatcaatgatgacgttactcataaatcactagaaattaagaaaattataaatacagaaccagaaggaactatcaaatgtaagttctggggcttcggttcagacggtacagtaggtgctaacaagtcagctatcaagattatcggtgataacactgacctatatgcacaaggctactttgcttatgactctaagaagtcaggtggtgttacagtttctcacttaagattcggtaaatcacctatcaaatcaacataccttatcagtcatgcagactttataagctgttctaagcaatcatacatccacctatatgacttattagatggacttaaagatggcggaacattcttactaaactgcatctgggacgaaaaggaactagaagaaaacttgcctaacaagttaaaacgcgctattgctgaacaccatgctaagttctatacaataaacgcaactagaatcgctgaagaaatcggtctaggcggaagaactaacatgattatgcaagctgctttcttcaagttatctgaagtacttccacttgacgaagctatctctcacttaaaagactctatcgttaaatcatacggacgtaagggtgaaaaggtagttaacatgaactaccaagcagttgataagggtattgaagaattaaaagaaatcaaatatccagaaagctggaaagacttaaaagacgaaaaagaagaaaagaaagaaactactaaattctttgaagaagttgctgaagtaatgaacgctcaaaagggtgacactcttccagtatctaagtttataggtattgaagacggtacatttgaaaatggtacagctaagttcgaaaagagagctattgctgttaacctacctaagtggcacaaagaaaattgtatccaatgtaaccaatgttcatacatctgtccacatgctgtaattagaccaatactattaaatgctgatgaagctgctaaggctcctgcaacatttgaaacaattgaagctaaaggcaagggactagaaggactacaatatagaatgcaagtttcatcacttgactgtacaggctgcggtaactgcgctgacatctgtccagctaaggaaaaagcactagaaatggttcacttcgaagatattgcagaagtagaaaacgaaaactgggatttcgctatggacgaagtcgaagtaaaagacgacgttatggataaatttagcgttaagggatctcaattccaacaaccacttcttgaattctcaggcgcttgcgcaggttgcggtgaaactgcttatgctaaactaatcactcaactatatggcgacagaatgattattgcaaacgcaacaggttgttcatcaatttggggaggttcagctccatcaactccatactgcgtaaacaaatgcggtaagggacctgcatgggctaactcactattcgaagacaacgctgaatatggctacggttttgctctagctgatgaagttaacagaaacagaatcaaatctctaatggaaagctacatcgcactagacaagaaagatgctgaacttgaagaagcattcaaactttggttatcagatatgagagatgcaagagtaagcaaggaagcttatgctaagatggcaaacaaattagctaagaagactggagacgctcatcaagatgaaatacttgaacaaatcgatgaattaagagactacatgattaagaagtctgtttgggtatttggtggagacggttgggcttacgatataggcttcggcggacttgaccacgtactagcatcaggtaaagacatcaacgtattcgtattcgatacagaagtttattcaaatacaggtggacaatcatcaaaggctacaccaacagcagctgttgcaaaattcgctgcttctggtaagaagattagaaagaaagaccttggtctaatgatgacaagctatggctacgtatatgttgctcaaatcgctctaggcgctaacatgaaccaagcacttaaggcaatcaaagaagcagaagagtacgatggaccatcaatcatcatcgcttacgctccatgtatcaaccacggattaaaatgcggtatgggcaagagcgttaacagagaaaaacaagctgttgctgctggttattggcacctatacagattcgatccaagacttgaaaaagaaggaaagaatccattcgtattagattcaaaagatccaacagaatcattccaagaattcataggttctgaagtaagatacacatcacttcaaaaggacttccctgaagaagcagaaatcttgttcaaggctgctgaagaatcagctaaggagagacttgcaagctacaagagaatggctggcttagataaataatttaagtaaatatatttaatgagatgcgaggagaaatcttcgcatcttttttattgcattacatataagtatagcttataatatataaaaggaagtgaagagatgaaactaattaaagcaaataaaaaacataaagatatagtacttgcgtttaaaaagaaagtaattgaagctggggagagattttgcggcgtaagcggtcttgaaagacttgactttgatgattggcttgaaagaaatgacttgatagaaaacaaaagtacttgtccagagaatatagtacctgctatgcaatatatctatgtaaatgatgaagagggagaagttataggtatgatcaatctacgccttgaactaaatgattttttgatgaaatttggtgggcacataggctactcaatcgcgccagatgaaagacgtaaaggctatgccaagtcgatgcttaaagagggacttaagttttataaaaatcgcggctatgaaaaagttcttattacatgtgacgtaaataacattgcctccgctaagaccatagaagcctgtggcggtgagcttgagaatattataaaagaagatgaacttcactcaacaaagaggtattggataaagctttaattgggtatatatattttaaggagttgattatatgtatttactaagactatatagagactttgaccttgtctactcgataggcatgttcaaagaagaaaaagattacaaagaatttttaaaagcaatcccaagttgtaagccagaagaggatggatacaactacaggatatatcttaaagattttccagcacttttaaagttaaagttcaatgatgctgactttatattgtcaagagacttatttttaaatagagaatacctttatgttgacgtagaagagtaccccgtgcttaatgaatataagggcatctatgacaagtatcaagtgataggcggctatgccatcggtacagatgaactcgaagactacgtgacaagacgtaacaagaagctcgaccttgtttttaagatacttaaggacatgggtgttgaagccttcagagactactcagactctgaagatggagagtgcattatacttaagaaggactcaagcatactatttgaactagacccatcattcaatgaagaccttccggacgatgaagaaggactaagaaaagctatcgaagaagaacttaataataagtaaatgtatcataagatctaaggcgtacttagatcttttttactactcaaagctcattgataaggcgttaataattgtgattaaaatgcttgacaattacgcttgaatctaatataatgactatattaatatatatgtaaggggagagatgtatggccaaagaacaatacttaacagaagagggtttaaaacaaaaggaagaagagctcgagtatcttaagacggttgcaagaaaagaagttgcagagaagatcaagatcgctcttggctacggagacttaagtgaaaacgctgaatatgatcaagcaaaaaacgatcaagcagcacttgaagagaagatagctaaattagaaaacatacttagaaacgcagtgcttatagacgaagcaggtgaatcagacaataagacagttaaggtaggctcgaatgttaggttcaaggacatggatacagatgaattcttagaatatcaaatcgttggtgttgtagaagcagatccatttaacggcaagatctcaaatgaaagccctgtcggaagagccatgataggcaaaaaaagaaaccaagttgttgaagtagaagcaccatcaggtttgaagaaatataaaataacaaagatatcataggagttgaaagatgcaaaacacagatttaaatgaaatgctacaaattcgtagacaaaagttaaaagaattacaagatcaaggcaagaacccatttacaattgaaaagtttaatcctgatcatcacacaacagatattactgataactttgaagaatttgaaggcaaagaagttacattagctggcagaattatgtctaagagaggccacggtaaaatctcttttatggacatacaagatatgaaaggaagaatacaaatcctttctaaaatcgacgaattaggcgaagaagcctacaagattatctcatacttagacatgggagacatcgttggcgttgaaggcgaagtttttaaaacacaatcaggagaaattagtattaaagctaaaaagcttacattactttccaaatccttacaaatactacctgaaaagtggcacggactaaaagaccctgaccttagatatagacaaagatacgttgacctaatcgttaacccagaagtaaaagaaacattcttattaagaaataaaatcataaaaaagattagagaattcttagacaatttaggctacttagaagtagaaacacctatacttggtaatattgctggtggtgcaaacgcaagaccattcttaacacatcataacgcactaaacatcgatatgtcattaagaatagcgaacgaactttatctaaagagacttattgtcggtggtttcgacaaagtttatgaaatgggtaagatgttcagaaacgaaggtatggacacaagacacaatccagagtttactaatatcgagctatacgaagcatatgctgactataacgatatgatggaaataactgaaaatcttgttgcttatgtagctaaagaagttttgggaactacaaaagttgagtatcaaggcaaaactattgattttactccaccatggaaaagaatcaagatgcaagatgcagttaaagagcacacaggtgttgactttgataagataaatacagatgaagaagctatcgaagtagctaaagaacataaattagagataaaacctggcatgactagaggacacgttattagcgaaatgttcgaagaatactgtgaacaatatatggatcagccaacatttatcattggccacccagtagaaatttctccattagcaaagagaaatccagatgacacaagaattactaacagattcgaagcctttgctaattgctgggaaattgcaaacgcattctcagaattaaacgatccaattgatcaaagagaaagatttgaagagcaattaagacaaaaagaatatggcgacgatgaagctcacccaatggacgaagacttcttaaacgctatcgaggttggtcttccaccaacaggcggacttggtataggcgtagatagacttatcatactattaacaaaccaagcatccatcagagacgtaatcttcttcccaacaatgaagcctttaggcttagaaaaggcagaaaatagggattcgtcaaaagaaacttacgaaacttacgacaaacttacgacagaagaaatcgacttttcaaaagtaaaagtagagccattatttgaagatatggttgattttgatacattctcaaaatctgattttagagttgtaaaagttaagaactgcgaagaagttccaaagtctaaaaaactattgaaatttacattagatgatggttctgaaaaagaaagagttattttatctggtattaaggaatattacagcgcagagagcttaattggaaagacactacttgcgatttgtaatcttcctcctcgtaagatgatgggaatcgactcagaaggtatgattatatctgcaatttgtgagtacgacggagaagaaaaacttaacttaataatgttggatgataatattccagcaggatcaaaattatattaaaagaacacgctaattatgaaactggggtttgttatgaatcccagtttaatttttatattaagtttgacactacgttattaaacgtagtttctgctctagatctatataacacatcagaaacaagatcaaatcaaaaatcttttggtctaaattatcaaaaaactggcaaggaactaatgagccaagatgaaataactgtaatggatggcggtaagtgtatataccagctaagaggagtaagacctttcttatcagataagtttgatattacgaagcataagaattacaagttgttggaagattatgataagaaaaacttgtttgatgtggaagagtatttaacaaatagagataaaataaaaataaacagaaacagtttgattacaagattatgaattaagcctaggataaaaatatttttggtataatatctatatataaaccatggaggtaggcatatgaggtcttatgaaagtaaggaagaattaaagaatgagataaagaaaacttttgaaaaatatatttcagagtttgacaatataccagaagagctaaaagataaaagactagatgaagttgataggacaccagcagaaaatattgcctatcaagtaggttggacaactttacttttaaaatgggaagaagatgagaaaaaaggactagaagtcaaaacaccatcagataatttcaaatggaatcaacttggagaattatataagtggttcacagatacctatgcccataaatcgctatatgaactgaaagaacaactcacaaaaaatatagaagatatatatcttttgatagatgaattaacagataaagaattatttaaaccacatatgagaaaatgggcagatgaagcaacaaaaacggctatttgggaagtgtataaatttatccatgtaaacacagtggcaccatttggaacgtttagaactaagattagaaaatggaaaaagttagttgtttaaataaaatttatttagaattataattaaaaaacttttgacaaataagttttggggcaattaacataataattgtaacttatttgaatagataagtttagtaagatatttgatgtggagaaagtaaatatgtttgagcaaataaaagttttttttatgaaaatttggaacgaattaataataacaattattgtagggttttttattaggagtttgaaaaagtcgaaagagcttgttaaaccgaccattaacgaattacttaataatattgattacaatagcaaaaattggaaggaagaaatagataaagtgttagaaattaaaactactgttgagagacattttccagaatataaagattaccttttgatacaatatggttcatcagttattcctgacaataaacttccaagtgattatgattttatagttttgttattaggataccaaattgaaggaaatagatatatgcataataaaggaactataagtgatgaatcgaatgaagcaaacaaggatcaagttgatatcgtttttagagattatttatcttttttatttgcggcttcagctggtatgccatatgaaaacagcgtgatatataatggtaagttagtaaaaggacatcaaggatattttcaatggctaaaaaatataacgaaaaacattttgtttgataaagattttttaattaggaggtttaaagagaagataatagcagaaaaacaagagtttcataaatgtttgaaagaatgtgaagaatttgggcatgatgaatattacgttataagagcgggatattactatataacttcaattttgcaactcagaaggattcaaaattttgagaaagttattactcaaaaccaagttattgaactttcaaaagtcagaagtttttatgaagatattttagatgataatatcagaaataaatatgaacatttagttgaaaatttaaaacgtaataatacattaaatttaataagcattgatgatataaaagaagtcttactatatattggtgaagaatatgataaaaataaatagaatatttaatagaaaaaataaaaatataagtatattttctgaaagcactttaaagacaagtttttatgaagaacttcaaaaaaatgaatggtgtaatgttattgatgataaaccagataacttaatggaactgataaaaataaaaattaataagaatcgaaaagtatagatatatttgtaatataagatttaaaatatggcgatagaaattaaaaactctatcgtcttttttatactcaaagttaggaggttaaaatggtaaggatatgaagtctcacttaaaaaatttaatatataatatatttagcgattgaattaaaaggtcagtcgttttttaattgaaatttatagattaaggagaagaaattaatggatagagaaaaagaggaatagtatagcacataactataaaccattatggatacagttagcaaagaggactaaaaaaacagatgtaatagccatggcaagacttacaacaaatgttatagcacaaatgggcaaggataaaccaattacaatgaaaaacatagaaaagatatgtaaggctctatcttgcactcctaatgatattattagttttgaagatgaattgaaagatagatttaaaacggaacagatatgtattaaaatataaaaattatcatttaaaacggtaaaaacacttgactattttttaaacttgtgatatactcaaagcgaaaataatcaaacatacaaaaataaaaaaacaaacgaaactgcaatttacataggaggtaatatagttggaattttcagatggtgaactactagtaatggaagagttgtggaagggcgatgtcttagacgaaaatggagaaatccaagctcttgccttatcaaaaatattgatggaaaagtacgatataagtaaaacatcttgctacaccttttttggaagattagtagaaaaaagggcgatagctaggaggtatcctaaatatacaattagggttcttgtatcaagagaggatgctcttttgaataagcaaaaagaagcctttcataaacttttcaaaggatcacttttaaatatttgcaaaacgtttttacaaaatgagaaggtcacaaaagaagaaatagaagaaatgaaaaaattaatagatagctttgacgaagaggaccaagaggaagacaaggatggcaataagtctaactagtgtttttatactcgaaaaatctatcaaaagtcttttcttattagctataattttcctagttagaccaatattaaataagaaagccttcaagtcagcaagtattgttttgtggatagttttattaatctacttaataagtccctatgaacttgaaataggaatagaaaatgtaaaggaaaattctatcttacttgctataacaaatttttttgagcattcccttggatggttagtaaataaaataggctctatattttttaaactaaatcgactaataggttcggttttgatttttacttatctcgtaataaaaatttataaattccatacagtaatgaaaggctctacccttacccaaaatactttatgtaagaaaaaaataagagaatttggactaaaaagaaaagtagagatttatataaataacaatttaaaaacaccccttacctttggcattttaagacccaagataatcttacaagatcatatcttagctgatgaaaaattactagaccatgttttgatccatgaactaatgcacataaagaaatttcatatcctacttaaccacctgataaacattgtagcctgcctatattggttcaatccactcttgtggctaagcttaaaatacctagaccaagacattgaaataaactgcgataagctagtggttgaaaacttagtcgacacaagaaaaaatagaaaagcttattgctcatcaatgctaaaactagtggaaagagaattttatgaaaacaacctatatttaaaattaaatcctaatatagaaagaattaagataataaaaatatggaggaaaactcttttgggacttataagttttatccttgcccttactttttctttgccagcctttgccaatgtgattgacctaagccaagatagggttgaagttctaggccaagagctaaataattttgagattaataatgggggaagagttgaaataataagtgatgaagaatatcagaaattagaattaggaaggttatcgagtagacaatctgacacagcaaaggtcaatgaaaaaataaagttaggaagatttgaaaacacctcctatgattttgagtttgttgatgataagaacgaaggttttatcataaatttaaaaaatatgtcttgctctggaggagtagaattttcagtaattatagaagaagatggggaaataatttataagagaagatttgccgcagactctacattaaaagttaagacacaaaaaggaagtgcttatattgtcactgtttgtaatgagtctaataaaaatttatcgggacaagtaaatataaattcttatacaagataagagaggattatatgataatttcaaaagaaaaaatatttgagttgatgctagtattattttttatgattaatttaagctcttgtttaaattctaatgataaaactataaacaaagaaaaagatgaaatctctttgacagttaatatttatgatgaaaaacaagaaacttttaaagaattagtcacaacccaagaccaacaaaggaaaattttagaacagctgaatgaattgaagaaagattctagtttatatgattcaaaaaatcaatatctaggattggataatgcctattctgaaggaacatatttaattaaagtacatgataataaggaatatgagatagaaataggagatgacagttcccttagtacagataataaatattggtacaatataaaatcgaaaaataaggataaagaggggatatacaaaacttcttataatttgaaagaaagaatagatcaattatatttgaggaagacaaatagttaaacaaagttatatgaggaggtaagaaatgaaaagaagatttactctattaatagccatggtgatgctgttaacagcaatggcaacaaatgtatttgcttcatcagcaaataataactcaaaagtcagccctaaagaatggcaagaatggtttaatggtctaagtaaagaggaacaattaagtgtaaactatgagccaagtcaagttataaaagcacttagtgctaatgaagtttcaaaagttaatattgacgacaaatatgaaaccaaaacctttttgacagaactacagaacctatatccgaccatggaaaaaaagtctataaatcaatatatatcatcttatattgagattttcaatatgtacaggggtatgtatccaaatctttcaaataaggctatcgcagaaaaagcaaaagcgaatatgttgaataagatagagtatatgattgatgattcaaagtatgaagctaaggatattataatccgctcagctaaagaacctgatgggtatgaagccattgtcgactatataaataaaaatctcaagcctaattactacgctactttggacacgacagaagaaaatataaatattctaaaaagacatattaatagtttaccaaacgaagtcaaagaatcagcattgttatatattgaagatatggaatcaggagataatttcgacgaaataattgctaaaaaatgtttttcaagtaagacttttttagtagaatctagagataagaaaggatccacgcattttcaaatccgcttgttaaaaggaagtgtagctacttttgctagagaaaaatggaaaaaaggtgatacagtagtcattaagttaaagtctttaaaaggaaatgatttagaagtaggtattttgcctgccgaagacattaacgctggctggggctataatgattatggtgctcctataaaaaaggtagaaaacccagaagatgatgtaaaatttactattccgaatgatggagaatatggaatttacgttaaagatatgaaatcaaatgctttttcttttctagaattatttaggggaaaagaaatagtatctacaaagtcgggagggaaaaaatcagcaaaagatcataaacatgaattaaataatcataattgtattgaatttgagttagaagtaaataagaaatttatcaatcctttaactaaaacagaaagattgaaataaaattattaaagaggaaataattaagaaatcaattagtttaactatggctttaatgctgttattggcaatggtaatgccaacttctagttttgcgatggctaaagaaaaaaaacaccgcaagtagaatacaagatttagaaactccgatagttgaggattttgatggttttatgattgtgccttatgccaatcatttggtagtggatagcgagagtattggtaatagtggaatatcgtgggattaaccaaagaactataacgcatatcgtgaaacctttaggtttatcgcaacatagacatgggaaaaaagtaggtatatcaaggacgggtataaacaaaatagaaactgggaaaacaattccgagtcttaaaactgctaacgatatagcaaatgctttaggggtttgtaaatatcagatttttgacttggacggagaagaaacatataaatgtcatagtcgtaattgttgttaggaattatatgactatatttagttagtaaaatggaggtggtgtaaatgaacttaaaagttgtatcaaaagttatcggttctttaattcctgctattatcgggacatatttgttagttaaagattatatagcagcagcaaatcatcctgaatggagtgtttcgccaatggtaatgtgggtgaaatttggcgtaggtttgattgttagtatcatcttgctctttgttgtttttagacgaaagaattaaacagtttttgtgttttaaaataatacaaatagaaaaaataaagttaaaagctatattatagcgtagcgactaagattgcactcttagtcgctttttatttgatatataaatgaaaggaaacaagaaaatgagaaaattacaacaaataagacaagagtcaaaagaaataaaagataaaattgacgatacagaagaaagattaaggcgactaaaaaatcaagaaaagaagatattaaaacaagacatagtaaaaagaagaaaagaaagaactcataggctcataacaagaggagcaattttagaaagctttatagaaaatgcagaagaactaacagatgaagaaataaaaaacctactagaagaagcaacaaagacaaaagaatttaaagaaacactaaaaataatgagagaaaattagggaagatataataattaaatctcccttagattttctaagggcgcaattatacaccctaaagagtgcttgcgtgcctttagagccaaacccttgcagggagcaacaactattcgctttgggcctgcccagccaattttctccaacgaaaatttatttgagttgtagagataattaggcgagggtattaaaagtcaatggtaaataaactcgctaaggctcgcccttgacttttaaaatttgaaatgaacaaaacaattaagccgacatactgaaacaacaaaaattaatttagtagtcggtttttttaattctatcagggtctgcccctgccaatcattcaccacgagcttgcaagtggattgaatgattaggcaaagggtatttcaaaacgctcattcacaaagtggatatagaaaattttctaagcctccacctaaaacaacaaagaaaggaagtgataaaaataccctccttactggtttgtccagtaaagaaggtacacatcaaatagattctgtcgtctttttaaatttaattaaagacctagtgagtgtattttaattattttaataaaagcaagtcaaattattgtttttgaaaaaaatgtgatataatattttatgagagattaacttggaggcacttatgataagagataaatataaaaagaatttttttaagattttattgttatttataacaggaataatcgtaggtagtttaagtatatttcccatggttttcattcaaaaggtgattgactacttaacattgggtgtacaaagtgaatttgtaaaatacatagtactttattcgcttatttatatcttggtaaatatgtttaagatagcccttgttaattttggctcgaaatttgaattaaatttgaatagagagataaaggatgagattgttgaaagcatacttagtacaaagattgaacaattagagcaagctggacgcagcaacgtcttcaatgtgattattgatgatttaaaatcgcttgatgataaactaataccgctaatatttgatttaggcttttcaatatcaagctttgtaattggttccattataattataaattacgattacatcatgctatttgcgatgattatcatatctgccatatcgacagtagtgattcaaaagattttacagagctcagagctagcatctgaaaagagtcaaatacaaagacttaacgttataaataaattttttgatatcattgttggagcgagagacataaaactatttaacaaagagaaagtttttacaagcgagtttcacgaagaaaatcatgatttaactaagcttgataaaaaaatcgtaaacatcaaaaatgtttctcaagcacttgtaagtttactgtttaatttgattatggcgactctaatttttatcggaggtatgcgtgttagtcaaggtagtctctctgtcggagcgctaatcgccataatattgtatgcatcgatgattactgatccaatatttaatatcatagaaaatcaaaaagaaatatccgcttttaaaaattctgttaagagaatagacgagacttttaaaaatatagagagagaaaatattaatttaatcgaagattttaatacaattgaatttagagacgtttcgttaaattatggagacaatcatattctaaatgattttaatttaatcataaataaaaaggataaattgaaaataaatggcagaactggctctggcaagtcgactattgcaaaactaattactaatatgtacaagccaagctcgggtaatgtttatgtcgatggtaaagaaaatcaaacaatatccttatcagcagtttttcaagagaacaaattgtttaacatgtcaattattgataacatcacattcaagtccaaagtagacgaggataagcttagtaaaatcactaagatatgtagattagatgaagttattgaaaaatatgggaaaaacaatataggttttgatagcagcacattatcaggtggcgaaaagacgagagtactattagcaagagtcttatataaagattgcgaactatatatctttgatgagataagcacaggactagacgaagcgcttttctatgagatatttgatgacattatgaaatatttagcgtcaaagacaattattacaatcgaccacaaatatatatgcgaaaattatttcacaaaaagcatctccatataataatatttaaaatatgaaaagaaaaattaaaaaatggataagaaatgcaaatcttatccattttttaattaagagagttttatcctaaacatatggatttatctaagacaaacgaaaaagaagttcaagatgtccttaaacttctcaataacaggccaagaaaatgtattagctataaaacacatcaagagttatttgatgagtatttatgtgaatgttgcacttgatttgacaaattatcgtaaaaaatggtacaatattacgaatgttgagtaaaacaaatttgaatttgtggaggaatagggatatgaatttagatgaattaagaaacgatattatcattaaacagaaaaaaggattaccatttattattacatctgttgtaatttggttgtttattactgttgttgcggcattacaaattgatattatgctaaaaaatatattggttttttgttgctcaacgcctttactcccactggcatggaagcttgggaagaaaatgggtgtagatatattttcaaaagcaaatgaattgggcagtttaggtcttttgtttacaatgaatcaggttatatatctactaattgtaatgtgggtatttaatgccgttccggataaaatgattatggtatatgcgatggtttttggagcccatttattaccatattcatggttatataaatcaaaatcatatcggattttcgcagtgattattccagtattggcacttgttttaggaaatatgtttaatggatttgttgtatctggaacattagcaattgtggagattatcttcgcgataagcttgtataatgaatttaaaatttttatgaaacgacaggcataaatcctagtttgttgaatttagcaaactataagtttttatgagattaaacctataaatcttgtacggatattgtggggcaggaaaagaaatcttcctctataataaaataaactgacggaaagggggaatcgaagtgcatattatcaagtcgtttaacaatacgattgattatcttgaaacagttctcgatgatgagattgacgaaaagaaagtaactcatttatcaggatattcttattcaatgttcagtcgcttgttttctattctgaccgaaacaacactctcagaatatttaagaagcagaagattgactgaagcagccgttattttaagagatacagacgaaaagattattgatgttgccttcaaatttggatatgagtcatcggattcatttggaacagcttttaagaattttcatggatttactccttcagaggtgagaaatgggaaaccgttcaaattagtttcacgagtgcaattagcactaagtgtaagaggaggaagaagtatgaatgttacaattcaaaagaaaaaagcatttacagttgcaggggtaaatgaacaaaacatcagttcatcgctatgtccgagtatctgggataagctaaatgaaaaatatagccacgatgaacttgcagatttgggaagtggtcaaagtgtaggtgtttgccatgatgtggaaaatccaagtacaataaactatatggcaggctatgttgttactgatgaagacaaagcaagaagcatgggcttagatgttttgaaagttgaagaagcggagtatgctgttgtagagttaataggaagtgttccggattgcattcataacgggtggaaatatgtgatggaagtattcttccctgagcatggctatgtccattcaggaaaacccgactttgaatattattacgaaggggatatggatagcaaagactataaaatggaactttggattccgataactaaagcttaaaacaccagtttgtcaagataaaataattaaataaaaacaatagaatagcaacttacgaaagcagtaaatcgaaaaaggttcactgttttttctttgtctataagtggaaaggagaactatggaagaagaaaaaagagaaataaaagcaccgtctaataatgatgtgcacccagaaaactggacatatcatgacttgcaccagtcttttaatatgtctaaaataaatttttatcttttataacgcatcatgtaatcatacaaaattattgatgtcgcaatcgaaacatttaagctgtcacaatcaccacgcataggtatcttaatcatctcataacgcttttcgtaccaaggaagcgatatgccatatttttcgctgccaatcacaaagcacgccttatccttatattcagtatccatgtatatggctttggcatcagtatcagttaagtaaatggtatagccattatccattagataagaataaagttcatcgaaatttgtatcaataatattcatattaagaaagcttccaagagaggaacgaacaagtttcgggtgattgattctgaccttcctattgataaaaacaacgtcgtagatggcaagagcatcaagcgtcctaagtatagttccaatattgccatggatttcaagaccgtcaagcacaacaagaggttttgactgatcgatgcactcaaacctaccttcattcataaaaaagaccgtgatgataccttgagggttcttctcctcacttaagaagtcataagtcttcttcgaaacaaagaaaagctttgcgcccttatcataagaagagttaataagactttgtgcttcagcagtcattatgtaatcagggcagacaaccaagtagttgatcttcttgttgtattttaaaattaaattcaatccccaaacaccctcaagagcaatttcatttaatggatttgcacgagagtttttatttagtttaataagactaagaatctcaggatgctttttcgaagcctcaatgtatttacctttaaagttatcctttattgtaaaaagtctttcttcatcactcatagaattcaaatcaataaatttcatataatcaccaagaaaattatagcataagcagatataaaaatcaatttaagcatatgactaagaaaatagtgtaaagaggaaagcttgacaacaatatggagtggtaagatacagatgggttaaaaataattcaaaaataaataaaaaacttttaaaaagtacttgacaaagataaaaataaatggtagaatggataagtcatctggaaagaccagagggcaagcaaaactgaataaaagtgaaaagaacgatttaaaccaatcaatttttattgataagtaatttcgaatttaagagccaaggttaacttgggattaaataaaccatttaatcgagagtttgatcctggctcaggacgaacgctggcggcgtgcttaacacatgcaagtcgaacgatgaaagagaatccgatctcttcggagtgaagaatctctggattagtggcggacgggtgagtaacgcgtgagcaatctgccttacacaaagggatagcctcgggaaaccgggattaataccatatgatatcacatcttcgcatgaagaagtgattaaagaatttcggtgtaagatgagctcgcgtcccattaattagttggtgagggtaacggcccaccaagatagcgatgggtagccgatctaagaggatgaccggccacattggaactgagaaacggtccaaactcctacgggaggcagcagtggggaatattgcacaatgggggaaaccctgatgcagcgacgccgcgtgagcgatgaaggctttcgagtcgtaaagctctgtcctatgggaagataatgacggtaccatagaagaaagccccggctaattacgtgccagcagccgcggtaatacgtaaggggcgagcgttgtccggaattattgggcgtaaagagtgcgtaggcggcaaattaagtcagatgtgaaaactaagggctcaacccatagattgcatctgaaactgacatgcttgagtcaaggagaggaaagtggaattcctagtgtagcggtggaatgcgtagatattaggaggaataccggtggcgaaggcgactttctggacttgtactgacgctgaggcacgaaagcgtggggagcaaacaggattagataccctggtagtccacgccgtaaacgatgagtgctaggtgtctgctcataagagtaggtgccgtacgttaacacaataagcactccgcctggggagtacgtacgcaagtatgaaactcaaaggaattgacggggacccgcacaagcagcggagcatgtggtttaattcgaggctacgcgaagaaccttaccaggacttgacataccaaggaaagtttttagagataaaaaccctagatttatctaccttggatacaggtggtgcatggttgtcgtcagctcgtgtcgtgagatgttgggttaagtcccgcaacgagcgcaacccttacatttagttactaacaggtcaagctgaggactctagatggactgccgatgacaaatcggaggaaggtggggatgacgtcaaatcatcatgccctttatgtcctgggctacacacgtgctacaatggtcggtacaaagagaagcgaaatagcgatatcaagcaaacctcaaaaaaccgatcccagttcggattgatctctgcaactcgagatcatgaagccggagttgctagtaatcgcagatcagaatgctgcggtgaatgcgttcccgggtcttgtacacaccgcccgtcacaccatgggagtaggcaatacccgaagcctgtgagctaaccgtaaggaggcagcagtcgaaggtagggtcaatgactggggtgaagtcgtaacaaggtagccgtatcggaaggtgcggctggatcacctcctttctaaggagaacattagttcttttcacttttgggttctgcttaaaaaataaatattttatggacctgtagctcaggtggttagagcgcacgcctgataagcgtgaggtcggtggttcgagtccacccaggtccaccatagaaaccttgacaaggtatattttttatgatatactatatcagctaaacattatggatcttgaagaacttaaaaaaggtgcaaatccttttagatccaaaaaccaaataaaacttaataaccataatcaaatgaaaacgaaacgacatttataaagaaaataaatacagtaaattttaacaataagcgttaaaggattttaaaaaaatgaattaggtcaagttactaagagcgcagggcggatgccttggcaccaagaggcgaagaaggacgtagaaagctgcgaaaagctccctagatctgcaaacaagaaacgaaagggagatatccgaatggggcaacccacttaagcaaaccttaagtatctatatatgaataaaatagtatatagaggcaataccgggagaactgaaacatctaagtaccccgaggaaaagaaagaaacatcgattttcaaagtagcggcgagcgaaatggaaagagcccgcttaaagaaatactaaaacaatatccgaatgatcttggaaaaatcatccatagaaagtgaaagacttgtaagagaagatattagaatttcaataagctatacgagtaccacaaggcacgagaaacctggtgggaatacgggaggaccacctcccaaggctaaatactacttggtgaccgatagagaacagtaccgtgagggaaaggtaaaaagaaccccgaaaggggagtgaaatagaacctgaaaccctgcgtttacaagcaaagaaagcacgtgaaaagtgcaatcttgtactttttgtagaacgggccagcgagttacttttgtaagcgaggttaagaagttaagcttcgaagccgaagagaaatcaagtcttaatagggcgaaatagtttacaggagtagacccgaaaccaggtgacctatccatgagcagagtgaagttaaagtaaaatttaatggaggctcgaaccgggtgtggtttaaaacacatcggatgacttgtggataggggtgaaaagccaatcgaacctggagatagctggttctcctcgaaatagctttagggctagcctttaggatgtttaatggaggtagagctactgactggttgcggggtgtttatacattaccaaaacctatcaaactccgaatgccaagaaaacaaacctaaggagtcagacatagtgggataagcttctatgtcaaaagggaaagagcccagaccatcagctaaggtccccaaataccgattaagtggtaaaggatgtgaagttacccaaacaactaggatgttggcttagaagcagccatacatttaaagagtgcgtaatagctcactagtcgagtgaccttgcgccgaagatttccggggctaaatcggataccgaagctgtggactcaacttgagtggtagaggagcattgtgtaataggctgaagcagtatcgaaaggcgctgtggacgaaacacaagagagaatgctggcataagtagcgagaaggagtgtgagaatcactcccgtcgaaaacctaaggattcctgagcaaggctcgtcccctcagggtaagtcgggacctaaggccaggcctaaaggcgtagccgatggacaactagtaaaaattctagtactatcaaatatcgtataaatgaagcggggacacagaaggataagctaagcgtaccagatggaagagtacgctcaaataaaaaggcatgccaggactaataaccaggctaagctgatttatgatgaggatcgaaacaaagtagagaagtagccgatttcacactgtcaagaaaagccgctaaatagataaatgatacccgtaccgtaaaccgacacaggtaggaaaggagagaatcctaagacgcgcggaagaacctttgttaaggaactcggcaaaatgaccccgtaagttagcgagaaggggagccagagcgatctggccgcagtgaataggcccaagcgactgtttaccaaaaacacaagtttctgctaagtcgaaagacgacgtataggagctgacacctgcccggtgctggaaggttaaggggaaatgttagcgtaagcgaagcatagaacttaagccccagtaaacggcggccgtaactataacggtcctaaggtagcgaaattccttgtcgggtaagttccgacccgcacgaaaggtgtaacgatttgggcactgtctcaacaaaggatccggtgaaattgaagtaatggtaaagatgccatttacccgcgacaggacggaaagaccccatggagctttactgtaggctgacattggatttcggtagtacatgtacagaataggtgggaggcaaagatcctggtacgccagtatcagaggagccgaaaagtgggataccactcctgtagtgctggaattctaaccttgagccgtaaaccggtttagggacactgtcagttgggcagtttgactggggcggtcgcctcccaaacagtaacggaggcgttcaaaggttccctcagcacggacggaaatcgtgcaaagagtacaaaggcagaagggagcttaactgcgagataaacagatcgagcagatgagaaatcaggacttagtgatccggtggtaccacgtggaagggccatcgctcaacggataaaagctaccctggggataacaggcttatctcccccaagagttcatatcgacggggaggtttggcacctcgatgtcggctcgtctcatcctggggctgaagtaggtcccaagggttgggctgttcgcccattaaagaggcacgcgagctgggttcagaacgtcgcgagacagttcggtccctatccgtcgtgggcgtaggaaatttgaaaggagctgtccttagtacgagaggaccgggatggacaaaccaatggtttatgagttgtaacgccagttgcatagctcagtagctacgtttggaaaggataagagctgaaagcatctaagcacgaagccccccttaagataagatttcctttaagtaagacaccttgaagaccacaaggtagataggcagtaagtgtaagagtagtaatactttaagcctaactgtactaatatgtcgaaaacttgatcaaaagacgcttgttggaagaattatggttattaagaaatgtggcagcaatagcaagagggaaacacccgttaccataccgaacacggaagttaaggctcttaacgctgaaggtacttggttggagacgacctgggataataggtagccgccacttgaacaaaaagacagttcgttagaactgtcttttttaatcttatcagaattgcgcatggaacttgttcgctttgtcggcaatgctcgaatacctgcagtatgctccgcttgtctcaaactgccacttcgcttaattcatcgtagcgtaaaggttcttgtccatttattgacaaggttcttcttttatcagcgaaatattagttgtgcttagtacattctgtttgccaaaaacttccacttcgcttaattcatcgtagcgtaaaggttcacgttcatttatggacggggttcttcttttgctgaaagatttcatatgcgataaatatacatatgcgccttatttataatagctcaaaggatttttatgataagtcgtaatatatattactgtataaagaaaggagtaataaatgttttacaacactgatgatttaaaagacaatgaaatatatttacatcttagaaagacatgcgatgcacagcctgagaaacagtggctgcctgcatactactacgacatttgcttattaaatggtactaaggtaggtgcatgcgacttaagaattgggcataattcaaatacatacattggaggcaacatcggttatgctgttgacgaaccttacagaggccatcactatgctatgaaggcgtgtaagctattgttcactttagctaaaaagcatgagatggattatttgataattgcttgcaaacctgataacataccttcgtatcgtacttgtgaacttcttggcggagaacttatagaagtaaaagatgttcctctagatcatgatttgcgtaaacagggatatactaatgttaatatatataggtttgatttaaatattttgtagtatattatattcaataagagagtataaaaaaatccacccatttacttgggtggattttttctatctagatatattatttatttttgtttttataaattatttttagtttttttagttcttgctgcatttttatatttctaaatattttacttactgaggatgcaatcatcagtcctactgctatggcgattgccataaacaaggcttgtataccttctgttgcgccgctcttaaggtcgtctgtaatgaagtagttcattgactgatatatcttaaggccaggaactagtggtattacgcctataatgaagtagcaattgactggtgttttttgccatcttgcaaagaattcgcctaagatgccgcatagtagtgagcatagtagtgaagagaatatatagttaaacttgtttgctgtcaaaaccatgtacaaggtccagcatatcgcaccgttgattgcacataggaagatatttttcttttgtatattaaatagcacggatatagttgcgcatgatatgcttgcaagcacaaattgttttattacgtagttcattatattcctccaattagtgacataaagactagcacgctaccaacaccaaaggcgatggctactgctacaaagactgcctcgaagcttcttgctatgcctgagatcaagtcgccacttaagaagtctctaatacctgatgtaaaggcaactcctggaactagtggaagtatggaaccaacaactatcatattaaggttgtgtcctaaatgtagtttaatcaaaagcactgcggcaaatgttgctactaaagaggatataaagtttcctaaaaatggtgtctttgaaagctttagtatatactcattaataacgaagcctagggctgatgtaaatattgagcataaaaagtcatttgtgctaccgccaagcattagtgtaaacatagcgcagcctatgcaagccatcagtagtatagttaagaagctatattcactgctgcctgcaatctcatcaagtctttgcattgcttctgcgacctctattttctttgcgcagaaatctcttgagaaagcattaatcatattaactctgccaatattgttacctcttgtttctatatttttaacgaggtagaatgaggagttattgctactgtctccgattatgattactgtaggtgaaaggaacagtggtatgtcaaagaagccgtagcttgagagtatccttttaacagtatcgtttgcccttgaaacttccgagccgtttttaagtagcaattcagcagttcttagggcgatattataaatttcttttctattgttatcgttgatattttctattacattttccattgaatcaccaagtatattataatatatttttgtacaaatgtcacttattttgagtaaattctttattaaattacttttaagtgttataattttataaagaggtagacatgagaaggaagtattcattttttgcgtgtattatggtcttagctgccatatacacttattatttcaatatcaatagttacattttagcaagccttggcatcatattaggggtgagtttcttcactaataagcgtgttaggctttatctcattttatctgtggcagttttttcactaactgccttgtacacaagctatagaggacgcagcatttttaaaaaatataagaatgaaaggcatgagtatgtattacgagttgagaacgttaaggagtacgagggctactcaacgtttattgcttctgttaaaaatatacatggcaatgttttcaatgaaaaattaaaggcctactacagcggcaaggctcatttggagaactttgacacgattatagttagctctaagcttgaagatatacgtataaatgcaaatccaaacttgttcaacgagaagatgtattatttaacaaagaacatcaagtacaagataaagtttaatgacttcgaaaaggctaagtggaagatctcttttgcagagaaattaaacatctcctttgaaaagaagctggatgcacttacaaaaaacactatgaaggaaagcaacgcaaactttctcaatgccatatttatgtcgaacacgaaatttttggatgaggatgagcttggaacataccgctcggtaggtcttgggcacctacttgcggtttcaggactgcatgtatcactcataagctttgcaatcatttttatacttatcacttttggcttaagcaagagaagggcgagctctatatgcataatttttcttctgatttatggcgcgcttatagcttatccagtatccttccttagagcaatgatactttttatcgcgcttgacctagcctttgtctacgacataagcatagagcgagcccaaatcatctccatcgctttaatgataacacttttaatcaatccatactatgtattttcggtctccatgctactttcatatggtgcagcttacgctatagaacttttgtttagaagatttaaaaagcttatagacaagaaaaataaaatgcaggaagcgcttctttttgtgctagcaataaatttagttcttgctccaattcagctatacacatttcacgagtttaactttatctcgctgatcacaaatttattattgctgccaatttactcaggtatcatcacaataagctttgtagtattgctagcctcgctactaataagtccacttgccatcatatttaggattgtagactatgtacttagctctttatatgaggtcttgctcttaataagcaaaattgacattttaaaaatcagtctttacaatcaagatgcactgatattcgcatatttcatagtcttaatcggcttttatctaataaataatttcagctatatgaaggcaaagcttataaggtttatgcttatgatgatggctgtgatctcaatatcaggaagctttgtatatatgcaaggccaaaggcattatgacacgctaaatatgattagcataggccaagaggaagcgatgcttctagacattgctggaaagaagataatggttgatgttgcaggtgacattatgggtacgtcattttcttatgacagaacgcttaaagatgttttgaagaactatggaattcatactttagacatgatatttatctcgcactttgacaaagaccactacggcaaccttgtatatctgctagatgattttaaagtaaagaaaatttgcttttacaaagacattgcgacagaggatgtgaagcaaaaacttatagaaaagggagtcgagtacatcaatcctgaaaaatttgaatggatagactttggaggcggagttaaactcaggatgtataagtcttcgaaggctttgaagggcaacaatcgctcattagttttcacgcttaatgtgcacgggacaaagattctcttcactggagacatagaagcaattgcggagagtcattatctaagtcagctaagcaaggttgatatactaaagacgccgcatcacggatctaagactagttcaacgaaggagtttttggagaagactagacctaaagatgcaattagctcgcaagggcttaacaacttttatggacatcctcataaagagacgctagaaaggcttaaggctatacacgcaaacttttacagaactgacaggcaaggtatgattagcgtaatttttaaaggagatacttacgagattaaaactttttacaaagagtattataagtaccttgattatatgaagaagtacatcttcttattgagcttgctatctataatattttcttatataataagtatagttatttatgagtataaaaagtacggagacatgacatatgaactatagaaatttcttaaatgaagttaaaatgaataatgtgagcggcgcttatctatttaaaggcatagagacttatcttatggacaagaccttggatgcacttatagataattatcttgacagcaatcaaagacttatgaaccttgcagaccttaagtactctgagaacttagttaaagatatcaaaagcaatatcaccatgcttccactaatggctgagaaaaaaattaccatagtgagaaaggcaaatgatagcatcaaggtccttaacgatgacgacttacttgatgagcttggaaaaatgcctgacacaagcataatcatctttatggatgaggacgatagcataaagaagacgcttaaattttacaagcacttcaagaaaaatgatcacatagtgagctttgacaaggagaagatagaggaccttgttaagtggacagcgcgcaaatttaacgagctgggcgtagaagcaggctttgctgaagcaagatttttgatcgatagactcggcttttacagcgacgagagcgttaatatgtatagccttgaatcagaagttgagaagcttgcaagctatatagctaagggcagactcactcgaggcgcaatagaaaaagttgttaaggaaaataccattgacaacatctttgccatgatagatgcaattaataacaaaaggacagctgcggcacttaatgagtatgagaagcttcttactaatggcgaggcagacataaagacttcgtatatgatatttagaaatgtaagattgctacttgagctaaaggtatgcgatatagaaaagaaaagcgaagtagagaaaaaagatctattgaagatatcgccatatgagtataagaagttatcaagccttgcacacgcgtataactataaatttttgcttaagtttatgaatgaacttaaaaatttagatataagtttgaaaaacacaagcaaagacagcacaataatgataaaaaatttaatatataagatgacagagtaagtttgtttaaggaagagggctaaggctctcttttttattatatgcgttatttataataaagagaaagatatagaattttataaatttactataaaaaagtgcaaaatcacttgacaaagataaagttaagaaatatgattaaaatgaataaagtattaaatagaaaaatgataaggagtgagaattaaatgaaagaaaagaacaatgcggcttgggaaagtcatgaaaaaagagctaacgataagatttttttgattgtattaattatagttttactagcatttgcatatagagtttttgtttatgatcaatattttaatccagaaacactatttatcaaagctgacaaacttatgtctaatactgatgctattaagattgaagataagttagttaagtttgacatagtatctagctcaataagaaaggaaagggctgaaggcgagtacactgatacaaaagaagtattacttcttaatgatgctggcaaagagataggcaaagcaaaattttctaaatttaaagatgagtatgtaattagagtgtataaatatgagtgtaaagttgaattattaaatgaaagtgctaaacttaattctttattacttaaggaaataatttagtatcgagattaaattttctatataaaagttaataagcccatagatattaatgactagtgtaaaagctagtcattttttatttaagaaaaaataatttaggcttaaaaataatactaaagtagtattttttggacatttctgtaacatgattgtaataattgtagtaaaaagtagcaaaatggtttaaaatggttgtaataaagctagaaatggttcgaaatggttattaatgtttcgaatgcattaagaaggtgttatcaatgttcatgggtttattcaaacatagtattgattcaaacgggagggttatcataccctctaaaatgcgtgatgaacttggtaaagacttcataatcacgagaggatacgacagatgtatctacgtttataaccgcgaaacatacgagaaaaagcttgagcaattcgatgatctacctgacactgtcttagaaaacagaaaatttgaacgtgagatgttcctttatatgaacgaagcaaacatggacaagaacggccgtgtaatgcttcctgagatgcttagagagatgatggatataaagggtgacgtctacatcattggtgttagaaagagaatcgaaatttgggatacagaagtttataagaactacaaggcaactgtcgcacctcttgaagagcttgcaaacaatataaagagagattagttatggagtttaagcacgtacctataatgctttcagaagtgattaatggccttgatataaagcctaacggcatttacttagacggaaccataggcggagcaggtcactcacaagagatattaaaaaggctaagtgacgacggactacttataggtgttgacagggataaggaagctcttaataaggcaaacgaagtgctaagtagtgttggtggcaattttaagttagttcacgacaactatagaaatattaaagccatttgccaaagtctaggtattaagcaccttgatggcatactacttgacataggtgtatcgtcatatcagcttgacaacaaggacagaggcttttcatacagacttgatgccaaacttgatatgcgcatggatcaagaaagtggcaaatcggcatacgacatcgttaatacatactctaaagaggaactagaagaggtcatcttcaagtactcgcaagagagatgggctagaaggatagctgaattcatctgcgaatacagagaagaaaagccgatagagacgacattcgaacttactgatgtgatcaaaagagcaatacctaagaaggcgagagagaacaaacacccttcaaagaagacattccaagccttaaggatagaggtaaatgacgagctgggcgcactaaatgctgctttgcaagacgctatcgatatattaaatacggacggtaggatagcgataattacatttcattcgatggaagataaaattgtaaaagacatatttaagtttaatacgcttgattgcatttgcccacctgagagcattatatgtacatgcaatcataagagaaagctaaagcttgtaaacaataagccgcttgtagcaagcaaagaagaattaaaagctaatcctagaagtgagagtgcaaagcttaggatagctcaaagagtatagagggaggaatattatgtcatctgcagcgagaaaattatatgatagtccagtttattcgcaagaaagaacaataagtagaccacttgttaaaaagaatttaaagagtagatctaaagcaaaggagagagtagttaatgtcttctttgttagaacagttctttgtgctcttgcacttggaatgatatttactatgcttgttttttgcgcagatagagtaactagagtgcaaaactctataaaccatagcaatgctgaaatctcaagacttaaagctagtcttatagatgaaacagcaaagcttgaaagccttaagaatgcaggagctatagagttcgaagcaaggactaagcttggaatgatataccctaatgaaagtcaaatattaaacataaatacaaataatgctgcagaaaaagagattgacgataaagttatcgttagtcttgatcatgacatcgataaaaatatagaagaaagtgacagaaaatgaaaacgcgaaatagcgatagacatataagacgaagaaagacaggcaagtttaaaactcctaataagtataataggattttgactgtactggctttttttggattaataatactagtatttttaattaaattattctcagtgcagataactggtgcgaagggcttgaaagagtacgccgttggtcaatggactaaggcggtcagccttggcaatcaaagaggctacatatacgatagaaataataaaccattagcggtaaataaaaacatcgtaactatatggagtgctccattcaaagaagatgaggatgaaaaggaagaagcgaagttaaagagagagaagaagtataacgatatagctgaagaagtttcaacaaagatatctgagataactaaagaggatgcaaaagatatactagatagaatcaagagcaaaaagagaattagagttgttaaagagatggaacttgatgattacaagaagcttaaagaaagcatggcaggcatcaagtttaaaactgttcttgaaattgaagaaaaagctaagagatactacccatttaacgatttagcatctcagcttattggctttaatgatattgacaacgttggtatcaatggccttgaggttaagcttaatgaggctttagaaggtagagattctaagaaggttcaacagcttgaagcaaacatgaaaaacgcgcttcctaaccaagaagcaaggattatagagggtaaaaagagcgttaacgtcgttctaactattgacgaaaaacttcaaagagaagtagaaaagatagctgacgctgcgagagaaaagcaaagcgctgagtctgtatcgatcatagttatggacccaagagactcatctatacttgccttagccaatactggcagattcaacctaaacgacccaagaaataagccggacgatgttgaagaagaagtttgggacgaggcaaaggatgaagagaagaatcaaatattatttgataagtggcgtaacaacgctataagtgactcgtatgagccgggatctgtttacaaggtaataaaccttgcagcaggactagaagaaggcaagctaaatgacaacatgacattctcttgttcaggctctataaacatcttcggaagaacactatcatgcgccgagcacaaagctcacggcacacaaaatatatcacaggcgctaaacaactcttgtaacgttgccttcgtgcaaataggtaacatcttaggcaagaaagacctgtttagatacgcaaaggcttttggcttcggcgaaaaaagtggcatcgacttacctggcgagagcttaggtatacttccaacaaactttgatactataggtccagttgagcttgcaactatgtcatatggacacggtcttgcggtaacacctatacagatggcgaacgcaatatgcgctgttgttaatggcggtacgctttataaaccaaagcttgttttaaagactgttgatgactttggcaatgtcatagacacaccaaagagtgttgttagaagaaaagttatttcagaagatacaagtgagcatatgagaagacttcttgaaagtgttgttagagacgggcacatcaaaagatcaaggatagaaggctacagaatcggcggcaagacaggtacagcacaaaagatagttgatggtaagtacaagaagaacgcatatatatcgtccttcgtaggagctttccctatcgataatccagagtttgtagtacttgcaattgtggatgagccaagaagcggtattgcatacggttctttggttgcggcacctatattccaagatgtagcaaaatttataatcgactactacaaaatacctccagctagcgaggttacagaagttgagaatgaaaaggtacaagtacctaacttaaaagacaagactatgggtgaagcgggacttgaacttgcagacctatcactaagttttgatactaattataaagaatatacagaagaatcagtaatcatatcacaaagcataaagccaggtgtctatgttgaaaagggcactgttataacgcttgatgttgaagttaagaaggaaaatacaattcttacaccggacttcaaaggtatgactcgtgatgaggcattaggactagctgagaagattggcattaagctaagaatcaatggagatggcattgttaagaagcaaagtcctcaagcggataaagaagtaagaaagaactctatagttgtattagatttgggggactaagatgtttaaaaatataaagacatacagcataatcatatcgatactaagctttcttatactttgcatacttgcgaagataatcataccagagcttagaaagtacaaacttggacaaaacataagacaggaaggacctaaatcgcatctaaagaaggcaggcacgccgactatgggtggagtcttgttcgtagtaagttcactactagcgcttatcgcttcataccttatgggctttgtctttacaaaagagatcatactacttgccttaggcagcactgcttatggccttgtaggttttttagacgactatataaaattctttaagcacagaaatttaggcttaagggcatatcaaaagctattattgcaaatgcttttctcagctcttatagcatactttgcatacaaactagtaggaactaaggtatctataccattctacaaagaagtgaacttaggtaagtgggtaatcttacttaacttcttcatactagttgcaagcacaaatgcagttaatttaacagatggacttgacggacttgcgacaggcgttatgtctatcatactactaacactagcgatattctcattaaagatttcaaatatgacaacatacgcatattcaataataatgtttgcatcgctactaggatttttattatttaacaagtacccagcacaaatttttatgggtgacactggatcattgttcttaggaggcgtcttagcaatattaactatactactaggactgcacttctacatgattatatatgctttagttttgattatggaaacactttcggttatcatacaggtagtggtgttcaaaaagacaggtaagagagtttttcttatgagtccactgcaccaccactttgagatgaaaggcatgaaagagactaaagttgttatgatgttttgcgtgtggacactagttctatgcgtggcatcattagtaatatttttgaggtgataatatggactacaaggacaaaaatattctgattttaggatatggaatatctggctacggagcttctttatactttataagtaaaggagctaatgtttatgtttacgatgacaacatggatcaaatcttaaaggacagggcaaacgagaaccttgacgatattaaatttttaacaagaactgagcttgatgccatcgagtttagctttgtgttaaagagccctggaataaaaccatcttcagatataattcgctaccttgtagacaagaacgttgagatagtctctgatatagaaatactttatagagactttaagaatcataagttcatcgttatcacaggtactaacggaaagacaactacaacaacattcatcggcaaagtgcttaaagaccttggctacaatgtcaatgtcataggcaatattggagtctcgccactacttgaagcagcaagctatgacacacacgtcatagaggcatcaagctttcaattagagtacacaaaagatttcaaacctaacattgccatcatactaaatatcacaccagatcatttggattggcacggatcattcaaagcttatgaagaggcgaagaagaaaatttataaaaatatggacaagtcgtcatatttgatacttaattatgacgatatcgccttaaataaggtggatcaagatacaaatatactatatttctcatcaaaagaaaaagatttagtagatatgaactacatcgcaccaaacatagttgacaaagataaaaacattgtcataaacaaggacgatatattcataaagggtcgtcacaactacgagaaccttatggcagcaactcttgctctagaagtctttggtgttaagagagaagacatagttaaagagataaaggacttcaagggggttgagcatagaatcgagttcgttagatcgcttgatgatgttgagtactataatgactctaagggcactaaccctgatgcgtctcttaaagcggtagaagcctttgacaagagcatagttttaattgcaggtggctatgataagaacataccattcgaagactttgcatcgaaggcgaagaataagattagaagcctagtattatttggccaaacaaaggataagatcaaagaggctttcaataatgttggctacgacaagataactatggttcaaaatatgagagaagcagttacagttgctcgctcgcatgcacaaaaaggcgacatagtactattgtcaccactatgcgcaagctggggaatatacaaaaactacaaagaacgcggacttgaatttaaaaaattagtaaatgagttgaagtaaatgaaaaatagaagtaatgcacctgattatcacatcttaatatctgttatatgtctaatcatcttaggcatactgcttgtatatacaagctcatacccatacagctatcagcttgagaatggtaagtatggcggggtgtactttttaacaaggcacctagtctttgtcttagcaggggcaatactatcattaattgcttataggattgattataaaaagtatgatacaagattctttataagctttatgctaatatcaagtatagttttagtattgatactaaagcttacaccactaggtactgacttcggtaaaggagcgaagaggtggatcaacttaggtggtttctctttcatgccttctgacgtaatcaaagttgcagcagtcttttgcatggcatcatatatgagcagaattaagatgaatagaagaaatatgcaaaacatcgtcgtagtgcctatagccatcatcgcattcttttctggaattatatacatacaaaaggacttaggtactgcagtaacagttgcaggctctctatctatcatgtacttcataggtggcgcaccgcttggtataataccgcctgccttaataggtggagcaggtgttgtataccttgcgatatttagaaacacatttagaagagagagaatctttggctacctagatccaattaagaatataagacacgcaggttggcagccggcacaaagtttatttgcttatgccaatggcggcctatcgggtgttggcattggtagaagcacgcaaaagttcttctatataccagaagtttataacgactatatacttgctatatgtggtgaagaacttggtttcttaggtatgatttgcattgttgccttgttttctgttataatcattaaaggatatttaacagctgcaagagcaaaggatagatacggacttatgcttgcaagtggcatcagctcacttatagctatacaattttggataaacgcagcggtatctgttaacctagtgccatctaaaggtattacactaccatttattagttatggtggtacatctttaatcatatatatgatactagcagcagtactgttaaatatatctaagagtgcaaattcagaggtgaagtaatgcgatttatcgtaacaggtggtggcacaggtggacacatatacccagccatgaccatagcaaagaaattaattgagaataatcatgaagtaatatacgttggcagaaaaggcagtcttgaagaaagacttgttgctaaagaagacatagtcttcaaaggcatagacattgttaagataccgaagaagaacccaaaggatgctttgaagtttttgagacttcttttcaaatcgcttggtgattgcaaaaggataatcaaggactttaagccggatcttgtcataggtacgggtggctatgtatcgggcccacttgtctatgaagcacaaaggctgaagatcaagtcagtaatcttcgagcttaatgttcacgcaggcatcacaacaagacttttgaagaagagggcgactaggatactagttacgaatgagaatacaaagatgcttcttaataaagaagacgttactaatatagttggaataccaattagaaaagattttgatgatatacatgagaaggcagatcacaagtcctactacgactttgataacgacaaaaaaattgtcttatcatttggcggaagcggtggacaaaagtctatcaatgagactgtgcttgatatgattaagaagcattataaggacatggacttcaacattttccacgtaagtggaacttatgcatacaactggttcaagggagaacttgataaggcaggtattgattacactaaatctaatattcgcgttggagagtatctatatgatatgccaaaggctttgatagatgctgacatggttatcacgagtgcaggggcgcttacacttaatgaagtctcctgtgttaggaaacctgtcattataataccaaaggcctatgttgttgagaaccaccaagagtataacgcacgctactttgaagagatgggcgctgcaaagatgattcttgagaaggatcttaacgaagacctattatacgaagaggtcaataaaatacttcataacgaagatgtttacaagtcaatgcaagagggacttaagaatatatttcacaaaaacgctattgatgagatatatgatataattataaaaactgtttaaaggtgaaattatggaaccaatgagtaaaaaggatataaggagaaacagaataaagaagcaaagacaaagaaggagaagtctgatgagattcttcgtaattactgtaattgtttttgccttcatcttgtttatattcaatacaaaactctttggcctaaagaatataaaagttacaggcaataaaaacttgtcaacagatgagatcataaaggcgagtgaacttgagattggcgagaacatacttaagcaaagcttagcagaagcaaaggcaaagattaaagttaacccatatgtcgaggatgcacacctttctatgtcttcaaaggacactataagtatagagattaaagaaagattgattgcagctgagttctatagtgactctaagtacatctacattgacgaaaagggtaccgtactggagaatagtaattcatacaaggacggttacccactaataaagaactttgacaagactcatcttgaacaaggagagaacttttataatacggaagttggtgcttcattacaagagcttatagttgagatgagcgctaataatttagttaaagatattaagactatagagaagaatgcagacttagaggtttcacttaactataggaatggacttgttgttcagctaggtgagttaaaggacatcagatacaagatgaaggttttaaacgagcttatgattaagcttaaggacaaaggacaggtcccaaagatgattatgtttaacaagggcaaagcgcctgttgtagttttagatacgggtgaatagatgaaaattgataagaaaaagataatgttattcattgcttgcgtagttgtaggtatagccataacgatgcagcttaagacggttagaaaaacagttggcaaccccttaaatgttaagagagcgcaggagcttgcacaaagggttaaatctctggagtctgaaagagataaactattgcaaaggcttgacgagacagaagacaagcttagagagtatgaaaaacctggatcaagcaacaatgagatagcaaagaaattatacgaagaaactgaaaaatataaaatgatatcaggctatactgatctaaaaggcaagggcatcatattaactatagatgagcctaagcttgctgatggagaagtaggcttcggcatacaaaatgacatcgacttagtacttagcactataagcgttttgaacagtgcaggagcagaagccatctcaataaacgaagagagatacacatcatttacagagatagtaagtgcaggtaaacatatagaggtcggcggagtcagtatgtcagcgcctatagtcatcaaggctataggcgacgccgacaccatgcaatcggctatagagtttaagggcggaattaaggacgagcttcaaaactataactatcaagtaacattgacagcaagggatgacatagttatacctagatacaaaaagagtatcgagttcttgtatgctaagcctgtttatgaagtgcaagaatgaaatacaagactaaacgcattgtgcttgtcataatttatcttttaataggtgtcttcttaggcttatacttaaagacaggcaaagagtttttcgagcctttaagcataaacaagatgaaagagacgagtactaagataaaaaatttaaaagctgagataaagagcatcaatgaagagcttgagaagcaagacaaaaaacttgagactcttgagaaacttgtcaagaacgatagcgagttcttaaagttcttaaaggatgaaaaagttttttatgagatgatatcaggcgacgtggaccttgaaggtgcaggcatagttctaacgattacggaagagagtgtcgatagacctgtcaagaggaccgatgttattcacgatagcgacctactaagaataattaatgatcttagaacttcaggtgctgaggccatatctataaacgacctgagagtttattcgagaacaggcgttaagtgcaacggccctgtcgttagactcaacggcagaactaagggtgcacctttcattataaaggcgataggcaacagtgataaattatactcagcaataaaatcaccaggtacctttgcaagcatactagagaccataaacccaattaagcttgagattgaacaaaaagaaaaggtgcttgttaagaaaaagatagacgaagataagattatatattcaaaaactttgacaggagaggataaaaaatgattattgcaatcataggtatagtaattggtatactcataggctacctattaccatacagctacaatccatattattcattgtatatatccatggcactacttgcagcgattgactcagtctttggcggcttgaatgcatacttggacaataattttaataataagctatttttatcaggccttataggtaactccatcatcgctgcactactgacatggcttggagatatcttaagcatacctctatattatgcagcaatatttgtctttggaggaagaatttttaacaattttgcaacaattagaagaaaaatactaaacaaaatgtaaattttgtggtagaatataagtaatagagtaaataattaaaacttagtataaaaaggaggattcgtaaatgattgattttgatgtagaaattgaccaatttgcaaagattaaagttataggtgttggtggagcaggtaacaacgccgttaacagaatggttgatgcaggtgtaaagggtgttgaatttattgctgttaatacagatagacaagctcttgcatcatcaaaggcacaaaacaaaattcaaataggagataaggtaactaagggactaggagctggagctaatccagaagtaggttctcaagcagctcttgaagataaagaaggcatcactgaaatgcttaaaggcactgacatggtatttatcacagctggtatgggcggtggaactggtactggtgctgcacctatcattgcacaaatcgctaaggaacaaggcatactaactgtaggcgttgttacaagaccatttggctttgaaggcatgaagagagctaagaacgcatctcaaggtgttagccaactacttgaagttgttgatacactagtaactataccaaacgatagactacttcaaatagctgacaagaagacatcactaaaagatgcattcattatggctgacgaagtattaaaacaaggtattcaaggtatatcagaccttattagtgttccaaacctaatcaacctagactttgctgacgttaagactatcatggagcaaaagggtatcgctcatatgggtataggctttgctcaaggagataacagagcaacagatgcagcaaaacttgcaatcaagtcaccactacttgaaacatctatagaaggagctaagtccgttctattaaacatcactggtggtacagaccttggtatgttcgaagttaacgaagcagcagacttaatcagacaatcagttgctgacgatgcaaacatcatcttcggtgctggtattgacgaaagccttggcgactctataaagataactgttattgctacagagtttgacgatggatctaaacctgctaaaaaggatgcaaataaagactctgaagctgaagaagaaaagaacgaagaaagcagaagtgaaagcacttcaagctttaacgatactttactagtacctgattttttaaagaataattaattatgaagtgtcctttttgttcttacgaagattcaaaagtattagattcaagacctactaatgagggtactgcgattaggagacgtagagagtgtcttcgctgtaaaaaaagatttacaacatatgaaaaaattgaagaaacacctttaatagttgtcaagaaaaacggagacagagagacatttgacagaagtaagatattaaagggcgtaataaaatcttgcgagaaaagacctgttagcttaagtcaaattgaaggcttggcagatagcgtcgaagaaaagcttatgagcactatgaagaaggaagtttcttccaacgaagtaggcgagcttataatgcaaggtcttaaagagatagaccaagttgcatatgtaagatttgcttcagtatatagagagtttaaagatactcagtcatttatgaaagagctccaaaagattatagacgaacaaaacaattaataaatgaaaaatcctgaccatgtggtcaggatttttttgatgggaatattaaactactcgatgattataggtccattgcttgtttttatatcaccgaatagagtaaggtctgaatcgttatttagtgaggcagttgttagctcgtcgttatctctgttaagaacatatctatcgtcatcaaagacagctgggcaagtatacttatttatgcctcttaggtttagcttaacattcttgcttacactctctaattcgacagtgacaggtccattgctgttagtaacaatgatgttctctgcacagttgaatacatcttttacatcaacaaaagcgtttgttgtgtgcgcttctaaattaacgaatggagtgttgtataaagttatttcagcatttgttgtatttattagtagatcagtgaactttgagtccttaatctttattgagtcgttagttgttttaagctccgacttattaattattgaatcttcaattttgatatagtcattgcttgttgttaagtaaagctcgttacatatgatagagtcaagtactatcttgtcattgcttgttgtagctttaacatttgcaaaggattgtgcaggcactaatacctttaggcttacagcaaagtccttctttgtaagttcagagtagtttggctctataagaacttctttatcatcaatatagcagttgatgaactcataattttctggtatatctttcttatctgtataatatatcttgccatagacctcaatttgatctgagttcgatggaagtatctctatcttttcattagtattgtttataattaaatcatattttttctttttgtctaaatctaacttaagtgtcgcgaactttttcttttttagtccattgtccatatcgaagttaaggtttgcatatacacggccattcttcatgccttcttcagcaacatgcaaggatttattcactatcttattaacaaagtttgagattttgtttgcaaacttatctgacatatccatgtaatcagagccttcagcgttgtaatgaacttcgtgtttgttgtttggcttgtattgcttttcatttttctttgcaccaactgcattcagaagctttagcgcttcttcttcgttaatctttccatcctttaacatcttaaggatcataattttttcttcagacattttaaacctcctttagttcaagaagcattttttctgcttcactactgcttattgcaccggaatttaataactcaagtatatctttctcgctggtactactcttgcgatcagagatgatctcatttatttgatcgagtttcttaactacagtagggtaggatataccaagagctctttcaatctctttaatattgcctctgtttaacaaaaaagttttgataaagtcaatctgctcagcgttaagcttgtagaaagaactgttttcaaatcttccttctatgcttgtgttgcagttttcacaaactagcctttctatgtatagttttgatccgcacacaggacattcatttaatgctttattaatcatattgacctccttgcttaagattatatatctaagaattaaaaatgtcaatatattttttaaaaatatttaaaaatatttaagtttttacttaaaaaaattaattttagaataaaataatttaatgttggacatcttgcatcttatttgatataataaaaacggtgagagaatgaatttgtttgatatgcaaagagaaaaaaatttaaaattaggtcaaaatttggctgaaagatttagaccgaagagtctagatgactatatcggtcaagaaaaagtcatcaataagaactcttttctatacaaagcaatcaaggcagacagacttccatcgctaatactatatggtcctgcaggcacaggtaagacttcacttgctaacgtcattgctaacacaagcaagtcaaactttatcaagataagtgccgtgggtagtggagtgagcgatttaaagaaggcagtcgaagaagctaagaggcttttagaagagaacaaaaagaccatactctttgttgacgagatacacagattcaacaaagcacagcaagattttctcctaccttatgttgaagattcaacagtaacgctcataggtgcgacgacagaaaatccatacttcgaggtcaatagcgcgcttatatcaaggtgtttcataataaggcttgagaagatgagtgaagagaacttaaaagtgcttgcgaggaaagcgttgactgacgaagccaatggtcttgcctcactaaaggctagtatagatgaagacgcattagactatctagtaaggatatcaaacggtgacgcgagaaacatgcttaactttttagagatagctgttcttagtcaagacgttgagggcgatatgacaagaaagataaagttcgaggacgtcaaaggcttagtatttgagagagctcactcatacgacaagagctcgactatgcactacgacacaatctctgcctttattaaaagtatgagaggctcagatcctgatgcaacagtcttttatctagctcacatgctaaacaatggcgaggacccattattcattgctaggcgcatagtgatatttgcttcagaagatataggacttgccgatcctaatgcacagacgcttgcgacatcagccttttatgcagtcaaagccataggtatgccggaagctcgcatcattttgagtaacgcagccatatacatggcgcttgctgaaaagaataactcgacttacatggcaatcaatagggctatggcagatgtcgataagattaaagagttccaaatacctctgcacataagagacgcacacaacaacgacaagaaggtctttggagatcacgcggactacaagtatccacacaattataaggataaaaaacctgagcaaaattatttgcctgaaggtttagaagataaaaaatattttaataataattaaggaggtcaacaaatgaaggttggtattaatggttttggtagaattggtagagatgttgctaggattctagttgaagaaaacaacggcttagaattagtgcacatcaatgcctcaggtgatttaaagacacttagtcatctatttagaaatgattctctatatggtagattatcagtttcttgtgaagcttgtgaagacggctttatgatagatggcaagaagattacaaatactcaatttagagatccggcagagattccttggaaggactatggcgtagacatcgttatagactcaactggagcttttaaaaacaacgaaactctttacaaacacattgacaagggtggagcaaagaaggttattttaactgcacctgcaaagggcgaaattgacaaaactatcgttatgggagtaaatgaaaaagaatacgacaagactaagcacaatgtaatcagtaacgcatcttgtacaactaactgtcttgcgccattaactaaggttatagaagacaactttggtatcaaaagaggtcttatgacaactatccacgcttatacttctgatcaagttttacttgaccacaagcacaaagacatcagaagagcaagagctgcagctatgtctatggtccctacaactacaggagcagcaaaggcggttgcactagttataccatcactaaaggataagcttacaggatatgcagttagagtaccagtacctacagtttcacttacagacgttgtatttgaattaaataagaacgttactaaggaagaaatcaacgaagctgttaagaaagcaagtgaaaatgaattaaagggtatacttgaatacgctgaagaagaacttgtttctgttgactacgttggcgatagacactcatcaatcttcgacccattcttaactttagtaatagatggaaatctagtaaaggttgtttcttggtatgacaacgaatatggttacagccacagagttgttgaccttgcaaaatacattgctgatcaagaataattattataaaaggataaaatgatgaaaaaaacattaaaagattataattttgatgataaaagagtattgttaagatgcgacttcaacgttcctatgaaggacggcgtaatcactgacaataaacgtatatttgagtcgcttccaacaatcaagcaccttcttgacaatggagcaaaagtgattatgatgagccacttgggtagaccaaagggtgagtacaacttaaaattcactctaaagcctgttaaagaagaactagaaaagcttcttggaagagatgtaaaattcatctcttgcgcagaagttgttaatgatgaagtaagagaggcagctaaaaatcttaaaaaaggagaacttcttttactagaaaacactagatttagaaaagaagaagaaaaatgcgacgaagctttctctaaagagctagcagagcttgcagatatctacattaatgatgcttttggcacctcacacagagctcacgcatcaaatgttggtgtaagtaaattcttgccatcagcactaggctttttagttgaaaaagaaatgaacatcatggctaaagagcttgacgagccaaagcacccattcattgctatactaggcggatcaaaggtatctgacaagattggcgtaatcgagaacctattaaacaaagctgacaagatacttataggcggagctatggcgtttacattcttaaaggcaaagggtatgaacgttggcaagagcttagttgaagacgataagttagagcttgcacttgaactgttaaagaaggctgatgcaaagaaagttgacttggttttaccagttgacgctctatgtgctaaagagataaaagaagacgcagaagctgaatgctttgaagtaaatcatataccagatgatatgatgggtcttgatatcggtccagaaactattgatgtatttactaaaaagcttttaggcgcaaagactatagtttggaacggacctatgggtgtctttgagatggacaagtttaaaaacggtactaatgccatcgccaaagcactagcaaactccgatgcaacaactattgtcggcggaggagatagcgcaagcgctgttcaaaaggctggctacgaagaaaagattacacacgtttcaacaggtggcggtgcttcacttgagcttatggaaggaaaagttttacctggcatagctgctattaatgataaataaggagacaaatttgaaaaaatttttacttgctgcaaattggaagatgaacatggatataaaggagactgaaggcttctttaatgatttgaagctaaagcctaatgactactatgatgtttatgtcgcagttccatttacagatatttatttagcaaataaaactaaaaaatcgaatgatataaagataggtgcacaaaacatctactttgaagacaagggagccttcactggtgagatcagtactaagatgattaagtcatgcggagcagaatttgttatcataggtcactctgaaagaagagaaatttttaaagagtgcgacgagatgattaacaagaaggtccttaaggcaattgatgacgatgtagaagtaattctatgtgttggcgaaactttgtctgagagagaagatggaggacactttgataagattgaaaagcaattaaaggctgacttacttggagtagatgcttctaagcttaacagctttgccatagcttatgagccaatctgggctataggcactggcaagagcgcttctaaggaagatgctgaagagatgtgccgtttcgttagagaaaaagttaagcttatgaatccaaatcttgctcaaaagctaagagtactatatggcggtagcgttaaagattcaaacgcggctgacttagctaaagaagagaacatcgacggcttcttaataggcggtgcttcactaaagagtgagtcttttgaatccattgctaaggagatataagatgtcaaaggcaatactaataatactagatggttttggaattggtaaagataacgacgcgaacgctgtatatagagccaagactccaaccatagataagttatttaaagagtgtccacacgcaaaactacaagcgagcgcagagtatgtaggattgcctacgggacagatgggtaactctgaagttggccacttaaacataggctcaggtagagttgtctatcaagacctttctatgatcaatagagatattaagaatggcgacttcttcaagaaagaagagttccttaaggcgatagagcatgcgaagaaaaacaatactaatcttcaccttatgggcctactaagctatggtggtgtgcactcgcacattgatcatatcaaggcgcttttagagctatgtaaaaaagaaggcatgggtgagagaacatacctacatgcaatcttagatggtagagatgttggcatacactctggcaagagtgatgtcaaggaaatacttgactatatgaagagcatctcatgcggcaagctcgcatccataagcggaagatactatgctatggatagagataaacgctacgagaggactgaaaagtattacaagactgtaacgtctaagactccaaatcttgtatcggatgacgctgtagaggctattaaaaaatcatacgaagaagatgtgactgatgaatttatcttgccttgtgctataagaaatgatggtaaagtaactgaaataaagtctggcgacagcattatattcataaactttagaccagatagagcaagacagatcacagatgcattcaccaacaaggactttactggctttgataggaagtttttagatgacatatattatgtgtgtatgacaaactacgactccagctttaataatgttcacatcgcatataaagacgaagagatagtgaacacacttggagaagttgtctcaaagcacggactaaagcagctgcgcatagctgagactgagaagtatgcccacgtaacatactttttcaatggcggccgtgaagaaaaatttgctggtgaagatagaatattgattaactcaccaaaggtagcgacatacgatttaaaacctgagatgagtgcttatgagcttacagataagcttgtgagcgttatgggagattatgacctaatcatactaaactatgcaaacacagacatggttggacacacaggagttgttccagcaataatcaaggcagttgaaacagttgacacatgccttgcaaaactattagcaaaggcaaaggaatgtggcttcacagccataatcacagctgaccacggtaactgcgaggcgatgtttgatgatgaaggaaaaccaatcacatcacacacaacaaacccagttccagttatcttatataatgacggaaagcacaagattaaagatggtgtcttggcagacttagcaccatcattattagatatattgaatatagaaaagccacaagaaatgactggcgagagtcttttagtatcggaggattaaaatgagtagaattattgatgtatttgcgatggaagtgttagactcaagatctaaccctactgtagaagtaacagttttagctgaatcaggggcaatcggctcagctatagttccatctggagcatctactggagaacacgaagcagtggaacttagagatggagatgcaaagagatattgcaagaaaggtgtattgaaggctgtagacaacgtaaacaacttaattgcaccagagatatttgatatggaagtaacagatcaagtctcaattgataagctaatgataaaccttgacggaacagaaaataagggcaaacttggtgcaaacgctatgcttggcgtgtcactagcagttgctagatgtgctgcaaacgagttaaacatgccactttatagatacatcggcggaactaatgctaaagtattgccagtacctatgatgaacattttaaatggcggtaagcacgctgacaacaatgttgacatacaagagtttatgattatgccgataggtgcagaaacatttagagacgcacttaggatgggctcagaagtttaccacagcctaaagaaagtacttcaagaaagaaaattagctacaggagttggtgatgaaggtggttatgcaccagacttatcaagcaatgaagaagctatcgaaactatcattgaagcggttaataaagctggatatgaagtaggaaaggacatctacctagcccttgacgttgccgcaagcgagctatataacgccgacactaagaaatattacctaaagagcgataacgcagagctaacagacgaaggcatgattgactactatgaaaaattagttaataaatatccactatactcaatcgaagatggtttagacgaaaacgattgggaaggttggaagaagttaactgaaagactaggagacaagattcaattagttggtgacgacctatttgttacaaacactaagagaatcaaagaaggtattgaaactcatacagcaaactcagttttaataaagcttaaccaaattggcacattaactgaaactatcgaagctatcgagatggctcacagaaatcattacacagcagttatttcacacagatcaggcgaaacagaagatacaactatcgcagacctatcagttgcgctaaacactggacaaatcaaaacaggtgcacctgctagatcagaaagagttgctaagtataatcaattacttagaatcgaatacatgctagatgacacagcagtgtatgcaggcaagagtatactaagaaaataatttaagaaaattttttacatgggatgggcgctttatgctcatcccatttttatattttaaataaaactagaaatatttataagcatattgtataattaagataaagtaaaataaaaattatctaaacaaaggagagtttataatgaaagtcaaaaacgcaatattaagtacaattatcgcaacacaaattttaagcacagcagcacttgcagcaccagatgaagcaatcaaagaatttaagaaagtagcgccaattaaacaagaagtaaaacacttccaaggcgaagtaaaactattcatcattaaagacggagaaaaagtgagagtcgatcaaaagatgacagatggcttaagagtagttaatggaagaacatgtgtaggagtaagagaccttgtaaacgcaatcgaaggagcaaaagttgagtgggacggcactaatcacatagtcgacatcacatatgctggcaagacaatatcatacccagtaggaaaaccacttatgtgggcagatggcaaagcagtgacaatagacgtgccagcacaaatcgatccacaaatatcaaaaacattcttacctataagaaacatagcagagacattgggcttcaaagtagattgggacaacaaagcaaaggaagtagtcctaacaccaggcgcaggcacaggggttacaacagctcaaacacctacacaaaacagcaagacaaagataaaattagcaagtggagaagtaattgatataaataaacccatactagataaaattgaatatgatcagggaaaaccttttttgaaatctcatatatatgagctaagcgatgcagactttattgataatggcgatggaactatgacatttggaaaaggtactaaacttgaacaaaactttttaaagaaatttaaaagagttgactcatcaccatcaaatcctaatttcaaaatagcaggagaaaacaaaggcgatacacgtataggaacatatgtaataggcgaaggtaatccaatgtcagacaagtgttataaagaatggtcagataaaaaaggtcatgagctgtattttagtgaattaggggcagtaactggcgaatacaaagtagctaaaaattattttgatgacagtgattcattttttgtatctggagacaatagagatgaataccttttaaatttatttaaagaaagaaaaattgataaaactgaagtcaataaatttttatcgacatataagtatgataaaaatgaaatttatataaaaagatggttattaaataaaaatatcgatttctatgacggaactggtattataaatgtaacaatgaacggtagtagtagattagatttaccatatatagctttctatattactaaagataaaaaagttttatcagatgagttttcagatgattataaatataaaatagatgtagataaagttatagtgtataaattgttgccaaaatatataaatggaaaatatgaataccatgatgctctctttgtaatagatataccagatattactttaagaagactttatacagtaaatgagaagagaaatggactttttcatataatcacaccaaagacagtaaaagagattaaaggtatataaagtaaataataaataaggagtgataaaattgaataaatattataaagctatgcttagtatgatgcttgccttcatactaggctttttctatatgatgccataaaacaagaagcgttatgcacggctttatgtatatgtagttgtattagttatgacattataggttaagcatgacataagaaatcaagcgcataatgacgcatcatctatgagatacttgataagctatgagataagaaacaattatgaatatactttcaaaaaagcattgcaaaaactataacgttatggtaaaatatatatgttataagtaagaatggaggtgtgtgtatgaattacgtattgtatgcactagttgcgatttcggctttagtattaactatatcagtagcagctactgcaggagacgatcaaggcttacaagcattgggcggagctgaaagcatatggggttcaaaaaatcctacaagaaatgttcttttaaaaagaataactacaatttcatcagttgtgtttatggtaacaactttgatactagcaggtttcaaattataaaataggaggaagaaatggacaagattttaattgtagctcctatagttggagctatagcactattatttgctttagttaaagctctatatgttactaagcaagatgctggtaatgagagaatgaaagagatttctggttatatccaagaaggagctcttgcatttttaactagagagtacaaatatctagcaatatttattgttgtattattcgcaattttagcactagctattaacatcggcacagctgtttgttatttaatcggtgctgtattctctatttgcgcaggctatatcggtatgactgtagctactaaagctaacgtaagaacaactaatgctgctaaggaaagcggtatgggcaaggctctaaacgtagctttctcaggtggtacagttatgggtatgtgcgttgtaggtttaggtttactaggcacaagcattgtttggatgatattcaaagatgctaacatagttacaggtttcggacttggtgcttcatcaatcgctttattcgcaagagttggtggcggtatctacacaaaggctgcagacgttggtgctgacttagtaggtaaggttgaagcaggtatcccagaagacgacccaagaaacccagcagttatcgctgataacgttggtgataacgttggcgacgttgcaggtatgggtgctgacttattcgaatcatatgttggagctataatctcagctatcacattaggagcgttagcatttagcgataacggtatttcattcgcacttgcactatgctcagttggtatagtttcatctattattggtacattatttgtaaagggcgacaagaaccctcaaaaagctcttgatatggctacttggggaagttcaataatcactatcatcgcttcttacttcttatctacaaagatactaggttcaatcaaacctttctacgctatcgtagcaggtgttgtagttggacttatcatagcaaaagttacagaatattatacagctgctgaatataagccagttcaaaaagttgctgaagaatctgaaacaggagcttcaacaaacatcatcgctggtttatcagtaggtatgatgtcaacagctatacctatgattgttatctcaataggcatactagctgcattcttcttagcaggtggatcagaaagtgctgtaaacggactttatggtatctcacttgcagcagtaggtctactagcaacagccgcaacaactatcgcagttgacgcatatggaccagttgctgataacgctggtggtatcgctgaaatgtgcggacttccagaaagcgtaagagacattacagataagctagactcagttggtaacacaacagcagcagttggtaagggttttgccattgcttcagctgcacttacagctctagcactattcgcttcatatactcaagcagttggacttagtcaaattgacttaacaaatccattaactatagcaggtgtattcattggtggtatgctaccattcttattctcatcattaactatggatgcagttggtaaagctgctaaccaaatgattgaagaagttagaagacaattcagatccatccctggtatcatggaaggaactgctaaaccagattatggtaaatgcgtagatatttctactaaggctgctcttaaggaaatggttattccaggacttctagctgttgtatgcccagttatagttggtatacttctaggaacagaagctttaggcggtctacttgcaggttcactagtaacaggcgttctaatggcaatcttcatgtcaaacgctggtggagcttgggacaatgcaaagaagtatattgaatcaggtgttcatggtggtaaaggatcagatgctcacaaggcagcagtaacaggagacactgttggtgacccattcaaggatacatcaggaccatcactaaatatactaattaaattaatgacaatagtagcattagtatttgcacaagtatttgttagctacggtggacttattataaaataagataaaattgtaattggactccccttgattttaatcagcgatgctattaaataaggggagcttcatttataatatgggtgattttatggaaataacaattgacaatattaaaattaattatatagccctaggcgagtcggaaaagcctgttcttatacttcatggttggggcgcttcaatagacgctgttatgagtatagtgaacgctttgaaggatactagaaaagttattgccatagatttaccaggccatggcaagtcgtctcagccagatagagtttttggtggagaagactatgcaaatattgttaagtcctttgtagagaagctcggcattgaaaaatttgacgccataggtcatagctttggtggcaagaccttgatacaaattgcttctgaaggatacaaaaggcttgataagatggttcttatcgatgcatcaggtattcttcctaagagaagtttttcatattatctaaaagtttatacatataaattccttaaaaagctctacaagttaatcttcttttacaagagtgaagaagagcttatgaagaagctttctaaaaaatttggctctgatgactacagaaacactagtggcatcatgagacagaccttcgtcaaggtcgtaaatgaatccctttttgataggctaagtcttatcaagaacgatactcttatattgtggggcaaagatgacgatacaactccactatatatgggtaaaattatgaatgagaagataaagaattctgctcttattgagcttgaaggcggacacttctcatatgcagatgattatcaaatattttcacgtgtaattagatcttatcttagtaaggaggaactatgatagctatatttatattcttgccaatattattaacagttttaatttatatacattctttggcatttttccaaatattgcaattaaatatgtacatttcaagcgagtatgagctatggcttaaaaattttggctggcttaagaactcattaaagaaattaacacctggagataagaagccgcttgtctttactgacaggatgaagagactgatgaagatatttgtaagcttcaacgtagtgattatgtatacgtcaatcatcgcatatctattattcggtgaaaaaattgcactagcatatttattagtacttgcttttgaactatacatcataagagcgaagagtgtaaagtttgcaaatatattagcacagccgattgagaataaaatcaatcacggtttttatatacaagcacaaaataaaattaagaaagaaaaagagaataaattaaaggtggtaggtataacaggaagctatggcaagacatcgactaagcttgttttaaatgatattgtgaagaatagccttaagacatacgcaacgccaagttcatttaacacacctatgggtatatcaaaggtaataaacaacgagcttgaaagcggcactgaagttttcatctctgaacttggagcaagatatgtcggagagataaaggaagttgctgagcttgttatgccagatatcgccatcatcactaacattggcccatgtcacatcgaaacctttggatcaatggagaacattgtcaagacaaagttcgaacttatagacacacttaaggaaggcggccttgctatatttaactacgacaacccatatattaaagagaaggcagctgaggttaagactagaaaggtgtatatctcacttgaagatgatgcgtgtgactactttgcgaaagatataagtgccagcgagtttggcactgagttcacacttgtctacaagaacaaagagtataatttaaagacaaagcttcttggtaagcacaatatatacaatgttcttctttcggttgcggcagctcgtgagttaggcatgagcatggaagagatacaagaggcggttcttaacgttaatcaagttgaacacagactatcacttgtagagaacccaaacaatcttattatcatcgacgacgcttttaatagtaacccaagcggtgcacaagcggctctagatgttataagtgagtttaaagaaggaaagaagatagttatctcaccaggcatggttgagctaggagagcttcaatacgaagagaataaaaagtttggcaagaatgcagcaaccgttgtagattatttcattatcgtagcagaagttaataaagaagcaataaaagatggtctagtagaaggtggacttgatgaagataagatacatgaggcagcaagcttaagtgatgcacaattaatactacaaaaaatatgtcaagcaggcgacgtaatacttttcgaaaacgatttgcctgataattattaggagttgatagaatgctaaaggtaggcgttatatttggtggaagaagcgttgaacatgaagtatcagttattacaggaatgcaagtaattgagaacatggataaagaaaaattccttccaattccaatatatattacaaaagaaggtaagtggctaagttcagaggccttcaagaattttaaaacatttaaagacggtgactttagttcagctaagaacgttatgcttggctgtgactatggagattttaacctatatataaatcctgaaacaaagtctatgtttgacaagaaggtatacgaaaggcttgatatggtcttcttcgcgcttcatggaactaacggcgaagacggatcatgccaaggacttgttgagacagttggtctaccatatacaggcactaacgtcttaagttctgcagtcggtatggacaaggtcataatgaaggatgtatatagggcaaacggacttcctgtagtaaactacaggtactactacagaagtatgtggagaagctcaaaggacaatgttatgtctgacatagaaaagaatttaaagtatccattgtttataaagccatccaaccttggttcgtctataggcatatctaaggttaagagcaaggaaaacttggaagaagctttgatgatagccttcagttatgataaaaaggtcatagttgaagaatcagttgaaaacgcaagagagataaactgcgctgtcatgggttacgaagaaaatatcgagacatcagaattagaagaaccactagacttcaaagaactattgacatttgatgataaatatgtatcaaataaaaaaactccaggcactaagatgatgagaaaccttttaaagaaggacgagccattgagacctgaacttgaaagacttgctaaagcagctttcacatccattgatgcaagcggcaatgctagagtagacttgcttgtatcgaaggacactggcaaggtatacattaacgaaataaatacaataccaggttctattgcgttttacttatgggagccaaagggctactcatttaaagacttaatcactaagatgattggtatagcaaaagagattgacactatgagaaaagaaactgtttactcatacgatgccgaactctttaaacgtattcaatacggaaagaaattataggtgataaaatgaaaatcagggaacttgtaatgaactattttaatagagaagactatgtaccccaaagcaagaaggacttactaagagcgtttaagattacgaagaaagataagaaaatatttgaaagacttcttaaatcattagaaaaagacaaaaaaattatttgcagcaatgataaatattacacttacaacagttcccatataataaaaggaaagtatgaagctaataaacgtggctttggcttcgttataggtgatgactttgatgtcttcataagatttgaaaactcgatgtacgctatggactctgatgaggtatgcgctataatcacagagaagaaacttgatggtaactatgaaggcaagataatcaagatattatccagagctacaaagagggttgttggaacttatcaagacaatggcagctttggctttatcagatgtgatgatgtcaagattatatatgatgtctttatcaataagagcaattcaaaaggcgcaaagcatggtgacaaggtagttgctgagatcattaagtatccagacaaaaataaaaatccagagggaagagttgttgagattatcggtaaagaagatgatccaggtatagacatcacatccatcattaagtcgtacgaacttagagagtactttccaaatagagttaaagatgaattagaagatattaactatgatataagctctgaagagatagagcgcagagtagactatagagacttattaacggtaactatagacggtgttgactcgaaggacttagacgacgccataagcttagtgaaaagtggcgatatgtatacactctacgtacacatagcagacgttgctaattatgtcaaggagcgcacatacttagataaggaggcttacttaagaggcaactcatactacttacttgatagggttctaccgatgcttccaaaagagctttcgaatggcatatgctcacttaatccaaatgaagataggctaacactatctgttaagatggatatagataagaacggggaggttttaagtcacaagatatcagaggctgtgattaactctgactacagacttaactacacacaagtttcagaccttttagaaggcaagaagaaggcggctgaacttggtcttgatgctatagaagatacgcttaagaacatgcaagatttaatgcatattcttaatgataagagaaacaaaagaggtaacatagactttgacatcgttgaaacaaaagttgttttggacgagaaaggcaaagttcttgacataaaaccagaagaaagacgagttgctaataagattatagaagagttcatgatagctgctaacgaaactgtagctaaggaatactttatgaaggacttgccttttgtatatagagtacatgagaaaccaaagagggagaagatgttctacctttctgagttcttgaaacgctttgacttatacattaaccctgataatgttactccagctgatttggcaagggtgcttaatgaacttaagggtaaaaaagaatcggcacttatttcaaacatagttcttaggactatgcaaaaggcgagatacacttatgaagagcttggtcactttggacttgcttcgaagtactactcgcacttcacatctcctatcagaagatactcagaccttattattcatagaatcattaaggactttatgaatggcagacttaaggaaagcaagattgtttactacgagaagaaccttgatcagatgacaaagcatatatctgaaacggagcttgttcaagagaaggcagagcgcgacatagtacaaatgaagtgtgctgagtacatgcaagataagatcggcaatgtttatgttggtgaagtttcatcactaacatcctttggcgtatatgttatgcttgagaataccatagaaggtctttgccactttgcaaatatggatgatgacttctattattttgatgaaacagaatacaaagtcatcggcaaggactcattaaatgaatacaggataggtatgaaggtaagagttgctgtccttgatgcatcgaaagagacgagaactattgattttaaaattcttggagtggttgaatgaaagaagaagatataaaagttgtagctaataataaaaaagcgagacacgattattttatagaaaagacgtatgaggcgggcttagttttaaaaggcaccgaagtaaaatccattagacaaggtagagtgaatttaaaagagagttatgtaattgttaagaatggtgaaattttcgtctttggtatgcacgtaagtccatacaaggaaggcaatatatttaacgaggacccacttaggacaagaaagttattgctcaacagaaaagagattagaaagatttctcaagatataaagcttgagggctctactgttgttccgctaagattatattttaagcacggaagagcgaagcttgagatagcacttgctaaaggtaaaaaactttatgacaaaagagagagccaaagagaaaaagacattaaaagaagtattgatagaaagtataaaatctaggaggtaagcaaatgaaaatcggtgaatcaagagaaaattatttagagatgatactaatgctacaaaacaaaggcattaaggttagaagtacagacgttgcgaaggcccttgatttttctaagccaagcgttagtagagcagttggtatattaaaagaagatggttatatcgaagttcaagacgatggcgagctaacatttacaaaggaaggcgaaaagctggcaaaacttgtttatgataggcactgtacacttagaactttctttgaaaatattggcgttgaccatgagaatgcaaatgatgatgcttgtagggttgagcacgttataagccaagtcacatttgataaaataaaggaattagttaataaaggtaatgaataatattttagatagattaaacgcaagccaaagggaagctgttttatataacagtggtcccttattaatcatggctggggcaggttcaggcaagactagagtagtaacatacaagattgcctaccttatagagaatgcacttgcgagtgaaaacgaaatacttgcgataacatttactaataaggctgctaaagagatgaaggacagagtggcatcatttttaaataaagacatctcatccatgtggataggcacctttcactctatagcactaagactgcttagacgccatgcaaaccttgttggatatacaaacaactttactatatatgatagagacaatcaattgactcttatcaaagatatacttaaagagcttgagcttgatccaaagacttatgtgccatcatactttattaatttaatatctacattgaagatgcaaaacttggatgcagatgaatacgaaagcatttctgatagctatagaaagaaaactgatgcagaagtttacagattatatcaaaagaagttgctcgagtatgatgcgatggactttgatgacatgatagctaactgcgttagacttttagaagaaaatgatgacgtaagacaaatttatcaagagagattcaagtatgtctttgtagacgagtatcaagatacaaactatatgcagtataagatggtaaagctgctttcagatctttacaagaacatctgcgtagtaggtgatgcagatcaaagtatatatggctggagaggagcagacatcagaaacatcttaaactttgaaaaagattataaaaatgttaagactatactacttgagcaaaactataggtcgactaagaatatattaaatgctgctaacaagattataaagaacaacgacgagagaaaggataagaacctttggacagataatcaagatggagatgacatatattgctacatgacgcaaagcaatgtggaggagagctactttgttgcgcaaaagataaaagagctattgaacgaaggttataaggagagcgactttgcaatactttatagaactaacgctcaatcgagatcttttgaagatatgttcttaaagtttggcatcaaatataacatagttggcggagtaaagttctacgatagaaaagagatcaaggacatacttgcctactttaaatttttggataatacaagcgactttatctctcttaagagaattataaatacaccaagaagaggtattggagacaaaagtgttgagagtataacagaagatatgattaataagaatattagcctttatgatgctctatccataagcaagaataaaaagataaaggatttttatgaatgcatggactacatcaagaagctaaaggacaatcttagcttgtcagagctatatgatttagttttagataagactgaatatcttagtgcacttgaaagtgagaacactgtcgaagcaagaacaagaattgaaaacttagatgagtttagaaaccttttacttgattacgaagataattatgatgagattacacttaaagacttcttaggagagatttcacttttaactgaccttgacaagacagaggataagggcgaggcagtaactatgattactatgcatagcgccaagggtcttgagtataatatcgtcttcatagttggtatggaagacggtctcttcccaagcgaaagagctatcgatgagggtagtcttgaagaggaaagaaggctttgctatgtagcagtgactagagcaatgaagaagctgttcttaagcttagctaaagagagaagagtttatggacaaactatagtatctaaaccatcaagatttattgatgaagcacaagacgctgtaaagctagttaactatagatcagataaatttgatgagagctctatatttgaaagctcagttaataacaaggcttctcatagagagcaaagctttgacaagactgtttcacgttttaaatcatttagcggaagcgaaggcccatcaggtgataagaaagacatcaaggcaggcgacaagattaagcacaaggcctttggtgaaggtatggtcgttagtgtcaatggtaagaatcttactataagttttccaaataaaggtattaaaattttgaatattgattttgcaccaataaaaaggatagattgatatggacaggatggaagaattaatcaagaagctagaggagtataattaccactactatgtgcttgatgaccctatagtttctgataaagaatatgacaagttatacgatgagctagtgaagcttgaaaatgaaacaggagttcacttgccatactctccaacacagagagtaggcgatgcggtgctcgataagtttgttaagcatacacaccttggaaggctttggagtcttgataaggctcaaagctttgatgcacttagacagtggcacgagaagaaccttcgcttcgtaaattcatacaacgaaacacatagtgacaagcttcaaaaccttgagtatatacttgaatataagttcgatggccttactatcaacctaacatacgatgaaggaatttttaagatgggagcaacaaggggcaatggcgaggtaggcgaagagatatatgagcaggtacttaccataaagtccatacctcttagagttaaatacaaaggcaagtttgaggtacaaggcgagggccttatgccgctatcaaaacttgaagagtacaacgaaaagaacgaagtgcagcttaagaacgcaaggaacgctgcagcaggtgcgctacgtaaccttgatgtgaaggagaccgagaagagacatctaataacttatctatacaacattgcttatatagaaggcaaggagtttaagactcaagaggagattgtggagttcattaaagataacgctcttccagtttcgaattatcataaaaaattttcaagcatggaagaccttcttaaagagatagatatacaaaaagaagaaagattaaagcaggatttcttaacagatggtatggtaattaagataaacgatgtaaaaacgcaaaagcttatgggatatacaaataaattcccacgctttgctatcgcatataagttcgaggcacttgaaacatctactaggatcataggtgttgagtggaatgtcggtagaagcgctaaggtaacgccaacggcactattagagccggttgatataggcggagtcactataaagagggcgacacttaataaccttgaagacataaagagaaagaaccttcatttgaatgagagagttcttattagaagatcgaatgatgttattccagagatcatggggccactaaagactgatgaagaggtctacgacataaagcagccagacagatgcccttactgccatagtaagttatataaagaaggagtacattacttctgtcctaatacattaggatgcaagccacagcttgttaagaccatagtccactttgcatccaaggaagcgatgaacatagatggcttcagcgaaaagactgctgagttattcttagaaaagcttgacatagatcaagtgtctatgttatatgaccttaaagaagaagacctacttaagcttgatggcttcaaagagaaaaaggcaaaaaatattattgattcgatacaaaactcaaagacagtacagcttaagaactttatatatgccttgtcaataccgaacgttggcgtaaagacaagcagggatcttgcagagcactacaagagtgtagaaaactttttaaaggcagactttaatgacctaattgctatcgaagatgttggtgaaataactgcaaatgagatagtttcattcttaaatgatgaaacgagtgagaagtctatacaaagtttgtttgagcatggtataaaggtgttagacgttcaagaccatggcgatagatcactggaaggactaaagtttgttctaacaggtacgcttgaaaactatacgcgtgatgaacttaaaaatattcttgaagaaaagggggcaaaggtacaaggctctgtatcatcaaagacagattatgtagttgttggtgagaaccctggttctaaatttgataaagcgaagactttaaatataaaaatactatatgaaaacgatctgaaggagttgatatgatggatagaaaagacattgaaaatctatgctacactgccagacttgcaatcgatgagtcagacatagatgcattcacaaagaagtttaatgatattatcgatatgatatctgtagttaatgagctagaggataaggacatagctaagacttatcaagttaacgcttataaagagtgcttacttagtgatgacgtagttgatactgagtatatgatatcaaaagaggaagcacttaagaatgcaccagaagaaaaatttggtttctttaaactaaaaagagtagtagaagcttagtataggagttatttatggatattacgaatttaaaagcatggcaattaaaagaaaaaattattaataaagagcttaaagtttcagaagtaacagaggcttttattaatagaagcaaagaagtagataaagatatcaattcattcatatcaaacgattttgaaggcgcatttgaaagagcaaagtctttagatgataaagaagcaaagggcaagttatttggtctacctatcggtataaaggacaacatctctgttaagggaatgaaaaacacttgcgcatcaaagatacttaaagactacgaagcagtttttgatgcaaattgcatagagcatataaatgaagagaacggtatcatacttggtaagttaaacatggatcaattcgctatgggtggttcgaacgaaacatcatactttggtcctgttcataacccacttgatctaaagagagtgccaggtggttcatcaggtggatcagctgctgcagtttcatcaagacaagtgccacttagtctaggtacagacacaggtggttctgttagacaacctgctagctactgtgcttgcgttggatttaaaccaagctatggaacagtatcgagaaacggtgttgtatctttatcaaacacacttgatcaagtatcaacatttgcaaacgatgtaaaagaccttgcacttatcacaagtgccatcacacataaagatcacagagacctaacaagtctctctaaccctattgatgagattacttatacttatgatgaggcaatcaaatacttaaagtccatcaaagtaggtgtacctaaagaagttttagaagatgaaaaagatcctgaagttgaaaaagcatatagagagagcataaaactattaaagaacaatggcgttgagatagtagagatagacctaaaagatcttaagtatgcagtttcaacatactacatcataatgaacgctgaagcaagttcaaacctttcaaggttcgatggagttaagtatggcttaagagacttcgatgcagaaagcttagaagagatgtatattaagacaagagctgaaggcttcggaccagaagttaaaaggagaatcttattcggaacatatatacttagtcaagacaaggacagagattacttccaaaatgcattaaaggcgagaacacttttaataaatgatttcaaagaagcatttaaaaaagttgatacattattactaccaacatcgcctttaatgccgtttgaaattggagctaatatcaacgatccaataaagatgtataacgcagacaagtacactgttcctgttaatatagcaggtaactgtgctatatccgtgccaagcactaaagagcacatattaaattctggtatggaatttatctgcgacaacttagaggacaataaacttatcaagattgcttacgcatatgaagggttggtgaagtagatggcttataaaactattgttggacttgaaatacacgttgaacttaagacaaagacaaagatgttctgccattgcaagaatgaatttggtgaagaagctaacacaaacgtttgtcctatatgcctaggactgcctggagctttgccacaagttaataaaaaggcgatagagtatgcgattaaggcaggtcttgcaatgaactgcaagatacatcagcacactagattcgatagaaagtgctacttctatgcagaccttgttaaaggatatcaaatcacacaagatgagcttccactatgctacgaaggttacattaatatcgaagacgaagaaggcaatgaaaagaagattaggttgataagaatacatgtagaagaggatacaggtaaatcacttcatacagacaagggcgaaacacttcttgactacaacagaagtggtgtaccacttatagaaatagtttcatacccagatatgaactcagcaaaagaagcaagagagtttttggaaaagcttaaggcaacagttatctacctaggagtatctgatggtaagatggaagaaggctctttaagatgcgacgttaatgtcaatgtagttgacacagagacaggcgttaagacaaacatctcagaaattaaaaacatcggttcatttagaggcgtagaaagagctatcaatttcgaagaaaaaagacacattgccctacttaaagaaggtaagaacactaagaaagaaacaagaaggtgggacgaacttaagggcgagtctatattaatgagagagaagataaaggctaatgactatagatatgcaccagatggcgacataccacctatggatatatctgacgagatgatagagatgcttagaaaagagatgccagagcttccagacgaaaaagttgcaagactagttaaagattacggcataacgaagggcgatgcaaagacacttagtcttgatgtaagccttgctgattactatgaagagcttgcaaagaaggtaggcgacaacgcacttgcacttaactggctactaggcgacgtactaagaagacttaaagaagacaacaagagcattgcacaaatgccatttgccattgaagatcttgaaaagctacttacacttgttaagtcaaacaagattaacaacaatgcaggaaagaaagttcttcaagagatgtttaaggaagcggaagaccctgaagcaatcgttaagagacttggtctagttcaagtaacagacgaaggagccatagaagaagtcgttgataaagtcttggcagcaaatccacaatcaatagaagactataagaatggtaagaacagagcctttggtttcttagttggacaagtaatgaaagagatgaagggcaagggcaacccacaaataataaacgagttattgaacaaaaaattaaaatagcataagacgatatttatataaggcacatcgcaagatgtgcctttttttatatatagtccacgcttctaatatagtaatgagtctctcatatagttatacgcttcttatatataagcaagctttcaatatactcccacgcaacttacactagttgaggcttacattgttacatttgtgtaacagtcattgaaaaaagttgcattttgatgcgattgatgttaacatattaattaggaggcatgactatgagaaaatttattttaagtctacttattattttttgcttattaagctcaagtaatgcgtatgcaaagaagattaatgtgaaaatttcaaataaggaatataaaacgcaaacggttaatgtaaaagttgatggtgtaaacaaggtaagtaaggatatgccaagctttatatacaagaatagaacccttgtacctataaggtttctttcagagacttttggtgcaaaggttgattggaatcaaaagacccagtcagccatcataactatgacagataagaagattgtcttaactattaacaaggctgtagcaagcataaacggcgtgcaaaagaagcttgacaactcatacacaccgagaattatcagggtcaatggtggcggagcaagaacttatgtaccgctaaggcttatctctgagatttttggatacgaagtctcatgggatcaaaacactcaaacagcgatcattaatactaatactagctctgcagccaatgaagaagatgatgatgtaataattttaccaagcgttgatgaatttgatgagtttaaacctaatcaagagacgataaagccaaaccctaatgataataatcagcctacaattaagcctaatcaagataattatgcacatctttcaactatagttgcgactacttataataacagagatgctatattatttaaaggcttaaggggcaagtacaaggctatgatacttaataatccagacaggcttgttcttgattttgatagcgcaatctttgatgatcctgaactgtatagagagtataggattgcctttaatggcatcaagggtgtaagagctagtcagtttgcagacaatgaaacatcactagctgataagaatgtaagagtggttatagatcttgaggatagtgctattgattatcaaatagatgatactaatgatggccttgtcttctacttaaagagttcaatgaagaacttctacacttatgacggtagaacttttatggtcaagaatactgaaggcagagtttctgattactattatgataacaataaaaagactgtgactatgaatgttgagacttataagaacattgagactggaactgaaaagtttaaagatccattcataagttcacttagcatagaaagagcggctaatggctacacttataccataaatctagtaagaaatgtactcatagaaaagcttgatactagagaagctgactatgcaattaaactaagtagaattataaacaacaagccatctgactacttgattatgatagacccgggtcacggaggaaaggacccaggaggagtatcaaagattgatggttctagtgaagttgactttatcccgatagttgctagagctttggaggcaaaacttaaggctgcaggctacaatgtcatgaaaactaatgatactatcgatgaatatgttgatattttcgaaagagctaagatggctaatagtgttaacgcagatgtatttataagcattcatgcgaatgttgctgattcaccagctgcatctggctttgaggttctttactcgagtgaagcaaagcataagaacaagactagaaatcaaaaagagcttgcgacttgcatactaaacgctgttggagaccttgtaggtaacaagggccgtggccttaaggaaggcgcctatgttgttacaagaaataccaatatgccagcagctctacttgagatggagttcttatcaaacaagaagggtcttgcactactaaagagccaagcctaccttgacaagatggtggatggtttattcaatggtatagtagattacttgaacaattattattagaggttgattatgaaaaaagttgttgtatcgacaaataatgtaaataagttaaaagagattaagttaatatttcacgagctaggctacgaagttctttctaagaaggaagcaggcattgctgactttgatgttgaagagagcggtactacgttagaggagaacgcctacatcaaggcgaaggttctgcgtgatatggtggagtgtgcagtaataagtgacgactcaggtctattctgcgacggactatatggcgagccaggtatatactcagcacgttatgcaggtgagcacggcgatgaccacaagaacaacgagctcttgcttaaaaatcttgaaggtagagacagaactgctcacttcaagagcgtcatttgctttatagacgacaatcataaagtcttttatggacatggcaatgtcgatggcgagatacttcatgagtacagaggcgaaggcggctttggctatgatccactcttcttaccaaagggtcatgacaagacttatgcagagataggcacagaagagaagaacaagttctctcatagaaagagggccttagaagatataaaggaaaagatcttacttgaagaaagacatgaggatttatataaaaaggttgattttgcacttaagcttgatgagatgaaaaatatattcagagtgaacaagatagctgatggttcaagaagagaaaacgatgctgagcacagctttcacgcggcagttcttgcgccagtatttaaggacatgggaaagtttgaagttgatgcaaataagacagcagtcttgcttttatatcatgatttaattgagatatatgcaggcgacacatattgctatgatactaagggcaatgaggataagaagcaaagagagaatgctgcagcagataaattatactcaaagcttggcacacttggctcagagctaagaaagtactgggatgaatttgaagcttgtgagactaatgaagcaaagtatgcaaatgcacttgataggttccaaccactcttgatgcactttgcctttaactcacattcgtggcaagatcacaatataacaaaagaagccgttcttaagaggatggcacctataaagatatattcagacgagatgtatgatttcgtattggattatgtagaaagtcaatttaagaaagaggagatgaagtaatgaagattacacttaacaagaagaatggtatcaaagttttaccggtatttgaagatgacagagagttttttgaaaaggcagaaggacttgacgccttagtagaaaaagaatacttcacaggcaaggcgagcgaagtatttgcaaagcttggcgaagatgacatcatataccttggccttggtaaaaaggacgagatcactacaaagaagattatcgttgctttctttgaactagcaaaggcacttagaaagtataagattaaagacgcaaacataattttcaacaagaagcttgataagatttgctacaagactactatgaaggcaatagttgatggccttgcatgctttgattatgactttgataagtatttatcagaagataagaagggcacaaagcttggcactatcaacatagaagttcttgctgacaaggtagacaaagttaaagatgctgtagaagaagcacttaatatagccgaaggatattcattaactaaggatttagttaacactcctgccatagacatgtatccagaagttttagctaagagagctaaagaagatcttgagccgcttggcgttactgttgaagtgtatggcaagaaagagatagaagagcttggcatgaaggcattcttagcagttgcagttggttctgacagagagccaaagcttatagttatgaagtatatgaatggcgaaaaagatgataagcttactgcacttgttggtaagggtttaacatatgactcaggtggatattgcatcaagcacccacaaggcatggcaactatgcacatggacatgggtggagcaggtgctgttataggcgcaatgcacgctattgccaagaacaaagttaagaagaatgttgtagcagttgtagcttcatgtgaaaacttaatctctggcaaggcatataagactggcgacctaatcggttctatgtcaggcaagactatagaagtagcaaacactgatgctgaaggtagacttactctagcagatgctatatactatgctggtgaagtgcttaaggctgacaggatagttgaccttgcaacacttacaggagcgtgcgttgttgcacttggctcatatagaacaggtgttgttacaaacaacgatgagtttatgaatgaaatgcatgaagcatctaagaaagcagatgaaaagctatgggtaatgcctaacgatgacgagtataaggacatggttaagggaactatgactgatctacttaactcagtacctggcggcgctggtatgatcacagctggtatgttccttgaaaactttgttaaggaaggaactccttggatacacatggacatagcaggaacttcagacacttcaaaggactatgcacaatacaagaaaggctcaactggagtaccagttaagactctttattatttaataaactctgaacatacttgctaatattttaatatatacaaagcgaaagctcttctcaaacgagaagagcttttctaatgcaaaattatttacttaaatatttattatatgcttcttcgtctacaactaagtcgaactcacctataaactcagtgaagtcctcttcgtttaagaagcctcttttgaatctgtatagaccatcttcatcatcaagcttaaatatgccgccaaagtcgtagcgcatagcgccatgagcctttgcatacttaatcatctcccactgcatttgatagtttggcatatagtttctgtgaagattgtttgatgcaccgtacatataccacgcgtagtccttatacatgatgagtatcgcgctagatagaggagtagcttcaaagtctgttaagaaaatcttcgcatcgtaattatcgatgagccttttgaagtagtccttcggtctatatgttatgccgttacgctcagccatgaccttagtttcttcgaagaatatctctaagtcctcatcactttgtgagatgcgagtcgtaacatttttcttgtagcttaggcgaatgttgtagcgagtctttgagtggaagcctctcagtatatcatcctcagacttacttatatcgatgatggcgttccttcttggctgtatgaagctatgctcatcagtgcctctcgttcttagttttaattctgcacccttgtatagctcaagaagtttctcatcatagagaacggctggatcgaatcttaataaaaaggcatccttgaacttgtctaattttttcacttcatcaactagagctaaaacagttttcttatcatatatatcgcacactggtcctctgttcgcatataataagtacttatcatctaccgccttgacagatagtatactcatagtagcgtatatagctccatctttttctaagtagacatagtcttcggaccaattattttttatcttcgcccacgctctgtcctgagtcaagaaactgtactgagacttgcgaaggaagtcgtcgtatctttttacttcgtttgcatcatttaagtttaatataggcatctaatctatcaacttctttctaattatattgcgtttatactataaacattataacacaaagtattcttccttgtatagagataaaaaaattcatcattcttatgcaattagagtgcaaaatatgttataattaaaaaggaggtctttgtatggagaacaattttaacaataatgataataatataaatgataatatagatattgaagcaaaagctgcgagtgaaaatgaagttttagaagcggcagaggcgcttgctaaggctaaagccgatgacataaagtcgtggatagtctctatcgtttcgacggttgtcataacacttttcttagtaaactttgtctttgctctaacaagggtagaggggatatcgatggagccgactctacatacaggtgacagggtctttgagtggaagctctttaagtactttaaggagcctaaaagacaagatatagttgtcattaagggagagaagacaaacggcgaccactatattaaaaggctcattggtctaccaggcgatgttatcgatatcatcgatggtgaggtctttgtcaatggcaaggcacttgatgagccatacttagatagaaagactagcgaacaaaacggtaaccactgggttgtgccagaaggatgctacttcgttatgggtgacaacagagaaggaggaaactcttatgactcgagaagtttcggccctatagagaagtcatatttacaaggtaaggccgtgtttagattttggcctttgaataaattaaaattatttagataggatgataagatggatcaaaaatatattcgtaatttttcaataattgctcacatagaccacggtaaatctactttggctgacagaattatcgaaaagactggactacttactcaaagagagatgcaatcgcaagttttagatagcatggaccttgaaagagaaagaggaataacaattaaattaaaggctatacgtctaatatataaagcgaaggatggtcatgactatatctttaaccttatagacacaccgggccacgtcgactttaactatgaagttagtaggtcactaaaggcgtgtgaaggtgctatactagttgttgacgcaactcaaggtgttgaagcgcaaacattatcaaacgtgtacttagctatagaccaagacctagagatacttcctgttattaataagatggacttaccgagtgcaagacctgaagaagttaaggaagagattgaagatatcattggccttgatactagtgaggcgccacttattagtgcaaagagcggactaaacattgaagatgttttagaagacatagtaaagaatgtaccaccaccaaatggcgataaggacaagccacttaaggctcttatctttgactctgtatacgatgcttacagaggcgttatctgctacatcagagtttttgatggcgtgattaaaaagggtacaaagatcaagatgatgcaaacgggatctacttttgaagttgatgaagttggtgtaaacaatacatcactactaaagaaggatacacttgaagcgggagaagtaggttatttcactgcacaaataaagaatgtaaaggacgctagagtaggtgacaccatcacatatcttgacaatcctactgctgagccactaagtggatataagaaggtagtacctatggtttactgcggtatatatccagcagagggcgaggacttcaacagcgttagagaagcacttgaaaagctacaagttaacgatgcctcacttgtttttgaagcagaaaactcagcagcactaggctttggttttagatgcggcttcctaggactacttcacatggagataattactgaaagactagaaagagaatttaacctaagcataattactactgctccatcagttatatatgaagttcataagaaagatggctcaacaatatttatacaaaacccatccaaccttcctgatccaagcgagatcgattacatggaagagccagtcgttgatgcagagattatgactccaaaggattatgtaggagccatcatggacatatgccaaaacagacgtggtgagtttataaatatggagtatcttgatcaaacaagagttacacttcactacaagatgccgttaaacgaggttatatatgacttcttcgatgcacttaagtccaacactaagggctatgcatcgcttgattatgaaatttcaggttatcaaagaagcgatcttgttaaggttgacatacttatcaacggcgacctaatcgatgcgttcagcttgatactacacgagtcgaatgcttacgaaagaagtaggtccatagtcgaaggactaaaggatgttataccaagacatcaattccaaataccattgcaagcagccatcggctcaaagattatagccagagaaacaatcaaggcacttagaaaagatgttcttgcaaagtgctatggcggcgacatttcaagaaagaagaaactacttgaaaagcaaaaagaaggtaagaagaggatgcgtcaaatcggctcagtagagcttccacaagaagctttcttatcagtattgaagtacaaggaaaagaaataatgaataaattaggaatatatatacatattcctttctgtgaaagaagatgtaaatattgcgattttacatcttctatttttaatcaaagcagaatgaaggagtatctagaacatttattattagagataaaaaacaataaggagctcttaaaggattacgtagtcgacactatatttataggtggaggcacaccatcattattaagcgtagatgaattaactcgccttgtgaatggcttagctgaggctataatcttagatgagacttacgagtttaccatagaaacaaatccaaactccataagtgaagaaaagttacaagcatatagagagctaggcattaatagaatttctataggagtacaaagctttaacgatagactgcttagaatcataggcaggctgcacacaggtgaggaggcgcgagagaagataaaattagcgaaacaatattttgacaatcttagtcttgattttatattctcactacctacagagactttatcagatgtgatagcgtcgatcgatgcagcaaaggacttaggcgccaatcatgtatcgctttactcacttatacttgaggaaggaactaagcttactagcttagtagacagtggcgtatatagagtgaacgaccaagtgacagataggctcatatatagaaaggcagtaagtcaccttaaggagcttggatataagcaatacgagatatcaaactttgcaaaggatggctattactcaaggcacaattacaaatactggtccatggatgagtacctaggacttggcatggcggctcactcacttattaaggacaaaagattttttaatttggatacatttaacgagtactttgacgatgtgaagaaaaatatttatcacgacgaagaagacttaagtaaaaaagataagataagtgagtatataatttttaagctaaggactaacgaaggtataatcataaatgaaatcaataaaaaatacgatatagactttgaagatatatataaggaagaattaactaaggcaatgaacgaaaagctacttaaaaaagatggcggaagatacttttacacagagcttggtagggaccttgcaaaccaagtggaaatactttttgtataaggagaggctatggacgagataattaaaagagcaattgagtatctagataatatttttagtggcaactcagacggccacggcgctgatcacagcctaagagtgtataggaacgcttctatgataagggcggcttataaatgcaatgagctctacgtagatttaggagctcttctacatgacgtggacgatcataagctatttaataataagcacaatgaaaacgcaagaaaatttttaagtgataataattttgatgtcgaggcgatagaagatattgtagagattattaactcagtttcattcacaaagaacaagggtgctaaaccaaagactcttgaagcgtgtatagtgcaagatgcagacaggcttgacgcgataggtgcagttggcatagcgaggacctttatgtatagcggaaggcataagcgtggcatagaggactcactaaaacacttcgacgagaagcttttactattaaaggatatgatgaatacggatcaagcaaaaaggctcgctgatcaaagagataagtttatgaaagaatttttatcagagattaatgacgagcttaataataaacaatagattactatatagaaggcgatgataatatcgccttttttatatttataaggctttttgaataaaaattttaaaaaaaagtaaatatttttcaaaaaagcttgatttttttattttattgggtataatagaaatagagttagcactcactaggtaagagtgctaacaaaaatgatggaaggtgatcaattggatgagagaaaattaaagattttaaaagctataatcagctcatacaatgaaacaggtgaaccggttggctcgagacttgttgcaaaagacgagtccattggtcttagctcggcaactattcgtaacgagatgcaagaccttgaggaagcgggctacttaatcaaaactcatctttctagtggaagggtgccatcacaaaaagcgtatagactatacgtcgacatggtgcttaagcaagactttgaaaacttatcttcatcagagaagaaatttttcttagatgatataaaggataagtcgaagaacttagatagtatgataggaaagatgtcaaaagttttatcaagcttaacagactttacatcgctagcctatataagaaagagcggtgctacaaagcttaagagcttagagcttttaaaagtcgacgataaaaaaatacttgccatctttgtatatgaaaactttgctatagataagacactgataacacttaatgaagatataaacgaagaagagctacagtactttaaggatattttaaataagaatttagctggtaagtcgattgactcggttgatttcgattctttaaaatatgaaaaggaaagccttcttaagtatagagacattctagagagtgttttggaaaagttttcacaagaagacaaggcaaataatatgaacagcatattccttgaagggataaataagattttaaactatccagagtatgcagactttgataaggctaaagagcttatagagcttctcgaagataaaagaggtctactagatttgcttgagagtgaaaatttggataaggatcttgttatcaagataggcaatgaaaatgatatagatatcttcaacaacattgccctagttttaaagaacgtaaacatcttagataatgaagttacttttggattaatagctccaatgagaattgactacaaaaaagttctttctatatttgatgattttcatatggatgatttattttaggagggattagatgaagaaagataaaagtattaatgaagatatggataatgaaaagcttataaatgaagaagctagcgaagaaaaagagactagtgaagatcaagacggcttagcaaatgagataaacgacatgcaaacaaagcttgtaagactacaagcggactttcaaaactataaaaagagagttgagaaagagaaggacgaccttgtatcgataggcgttgttagcatcgcaaatcaaatactacctgtcattgataacttcgagagagccttggagcatgacagcgagagtggttcttttaaggaaggtatggtacttatctatgaaggacttaaggatgctcttaaagcaaagggcatagttgaattaaaggcactaggcgaggacttcaatccagattttcatcaagcggtatctatgggccacaacgatgagtataaagaaaatcaaatcatagaagtattacaaaaaggttatgagtacaatggcaaggttattcgccatgccatggttattgtaaataaataaaaaaattattaaggaggaaatatattatgggaaaaataattggtattgacttaggtacaacaaactcttgtgtatcagtaatggaaggtggagaagctataatcattcctaacgtagaaggtaacagaactactccatcagttgttgcattcacaaaagacggagaaagattagtaggagaaacagctaaaagacaagctataacaaatccagacagaactatatcatcaatcaaaagagagatgggtagtaactacaagattgacatagacggaaaagattatacaccacaagatatatcagcaatgatattacaaaaattaaaatcagacgcagaaagctacttgggagaaaaagttacagaagcagttatcactgttcctgcatactttacagacgctcaaagacaagctactaaggatgctggcaagatcgcaggtcttgaagtaaagagaattattaacgagccaacagcagcagcacttgcttatggcatggacaaagaacacggtcaacacaagattatggtatatgaccttggcggtggtacattcgacgtttcaatactagaagtaggcgacggtgtatttgaagtacttgctacaagaggtaataacaaacttggtggagatgacttcgaccaaagaattataaattatatcgcagacaactttaaaaaggaaaatggcgttgacttaactcaagacaagatgagcttacaaagattaaaagaagcagcagaaaaagctaagaaagagctttctactacaatgacaacaaacattaacttgccatttatctctgctacagcagctggtccacttcacttgaacatggacttaacaagagctaagttcaatgaacttactcacgacttagtcgaaaaaacaactgagccagttagaatggctatcaaagacgcaggtattgatgcaaaagacatcgacaaagtattactagttggtggttcaacaagaatcccagctgtacaagaagcagttaaacaaatcatcggcaaagatccacaaaaggacatcaacccagatgaatgtgttgctatcggtgcatctatacaaggtggagtattaacaggtgaagtaaaagacttattgttactagacgttacaccactatcacttggactagaaacattaggtggagttactacaagacttattgaaagaaacacaactatacctacaagaaagtcacaaatattcacaacagcatctgactcacaaacttcagttgatatacacgtgcttcaaggtgaaagagagatggcagctgacaatacaacacttggacgcttccaactagaaggtatagcaccagcaccaagaggaattcctcaaatcgaagtaacattcgatatcgacgctaacggtattgttaatgtatcagctaaggacttaggtacaggcaaggaacaaaagattactatcacagcttcatctaacttatcaaaagaagacatagataaaaaagttaaagaagcagaagagtttgctcaacaagataagaagaaaaaagaaaatatcgaagtaaagaacaacgcagatcaaatgatatatcaaacagaaaaacttatgaaggaccttgaaggtaaaatctctgacgatgaaaagaaagacatcgaagcaaaacttgctgaccttaagaaagcaagtgaaggctcagactacgatgatatgaagaagaagacagaagatctaacacaagccttctacaaagtttctgaaaagctatataaacaaaatgcacaggcaggtgcagctggcccacaagcaggtgcacaaggctctgaagaacataaaggcgatgacgatgtagttgatggtgactatgaagttgttgacgaagataaataagatttattagatttagattaagaagaatggagatcagcttcattcttctttttttttacataaagcgaagcatatacttttatttttcacgtatatttggtataatataatgtatatgataagtattttacatttagaaagggtgtaagttttgaaagatttatacgaagttttagagatagagtcaactgcgactgaagcagagataaaaactcaatatagaaagcttgcaaagaagtatcatccagaccttaatcctggagacaaagaagctgaagcaaggtttaaggagatatctgctgcttatgaagtcttgggtaatgctgagaagagaaaacagtatgatacatatggcgagtcgatgtttcaaaatgctggagcgggtgctggtggatatggaggcttctctgatgatatatttggagacatctttgatatatttggcggcggcttcggaggcttttcatcatcagctgcacaaagtaaaaggcctatgtatggagaggacgttaggtataaccttactatagaactagaagatgttctcaatggtactcaaagagagatagagatagacagagtagaagagtgctcacaatgtcacggaagcggagcaaaggataaggacagtaagaagacatgtacgacatgctctggtagaggcactattagaaaagagaagagaacggcatttggagtcttcattcaaagtgatgtgtgccccgactgccacggaacaggagagataattactgaggagtgtccacactgccatggcaatggtactgaaaagaaaaagaaaaagattattgtcaatgtgccaaagggtgttcgtgaagacagcgttatcagcataagaggcgaaggtagcgttggcaagaatggcggaccaaatggcgacctaaacgtttacatcgacataagagagaacaaaaaatttaaaagaagcggcgatgatttatatacaagcgttagcataaattatttgcaagcagttttaggtgatcagattgaagtcgatacgcttgatggcaaggtgaagcttaatatacctgaaggaactcaaagtcatacgaagtttaaaattgcgggcaagggtttatatccacttcacaaaaactatagatgcgatttatatgttgtagtcaaggttgatgtgccaaagaatttgactaatgaacaaaaagaatccttaataaagcactttaaggatatgaattttgattatgagcctaagaaaaaatcattttttgaaaaaataaaagaaaagctataggagttaaaatgaattatagagaaattaaattaaaatttaaaaaagaatatgaagaaagggtcgaaattttcttatctgaccttggtattgacaacatggctatagaagatccagacgatttaaagatattccaagaaagacaaaatgcttgggacttatatgatgacgacctaataaaattagaacaaggttatataagatttaccatctacttagatgacatttctgacaacgacgagagagaagctaagattaaggctcatattgaagagcttggaggagaatttactaaggaaattattgacgacagtgattggcaaaacaattggaaaaaattctttaagattttaaagccaaacaaaactatagtcatagttccaacatgggaaaagtatgaaaagaaagatggagaagagatcattaaattagagccaggcatggcatttggaactggctcacacgaaacaacagctttatgcataaagaagcttgaggagtatatgaagcctcacatgaaagttcttgacataggtacaggaagcggcatactatcaatcgcagcatcaaagctaggtgcaagcgaagctctaggtgttgatatagatccaatgagcgtctacattgctaacgaaaataaaaagctaaacgaggttacaaatgtaaacttcatagttggagatctactttcaaaggttaaggacaagtatgatatagtagtttcaaatatacttgcagaagtcatagttacaatgacaggagatctaaacaagtttttaaacaaggacggaatttttatatcttcaggaatattaaaagtgaagtcagccatggttatcgattcacttgaagctaatggctttgacataatagatgtagaagaccaaaatgaatggacttcaatcgtagctaaacatgcatagatttttcgcacaaagaaaggctggggaccttttatacttagtaaaagaagatataaagcactttaaggatgtcttaaggataaaagatgacgaagaggttgaagtttatattgatggtagtggttatatagctatactaaactcatatgcaaaggacgaattatctctaaaaataatttcagagataaaggaacaatatgaacccaatataaaaataactttatttcaatctctggtaaagtctgacaagatggactttatcattcaaaaggctatagagatgggtgtttactcgatagttcctatcgaaactaagaggtctattgtcaagaaaaaggatatcaaagataaaaaactagagaggtataaaaacatcgctaaggcggcagctatgcagtcaaaaagagagtttataccaagcgtagctgacgcgataaagtttgatgaagcaaaagaaattttagatagttttgatcttgttttaatcgcgtatgaagatgaaattgaacatagcataaaggattttgaaatcaaagataaaaaaaatatcgccatcattgtaggacctgagggcggcttcgacataagtgaagttgatgagcttaagagatgcggctacaaatccattagcatgggcaaaagaatactcagagcagagacagcaccaatagcactccttactatgctttactatgaatacaacggaagtggtcttttatgatgaaggtttatgtacaaaacttgggctgcaaggtaaatttatatgaggcacaagcgataaaaaattcctttgagcaaagaggttatgaggttaaggaagactttgatgatatagatgtttacgtaattaatacatgcactgttacaaacaaatcggactcaaagtcgagacagatgatatcaaaggtcaagaagaagaatcctgacgctatagtaataatttgtggctgctacagccaaatcaactctaaagagattgaagagatggatatagctgacatcatagtcggcacacaaggcagaaacaagatagtagattatctagaagagtacttagatcttggagtaaagaaaaattatgtcgaggataatattgacaaaaactacgaggagcttctctttgataaaaatttcgatagtactagagcctttatcaagatagaggacggctgcaacaatttttgctcatattgtataataccatatgcaaggggcagagttcgttcaagagatgcttctagcataataaaagagattacttcattagctagtgatggatataaagaattcgttattacaggtatacagattactgattacgaagatgatgatatcgatctaataaaactattagagatgatagatgaagtcccaggtgtagaaagagtaagacttggttcaatacagccaaaactgttgaaagacgaaacagtagagaggcttgctaggcttaaacatttgcagcatcagtttcacttatcacttcaaagcggctcaaacaaaatacttaagcttatgaacagaaagtacacacgagaagactacattgaaaacactacaaagatatataaggctatgccagattcatccataactacagacatcatagttggttttcctggggaagatgacgatgattttaaggagtccatagacatagttaaaaaagtaaattttttaaaggttcatgtatttagatactcaaggcgtaagggtacaaaagcttatgacatggaaggccaagtgcctgagagcgttaaaaaagacagagctgaacttttagaaggctatcaagaagcatcaaaacatatatttataaataagtttattggtgaagactttgaagttttgtttgaggagaacaaggatgattgctatgaaggctacacatctaattacattagagcctacctaaaaactgatgaagagcttcacaataaaatattaaaggttaaagcggtagaaacatataaagatggaatattagtagaaaggatttgatctaatggattgtttattttgtaaaattatagaaggcactataccttctgagaaaatttatgaagacgatatgatgctatgcttcaaagacatcaacccaacatgtccagtgcatgttcttatgatacctaagaaacatattgcatcccttgacgatcttaaagagggagatgaagaagtaatctctcacatgatgcttaaggttaaagagattgctaagactatgggccttgctaatggatacagacttgttatcaatacaggcgaggatggacaacaaagtgttaagcacctacacatgcacttaataggcggcagaaagttaaattggcctgcaggttaaatcaagaaaaatagcaaaaaaagattaaaaaagccttgaaaatactttagatttgttgtataatatctttagcttagtcataaatgatagtaattgttttatgaggggagggatactatgacagaaataagagttagagaagacgaatcacttgataatgcacttaagagattcaaaagatcatgcgcaagatcaggcgtcttaggagaagttagaaaaagagaacactatgaaaaaccaagtgtaagacgtaaattaaaatctgaagcagctagaaggaaaaaacatcaaaagttttaatttaattttatttgaaaagatagaaggtgtatgatgtcccttaaaaacgaacttaaaagtagatatatagaatctatgaaaaataaagatacaatcattaaaaacactatcatgatggttaactcagctataaaacaagttgaagttgatcaaagaaaagaactaagtgatcaagacattatagcaattatacaaaagcaaataaaagaaaagaaaggcgctatggctgaatttgaacaaggccatagagctgatttagtcgaacagacacaaaaagaaatagaaattcttatggagtacgtaccaaaggaactttctgaagaagagattaaaagtataatcagtgatacttgcaaagaacttgaagacaaaggagcaaactttggcttagttatgaagactgttatgtcaaaagttaaaggcagggcagacggatcattggttacaaatcttgttaaagaatatctagccggtgcaaagtagcatcggttttttcttgtgatagagattaactatcacggcaatttatataaagggaggatattatgaaatttgtaaaaactttaagcaaaagaaacttattaaaaacagctaagcacggcggatgcggtgaatgccaaacttcatgtcaatcagcttgtaagacatcttgtacagttggaaaccaaaagtgcgaaaataagaaaaatcataaatagactttgatgtacgatactaatttaatacataagttttatctaaacgataagtatgtaatcttagatgtctatagtggtgctgtacacgtagtagatgagattatatatgacttagttgattacatggaagctggacttgacgaagctttagcgaagctatctactaagtatgaagcttgtgatattaaaactgcttttaaagaagtagaggaattacacaaagaagatttgttatttactgctcctatagaggctactcaattggacttaagtaaatacaacatagtaaaagctctttgccttcatgtttcacatgactgcaaccttagatgcaagtactgctttgcctctcaaggcgattttaaaggtaaaagagaacttatgagcacagaagtaggtaagaaagctttagactttttagttcaaaactctggcaacagaaggaacttagaggtagacttcttcggaggagaaccactaatgaactttgaggttgttaaagaacttgttacttacggaagaagcttagaagaaaaatataataagaattttagattcactttaactacaaactgcgtcttgctagatgacgaggttattgattatttgaatgagaatatgtcaaacgttgttttaagtatagacggtagaaagtgcgttaacgatgcgatgcgtccgactaccaatggtaagggctcatatgatttaatcgttccaaagataaagaaatttgtcgataaaagaggagacaaagactactatattagaggtacgtttacatcggaaaacctagacttctcaaaagacgtattagacttctacaacaatggctttaagaagacttctatggaacctgttgtaacagatcaaaagaagtcttatgctataagaccagaacatgtagaaagaatcaaagaagagtatgaaaagttatctaaagaatacatcaagataaaaagagaagatgatgaatttctattcttccactttatgattgaccttgatcaaggaccatgcttaatcaaaagagctgtaggttgtggagcaggttgtgaatacctagctgttacacctaagggcgacttgtatccatgtcatcagtttgtaggtgaagaacagtttaagattggcaacgtttatgctggcgttacaaaaactgaattaagagaagaatttaagaaatctaatgtatttaataaaaaagactgccaaacatgctgggctaagttctactgctcaggtggctgtcatgctaactcttactacaatacaggcgatattaacggtgtatttgaaataggctgtgagttagaaagaaaaagaatagaatgtgcaatatcagttattgcaaatttagattaggaggccaaaatgaaaaagttaagcacacttaagattgtgataacagtcattttaattgcctgcttcggattagtagctgtatttggctttgactttgctggatacaaaataaagagcgctaaagactcaattaaccttggtctagacctagctggtggggtatatgtacttcttgaagctgatacagacaaaacaggtgaagaacttagcaaagctatggaacaatctagggcaattattcaacaaagagttgacggtttaggaatttctgaacctaacatatctatagaaggttcaaacagaatctctatcgaactagcaggtgctaagaatgcacaagacgctatagaaactataggtaagacagctcaactacaatttatcgatccagataataatgtaattttaacaggtaaaaacattaaagaatcaaaagttgtttatacacaagacaacttaggtaagtcaacaccagtagtttcaatggagtttgacgaagaaggaactaaaaaattcgctgatgctacaactaagctatataacgaaacagttcctgaaaagaaaatcctaaagatagttctagacggtgaagttatttctgcacctatagtacaaaattcaccaataacagatggtaaacctatcatcgaaggtggatcaaaaggtttctcagttgaagaagcatctaaactagctacattaatcagagccggtgcacttcctattgaattaaaagaagttagatcagaaatcatcggagcttcattaggtattggtgcattccataattcaatgatggctataattatctcaatactactaatcagtttattattaatcgtagtatatagaataccaggcatagtagcatcaatttcgcttatcgcatacacactactagttttactagcattcatagtgttccacatcaagttgtcactaccaggtatatgcggtttgctattatcaataggtatggcggtagatgctaactgtatcatctacgaaagaattagggaagaattacttaacggtaagacagtaagatcagcagttgatgcaggctttaagaaagccatcgctactatcatggactcaaacatcacaactatcattgcaggtgttgtactttatgtatacggtatcggttcaatcagaggctttggtattacacttatcataggtatagtaatttcattattgacagcagttgtattgacaaaattcttactaaagaactttgctcaaattacatctaacgaaaataaaaaggcatatggagcataggaggtaaatatgattaattttaacaaattgaaaaagttttttgctccaataccatttatagttatcatcgcaggtatcatcggattctgcatcaacggttttaactatggtatcgacttctcaggtggtactatcatgagagtcaatgctggacaatttattgaagaagcaaaagtatatgatatagttaataaagtagacagtggagcaagcgttgtttatgcgggagctaacaaagaaactattgttattaagtctacgctagctttaacaaacgaacaaaagaatcaaatcagccgtgcattcgaagaagaatacaaggttgacagaaacaacatcgaagatacaacaacaggaccatcagtaagtagagaaataagacaaaaggctgttatatccatcatcatcgcatcaatcttaatgcttatctatgtaacatttagatttgagtggaagtatggtgttgcagcagtatttgctcttatagttgacgttcttgttatagtaagcacatatggtatctttaacctacaaatcgattcatcactaatcgcagcagcattaactatcgtaggttattcaatcaacgcaactatagttatctttgatagattcagagaaaacaaaagaatgtacccaaggatggaaaactctgaactaatcgagtcatcacttaactcaacattcagaagaacagttcttacaacagtaactacacttatcgcagttgttgttttatacatcctaggaggccatgtaatcgaagcactatgtataccactacttgttggtatcattgaaggtatgatttcatctacattcattgcaccatacacatggggcttactagaaaagaactttggtcacggagctaaaggtaagagagcttaattaatttatataaggggagactttaagtctcctttattttttgtttatttttaatatagtaatataattatggtgttttgggtatcaatgtatcaggtaagtgaattataaagtacattagtataagtaatttttatatcataaggaggttattatgacagagattttaaaaggtaagccagttgccgacatgattaaggctgacatgacaaagaagattgaggattttcgtgctaaaggcattgcgccaaagattgctatagttagactaggcgaggatgcaagcgacatatcatatgaaaaggcaatactaaaggttagtgcaaacttaaacattgattctgaagtgttcaacattcctagagagtcaacaactgaagaacttcttgcacttatggacaagctaaataatgacaagaagatacatggcatcttagtatttagaccacttcctaagcaaatagacgctgaaaaggttgcaaactttatcaatccttataaggacattgactgcatgaatccaatgaacctagaagcaatatttgaaggcaagaaggacagctttgaacctgctacacctagagctgctgttgagatattaggcagaacaggatatgattacacaggtaaaaacgttgttataatcaatcgttcaatggtagttggcaagccacttgctatgatgcttcttaatgagaacgcaacagttactatctgccactcaaagacaaaggatctaaaggctgtttgcaagaatgctgacgtagtattcactgcacttggcagagctaagatgtttgataagtcttacttcaatgaagactctataatcatagatgttggagtaagtatggacaaggaaggcaagatatcgggagacgctgactatgataatcttcttgactatgtagcaaagataacaccagtacctggtggagttggaagcatcacaacaactatactacttaatcaagtattgaaggcagtagaaaaacaaaataaatagttagatgcaaataaaaagtgctaagcaaaaattttgcttagcacttttttgtatctcaatatattatggtaatatctttacatcgccatcgtcttcgcttcctgtatcgttgttgttattgtgatgtttgttattattgtcactgttattgttattatttctgttggtaatatctgttattatatcgctccaatcaacagtttcatcaggattgtttaaatcaatgccatgatctttgttgtagttatctaagtcttcttgagtgtctgatgcagtaggtgggtagtagctgaagtccttaggtattataccgttgtgttcggcaggattataagcaggatttagagcagtgaatacttttgtgattcttaggttttctggtgtaaactctgtagcaagcttgttgttttcggagttaacttctaaagatacatgcacatcacaaacatctttaggctcggtaccttttgcgaatatctcttgccttacaacgcctcttgggtctgatgagcacagctcatttggtttctttcctgacttagtgcatacatacgccttaactatgccttcaggctctgtaaattgtggcttgctttctttgccttcgtgtatctttgtcattatgtggccccaaagttttgctgctagccaagagttttgagttatggtaatctttggtgagtcgttacccatccatgtagcagctgcgtagtaattagtgaagccaacaaaccaaaagtctgcgttgtagtcagtagtaccagtcttaccagcacttgcttgtcccttaagaacagcgttgccaccagtgtgttcgtaggctgttgatctaagtatatccttcattacatatgcgatttgtggactaacaactcttctttgctttggttctttctcaagaacaacgttgccgtccttgtctaagacctttgtatatataattggttcgttataaacaccatcgttagctatagcgctgtaggctgctgtcatatctagagggctcacacccttagtcataccaccaagtgctagagaagctaagttctcgtcgttgtgagttttgttttcactcgattcaataaagttatccctagatggatcatcttcatttattatacctaaaagctttagatacttaagagatgttttaataccaatcttctttaatgttcttgctgaacttacgttgatagagtagatcagagactctcttagcgttgttatacctttaaagccagtgtaaacgttgtttggccataccttgccatcagctgtaatcataggtaggtcaaggattggagttgcggcagtgtaaccgttatctaaagctggcaaatatactgcaagcggctttatcgatgaacctggttgtcttgctgtatcagttgctctgtttagtattcttgatccctttacatcacggccaccaatcattgcaactatgtgaccagttctgtagtccataacaacagttgcagattgtggctgaacaagaccagatttattagtgtagaagtactctggactaataagtagattaccagcttcatcttgcttgtagaacttatcgtttgttttaaagaattctcccttgattataaagttgtgctttgcctgtcttaagtagtaagtatctggcactgcaagaccgccaactctgtgagttagaaggttctttgcatcatcgatagagtagaagtcttgtatatcacttgatttcttgtaggcatatattcttggacttgtgatattaaggtcgccgttttcactgattgcgtactcagacttcggtattataaggaagccatcttcagtaagaagattagatctcttgtagtagaccatgttgccgtttttgtcaatgatgttacctgcactgtcaaggtttctatcaacaagtataggcgctttgtaccttgatacgtcacctaaaagtatgccgttgaagtttctattaacttcgtcaagatccttttgcaccttagtgtcaatggttgagtatattctaagaccgcctgtaaataatctctcttgagctttttgcttagtgatttggtatttttccatcaaatcgtgaacaacttgattcttgacataatcacttgcgtagcttgtaatctcagcttctttcttttcgctaggctttaggctagaagcaacatcaaagtttatagcttcgtcatattgatccttagtaattttaccaagttcaagcatcttcttaagtattgttctttgtcttttaacagatttattgttaaagacaaggatgtacttttcaccaagaatttcagtttcgccaatcttttgcatagtattctcgtcatacttaagaggagtaaccctgtagaatggttggtaaatgttaggacctttaactatgcctgcaagcaaagccgcttgagcgatgtttatctcgtcaacattcttagagaagtatgttctcgaagcttcttgcacgccgtaggagttttgtcccaaagaaatcatatttaagtaagactcaagaatttgatccttgctaagcttagtctccaagtttagagcaaggtatatttcttttaactttctagtaagagtttgctcgttagacaagaatgtatttttgattagctgctgagtgatagttgacgcaccacgtacaacaccaccggctttaaagttctcgtaaagagatgacaagatacccttagggtctataccagggtgctcgtagaatctttcgtcttctatactaatgaaagcatcctttagatactgaggaaccttgcttagcttaacaaaggttctgtattcagcagtttcaattttctcaattaaattattatccttatcatagataagagacgtctcttcaaagccactgttgattgagtatggatcaatctcaggggcagtgctaagtatatttacaaaagcaaggcctacagtgccagcaaacaaagttaaggatataagcacagtcataagcgatatgacaagtagcttctttagcgtaaacctcggctttcttctacgtttataattagacatataatcactcctaatacaaatgtatacttgtattataccacatattgcgggatttgacatatattttgaaaaatattattttaaacgaggcatttgtgctataataaagaaaatattacacttaaattatataaggagatacagatgataaggacaaagaagaatccatttcatgctaagaacgtctacatagactttgaccttgaagatattgatgccatagcctctggtgcatttaaagagataagtaagacctatcacgcaccactacagatgatgctagatagtgaggacgatcctaagaagagagactttattaaagagtgcggctttaagaagatgaggacctgctatagtatgacagttagaaaagacagcctcatcagtagggatgcaagcaaagctaagatttcacatgcaagagaaggcgaggctatatatgaagagcttgcaaagtgctactatgcttattataagaagacacatgagagcataaatccgttgacggtagactttgatacttttaaagaggtcttgactaaagacgtttattataacatggaagatgaaactgcacttgcctttgtagaagatgacgagatagcatacgtatatgcatcaaagcctcaagaagcttccggcttttatataagcctttgcgaaaagctctttaatgattatgaacagatatacttcgaagcagacgatgtagacgcaagcgcgattgaactaaagaaactctttaaagatggagttgatgagataacagagacgtgggtttatagtatagctgatgagtaaagataagatatattaaatgagctttgcaaatacttagctcaaagttttgtaaagagcatgtcggatagacttcgcgttaaaggcatagaacacaatgatgtttagtgcatatatatgtttagagcagtattaaaaattgagataccacttttaactatgtacgagttattattaccatttgctgacaagggtctatcatggctcttgccatctataggcgcaattgtgcttatgaaagtctttgatctagtgacaaagaaaaaggcatattaaaatattgcttacaacaaagggtgctttattgaataattaatttaaacatagcgtagatgatgaataattgtctacgctatatatttatctataataaatattttgacatttaagcatgcctttggtataattacaaagaggtgctatatggaaagagcgattatatatacaattgaatttgactcaaagactgatgagtatcttgacgaacttgaagcgcttcttgaggcatgcgacgccgaggctatagtcagagtgaaacaaagtaaggacgtactcaaccctcgcacgtatatgggcaagggtaagcttaacgagattaaaacgcttattgaggctaatgacatcgacttacttgttgttaatgatgagctaagtggtattcaaacaagaaacttggaggatgagcttgacattaaggttgttgacaggaccaatcttatcttggatatatttgctctgagggctgaaactgttgaggcaaagctgcaagtagagcttgctcagctttcgtataggcttccaaggcttgtaggtatgaacaactacctatcaagagagggcggtggcatcggtacaagaggtcccggtgagcaaaagcttgaaactgacaggcgtcatatacaagagcagattgacagaatcaaaaacaagctaaaagaagctcaaaagtcgagggaaaacatctctagaaagagaaatgagagcgaaataccatatgtaagcatcatcggttacactaactgtggcaagtctactatactaaacagtatgattagactctcagaaagtggtgcaagggaagttttagctaaggatatgctctttgcaactttgcaaacttttgtaagaaagataaagttttctagtggatctgaatttatcgcttcagatactgtaggttttgtttcgaatttgccaacaaagctggtagaagcgttcaaaggtacacttgaggagctaaagtatgcagatttaatcttgcacgtagttgatatatctgatgagaacatgcatcttgagattgagacgactcttgaacttatgaagtctttagggcttatggacaagagggtcttaagagtatataataaggtagataaacttgacgagcaaagaagggcgtctttgaaggatacagatgacattatctacatctcggcaaaagatgacgaagatgttaaaaagcttatagacaagatcgagtcaataatcaaagatgatcacaaagaagtgattatgagagttccgttcaaggacagcgctcttgttgacaggcttaaaaagagctatgccgttgaggttacaaagtacgacgaagcttcgatgtacataaaagtgaagctttctcaaaaagattacaataaatataaagaatatgtgtgcgaataaagagtacaggtcggttctgggccttgttagcgccgaggatttgataaataaatcaaagtttatagctcacacaaagcacgtgactagcgaagaagaggctagtaattttatctctgagatgaaagaaaagtataaggacgcaacacacaatgtcagcgcttatattatcaacggtgcgattcctataaaacgctacgatgaagatggagagccgcaaggttcatctgcaagacccatactaggcgttatggagatggagggcctctcaaacatcgtttgtgttgtaactaggtactttggagggattaagcttggagtaggtggccttgtaagagcttactctggtgcatttaaaaagagcatagaagatcaaatttatgactatggaagctttcttaagtacaggctgagattcccatattcagagcttgacaaaattaagaatcatctatcacatactgtttatgatttagataatttagaatacatggaaaatattagtgccgacatatatataaaggaagaagatagcaaggagcttttagagacgctaaaaaaccttgctaatcgcgagctcgaatatgagtttgtagatgaagatatatgtgcacatatagacaaaaggatcgtgaaataattgaaagattatgaaaagatagttcaagatatggtatcttggttaagagataaaagggacaagactggcttaaaaggagcagttttcgggctttcagggggtgttgactcagctgtagttgccgctctttctaagcttgcctttggtgatgatcacttagctatagtgatgccaatacattcactcaaagaggatgaagtagatgcaaaattactagcagataagctaggcatcaaaactaccagagttgacctaacaagcacatatgatgactttgttaaaaatgccaaggcagaaagctttacaaagatgagtctttctaatataaagccgagacttaggatgactaacctctacttatatggacagaatttatcatatatggtcttaggctcatcaaataaaagtgagtacctagttggctactttactaagtgggcagacagtgcttgtgacgtatatctacttagggacttttacaaaagcgaggtatatgaactagcgaaggtcttaggagtacctgatgagatcataaacaaaaagccatcagcaggactatggaagggtcaaagtgacgaagacgagttaggagtttcgtatgacgatatagaaaagtatttcgagggcgagactattgactcagaaaaagcaaaaagaatacaagcgctatacaagtcgactcagcataagagagacagtatagattattataaaaagtaaattaatttaggaggaataaaatgtcaggacattcaaaatggaaaacaataaaggctaagaaaggtaaagaagaccaaagaagagcctcagtatttacaaaactagctagatacattactgttgcagttaaggaaggtggatcaaacccagaatttaatccatcattaaagtcagcgatagaaaaagctaaggctgagaacatgcctaacgacaacattgaaagagctatcaagaaaggtgaaggctcagaaggcgatgcaaactacgaaaacgttgtatacgaaggctacggagttggtggagttgcagttatagttgactgcttaacagacaacagaaacagaacagcatcagacgtaagacacgcttttgataaacatggcggaaatttaggaacaacaggctgcgtatcatatctattcgataagaaaggttttatcgctatagaaaatgacggatcagttgatgaagacactctaacaatggacgcaatagatttaggagcagaggatttcaaagcatacgaagaaggcttcgaaatatatacagccgttgaagactttaaccaagtggtagaaggactaaaggacagaggctacaagctaagtgtttttgaaatatccaatataccacaaacaacagttaagcttgatgaagaacaagcaatcaagtttgaaaagatggttgacgaactagaagagtctgacgacgttcaaagcgtttcacacaacttagaagattaacaatgaagaatatgaaattatcagttgctattatattaagtcttaatataatagcacttatattatcacaagcaattcaaacagtatcctttgatgagaatgctgtttatatgaatgcaaagcatatggataactttgactatattggtagaagcgaagaagaggtccttgtagcatcgaaagtcatagcaggctacctaagaggagagaatgaggatgagcatcttgagcttataggactaaacaaaaaagagataagccacatgggagatgtaagaagaatatacaaaactattgacataattaagatagtctcagcagttataacattagttataataattttatatgcatggaagaaagtcaacgtatttgtgtttaaagagctaagaaatgcactctttattgcatatataataccaatattttttggtatattatatttaacaagcttctcctctgcattcactaagtttcatgaaatcttctttacgaatgatttgtggcttctagacccaagtacggacctacttataagactaatgcccgaagagtttttcataagaggttttcttaagattctagcctactatactgtatcaatattcgtcatacatctatgcagtttttactatgttgcaagaagcaataaaaatatgaagaagaagggagtataaaattcatttatgttagatataggtaattttatagatcaaactaatttaaaacaggatgcatcagacttagacatcataaaacttgttgaggagcaaaagaaatataagttcagatccatatgtatagcaccttcatttttgcaagttgctcgtaaaaacttgcaaaatatttatctcactacagtaatagcgtttccaaatggatatgcaagtacagaagcaaaagtatttgaagcaaaagatgcaataaaaaatggagcaaatgatttagatgttgtttcgaatatcggaagaatcaagatgagagactatgactatctgagtaaagagataaattctttaagggaggcaagtttgggccatattttaaaatttataatagaaacatcctttctagacaaggaagatatattttatataacaaatttactagttgagggtggggctgagtttgtgaaaacatcaacaggttttacgaaattcggagcatctatcgatgatgtaaaatttataaaaaagaattttgatggcaaaataaaaataaaagcatcaggtggaatttctgattataaaactgcgattgattttatagacgctagtgctgatgttatcggcacttcacacggaattgacattataaattataaataaaactaataaattttgtaaaaaaagctaaagagtatttatgaataattttaaaaaaagcttgcaactttataaaaaatagtgtaatatatatgtaacatatagccgttattatatgaaaaaaatttaagggggaatattaatgaaacttaaaaagacattagtgtttttattagtactatctatggtattatcagctttcgcattcgcatgcggcaagaagactgacgaaccagcagaaacaggtactgaaacagaagcaccagcagatggcgaagaaactacagatgaagaaacagctgaaagaccaactgagccaagtggacaattaataattggttgtattactgaaccaagcggagacttctcaggagtatggcaaaacaatgcaactgacgctgacgctagacgtttagttcaaggatatggtacagttgatcaaacagatgaaggcgaattcgtaattgatgactctatcgttgaaaagtatgatactaaagaaaacgaagatggatcaaagacttacactttcactgttaaaaaaggtcttaaatatgcagacggtaaagaaatcgatgcaaaagactatgttgctagcttcttactttggggctcaaaacttattggacctgacttctgtaaaggtaaaaacacaggtggtatggacctagtaggttatgatgcatttagtaagggagaaaagaaagaattcgctggtgttcatctaatcgatgattacactttctcagcaacaataaatcctgataatacaccatatttctatgaattaacttctgtatcagcaagtccagaagatctagaattctggttaggtaaaaaagtagacattaaagatgacggcgatggatgttactttgttgaagatataaacactgaagagtatgcgaatgctgttaaagcagcaagagataaaaagactcttccagcaagcggtccttatatgttagaaagctatgatgaagcacaaaaattaataactatggttatcaaccctaacttccaaggcgatagattaggcagaaaacctctaattcaaaaagttatcattaagaaagttacagaagcaactcaacttgacgacttaaaaactggtggtgttgacctattaaagggcatcacaaagggtgatgacatcaacgctggtatggacttaacagaaggcgaaggctttgctcatacagattatccaagatctggttatggtaagattgcattctcttgcgacgttggaccaactcaatatgcagaagtaagacaagcacttgcttacttactagacagaaacgatttctgtaaacaatttacaggcggatacggttctgttgttagcggaccttttggtacagctcaatggttctatcaagaaactaagaaagaacttgaagaaaaattaaattcttatccatatgacccagctaaggctgtagaattactgaaaaaagctggctttactctaaacgaatcaggcgctgaataccaagaagccgacccagaaaaaggcatagaaggagacggaacaagatacaaaaagatggatgacggtaagttaatgccacttgaaatcaaatgggcatctactgaaaacaatgacgtatctgacttactagttgttaaattagctgaaaaccctgaccttgtaaaagcaggtatcaagattcaaagagacgcaatgagctttgatgaacttcttaactggatatacagagacgcatcagtagatgctaagtatgctgttccaacatataacatgtttaacttagctacaaagttcccagctggttatgatcaaaaagaaacatatacaacaaaagaagatttaatcaagcaaggctacaacactaaccgcatcttcgataaagacttagagcaagcagctattgacatggttaaatgttcaccagatcaaagagataaattcaaggaaaactttgttaaattcgtaactagatggaatgaaatgcttcctgacctaccactatactctaaccaattctttgacttctacaattctaaattaaagaattgggttaatactcaaatgaagccattcgcatcaacagtaatggatgcttgggttacagaatagtaaatattaaaatttaaagtttattttgtggaaggcaatagaaatattgccttctataaaaatacagataaggtggatgatgatgggaaaatatgttataaaaagaatactttacatggtattcgtattctttgttatgtctattttacttttcttcttatacaatatgataccttcagaccctgcaagagcagagcttgaaccaatgaaggcacaattgaaaccagaagagtacaatagaagatatcaagacttaagaaaacaatacggtcttgacgatcctatgataatgagatatggtaaatggcttggtagattgttacaaggcgacttaggagactcaagagtatataaagataaggttataaatgttgtaaaagaacctttaaaacttactatatttattaatatttttgcaataattttaggtctaggtataactatacctttaggtattgcgtgtgctgttaaaaagaattcagttttcgaccaagtaacacaggtattaacagttataggttactctataccagtttttatcacagcactaatgttcatttatgtatttagtgttaaactacagtggttcccagttagtggtatgagaactgcaggaaagaactatacaggtattaaggatacacttgatatcttaaagcacattacgcttcctctaataatcatgacagtaggttcacttggtggtatgacaagatacgtcagagctgctatggatgacgctttaggcatggattatattaagactgcaagagcaaagggcttaaaggaaaaggctgtaatttattcacacgcgtggagaaatgcgcttttaccagtagttacactaattgttggctggtttatgagtatattctctggatcactaattattgaaacaatgtttaatttaaatggtatgggtaagttctacatagatgctttaaacaagaaggactatgacttagcgcttgcaattcagctattttatataataataactctagttggaaacttggttactgacttaacatatggcttagttgaccctagagttagagtagaaaattaggaggttaaaatggaaaaagaaaacaaagatacaaaacaaatacctccaaagaaaaaaggatttagtttattcaagaaaaagaaaaaagacgtcatggtagaagatgacattcaaacaccttttagaactatacttaatgtatttcttgctaacaaggttgctatgactgcattttttattttctttggtattttcttattagtgttaataggacctttattcaatcctttagacttatcttatgttgaaacaacacagtctaatattgctccaggttttgatatacttcctttaccaaacggtcttaagaacatcaaaacgcttagtgttggatctacattcagtgcagctgttgatgagaatggcaaaatttttgtttggggtaaaacagctatctctcaaaaagttgacgtaagaaaagtccctaaagaagtaagaaaggctggaaaaaatattgttaaagtagctgctggtactgaccacgtaatagcacttactgatgatggtaaagttcttggttggggtaataacagacttcaacaagcaaaggctccagcagaattaatgggtgttaaagttattgatatagccgcatcagaccaagtgtcttatgcactagatgacgatggatacacatacgcttggggtaatatgtctattaatgactacaaagaaggccatgactatcaaggagaaattgttaaaatagctacaaatcctaatacagcttgcggcattactaaagatggtaaggttgtacatttaggagctcaagaatcgggtctatcaaaggtacctgaaataaatgaaaaggttgttgaccttgcttcttcatacaatacattcgttgctgtaggagaatcaggcaagatttatatgtggggtaacccaactacaactggtgagtgggacgttcctgaagatatacaaggtaaggttaagaatatatatggacaaagatattcataccttgctaagttaaatgatgatactatcattgaatggggttctaactcattaggacaacttaatgtgcctcaagaacttagaggtaaaaaggtagataaagtttatactggtttctatcaaacacatgttgttgatcaatctggaaaggtatatagctatggtcacaaaggttacttattaggtactgatgacctaggcagagatatctggaacagaattcttaacggtggtagaaaatctatgactataggtgctatcgcagttataatctcgactatcatcggcgtaatcgttggtggtatttcaggcttcgttggaggctgggttgataacgtattacaaagggttgctgaaatgataggttcactaccattcctaccatttgcgatgatattatcagcacttgttggccaaacaatgactgccgaccaaaagatctttatgatcatgattatacttggtttactatcttggacaggacttcaaagacttgttcgtgctcaagtactttcaattagagagcaagagtatgttgttgctgcaagatcactaggtattaaagaaaagaacattatatttaaacatatattaccaaacactatatctataattatagttaatgctacgctatcattcgcatcaagtatgcttacggaagcatcactatcattcctaggctttggtgttccagcaccatatccaacatggggtaatatgcttaacggtgctaataactctataattattcaaagatactggtggagatgggtattcccttctattatactaggtgtttgtgtaatttgtattaacttaataggtgatggcctaagagatgctatcgaccctagatcagctgaaagataggaggtaagattaatggcattattagaattaaaagacttgcataccttttttacaacaaaaaagggaataatcaaagctgttaatggcgtttcctattcagtagaacaaggtaaaacattaggagtagtaggagaaagtggtagtggtaagagcgtttctgccatgagtatcattaaactacttgatggtaatggatatattgacagtggtgaaatttggtttgacggagaaaatattactgatatacctaagaacaagatgggtcatatcagaggtaatgatgtttctgttatattccaagagccaatgacttcacttaaccctgtatttacagtggaaagacaagtaagtgagccgttcattattcaccaaggcatgaacaagaaagaagcagctgaaaaagttgttgaaatgcttagcatggttaagattccaaatccagagactgttgctaaacaatatcctcaccaattatcaggtggtatgagacaaagagtcatgatcgctatggcacttgcttgcgtacctaagcttcttatagctgacgaaccaacaactgctcttgacgttacaattcaagctcaaatacttagactaatgaatgacttaaagaagagaattggtacttcaatactatttatcactcatgaccttggcgttattaaccaaatggctgatgacgttgccgttatgtactgtggtcaagtagttgaaaaggcaccaagagatattatcttcgaaggaaagagtaaattcatgcatccatatacagaaggacttatggtatctataccaagattggatactcctcaaggcatgaagctagatgctatacctggagctgttccgcacccactaaatttacctaagggctgtaaatttgcgcctagatgtaaatatagaactgaaaagtgtgacaactatcaaccagatctagttaaggtagatgacaatcatgaagtaagatgtttctatcctgaaaagggggtaagatccgatggaaaatagagagttactatttagaatacaaaacttaaaacaatacttcccagtacaaaaagttggtaaggaagttaaatatgtaaaagctaatgatgatatctcattggatatttacaagggtgaaactatcggtttagtaggagagtctggttgcggtaaatctacttttggtagaactttattacaactatacaagcaaactgatggtagaactatttactatggcagaactagatgggaagtaaatcctaaatatgtatataaactaatcaatggttttgctagccataagaacaaagttaaagagcttaaagctgagattgagaaggatacagctgcttatgaagcacttgctgaaggcaaggaaaagggagaagcgcttaataagcttagagaggctgaaaagcaatataaacttctttataaggacttagcgcaaatagctggagctttgatatatcatgacaatgaaagcgaagttaaatctttactactgaaggagcaagaacttaaccacaaagtatttcttgctaagaaaaacggcaaggaagattcatcagcagaaaacgaattaaaagatgttgaagcaaaacttgcgtcacttagagaagatgttaagggacatgctgaatacgaaaaagcagaaggatatagagatgctggtgtaaacttagcagagcttgagtatgaagagatgagacacttaagaaaagatatgcaacttatcttccaagacccatattcatcacttaacccacgtatgactgttggacaaattatatctgaaggtttagtagctcacgatatctacaaacaaaaggataaggcactacaagactatgttgttaaggttatgcaagattgcggtttagctcactactttatacacagataccctcatcaattctctggcggtcaaagacaaagaattggtatcgctagaagtgttgcattaaagcctgactttatcgtttgtgacgaagcggtatcagcacttgacgtatctattcaatcacaaattataaacctattgattgatttaaaagaaaaagaaaatctaacatatctattcatatcacatgacttgtcagttattaaatatatatctgataaggtaggtgtaatgtacttaggtaatatagttgagtttgcagactctaaggagttatatgctagaccagtgcatccatatacagaggcacttctaggcgcaataccaactactgactctaagaaagaaatacaaatactagaaggagacataccaagtcctatcaatccacctaagggctgtaagttccacactagatgtaaatatgctactgaagaatgcaagacagttgtaccagtatttgaagaagtaagacctggacactttgttgcatgtcatcacaagctaaacttagataagtaatgttttttcaaaagaaaattgatcgtgcctttgaagagctcaagaaaacttcaggtaagtatgatgagaaaggtaatctagtcgatactaaaaatgaagatactgagaagggcgacattgctgcaatgtttcttgctgcagctaaggtattcggcccgatctttatagttttgattataattttaatattaactagaccaagataaagattaaagctacgagtaatcgtagctttttttatggtagaagctcttgaccatgtgtgagaatcatatatatacattgacaaatacatatatataaatgaacttagagcaaggcagagattaatatacaaaatattttgctcttgtttagtttagcacgattaagggtaaataaagaataataataaaggaggttttcttatgaaaaggaaagtatgtttatttttaatattagtattgctacttacaaacgcagtctatgcagctgaacttaaagtgaatgtgccaaacggctatgttttaagtgaagcagagatcgaaagactgaacctggttattaacaagaagatgaaagatgaaaatgatgaaagagaagacttagttggttatgttataccagtttacaatctatcgacagagtacttatttaacaacgcaaataaaacattagaagattcctttgttgataaaggaaacgccattatgatcattaaagataagataggtccatttatgcaagcgggactagttaaatcaagtaaggggcttatagttgaaacatactcggatatagacgaaggactacttgaagccatcactctattaaaaacaaagagtatgacaagtccaagatacttaagtttggatttgacaagtaaacctagtttaatacttgcaagcgaaggcaaagtaaacaaggctatatcagtagatcttttaaacaatagggataaaaatagtatagatcttgatggtgctatcttggatacaaacgatgtgtatgagcaaatcaagcaaaacaagattgcagatatggagcttactgttgagaaccttaagaaaggcgagccatacaagactgatcaaatatcactatttaagcctgttaaagctcaaaaagcagataagaagagctatataaaattaatacttatagttgtattagtagctatacttgtgatattagcttacttattcttaatgaaaaagtcttctaagaaaataaactttaagaacaaaaaacataaaaaagacaaggacaacacagaagatattaataatgatgatatcttgttgtaatatatattaaaaggagcttcgattaagatgggatatagaatactatttttagtatcagtatcgtttgtaccactattacttattgcaattggaaaaatatttgctaaatttccaatcaaagagccaaatattgctgttggctttagaacaaagcttgctatgaagaacaaggacacttggaactacgcacaagaattattcccaaaggtatggattaaacttggctcatacttgctaccaataagcattgctgttatgtatgtaatgcacagtgatgataaggactctgcaggcagtgctgcactcgttataatgcttgttcaggctttagcgatgcttgtatcaatatatagcgtcaatcaaaagctaaagaaagccttcaatagtgacggaacacgtaaacaatttcaatagataatataatagactaagtatcatgtcgatgcttagtctattttttaatttcttctataaattggcttatttcgtagtcagtgttgtttctttctttaaaagcgcatatgtttagattcttcttcgctctagtcattccaacgtagaatatccttctttcttcttcaagctctacatcgcttgcgttgtttgaaccgggtatttcatcatcaactatgtccacaagaaagacggtgtcaaattctagtccctttgcaccatgtatagtcgatagtataacattggattcgttctgactgtatatcttatttcttagcacgttgagtcttagttttaactcatccatgctcttagtgtagagtgcaatctcttttaggaaatatatcatggtaagaagcttgttaaaggattcgctcttgtctctacctttgcttcttaagtagcctctgtagttcatatcattaactatatagtctatgatgtttgatggcttcatcttcctaagagctttgaaatccttcattagctgcagtatatagtccttcttgtagctttgtatagactctgagctgtaaagagttttcaaaacatcaatatctgttaatgcataaagcccattgatatcatcttttgataggtagcccttgatcttgtagtaaatttttctaaatagggcggcatcgttcatattgagcgagaaattatatatgtcaaagatgtcatctataatccaatgagtgaagaacctctccttcttatcatacgatgtaaagcttattaggtagcgctcaagaaactctgcaagaggtatttgcgaaatgttgtttctatataagattgctactgtttcacttgcactctttagatactttgcgatgtagcggtactcatcaaggtctttgccaaagagctttatattgacgggcgtcttgtcactactcgaagtgctaagctcttttgtatacctaagcttattgttttttataagtctgttagacgcattaattatgcttggagtagacctgtagttttcgctgagcctataaagctcggcacctttgtagtatttctcaaaatttagtatcctctctggacaagcacctctaaacttgtatatggactggtcgtcatcagcaacaacaaaaaaattcttatcagtatttataagcttatcaagtatcataaactgtataagtgaggtgtcttgaccttcatcaagtagtatatactcatacttgtctttgaactttgatattatatgtttgtctttctcaagcaaatcgttcgccataattaacatatcgtcaaagtcaatcaaatgttttttcttcttataagcttcgaagtcatccacaacgaccttgtattcaaaaggtccatcggcatcaatataatcttcgttggtatttttgatgtagccaagtatggattgtatttgatctatctcttcttcactcggataagtcttaagcttttgtatatatatctttcttagtatatctctcgaccttggcgcatcttcaacatcgagcaaggtgtatttagttttcttatatctttcatactctctaattatcttgtaagatagggcgtgtatagttaagacacttacttctttagaataattatcatcaagcgcctctagtatccttctttgcatgtcaagctgctgcgactttgcaaatgttatagcaagcactttataagggcttacacccttttcttttataaggtatttaatgcggttaactataactgtagtcttaccagagccgggcacagcaagaactagtgcaggtccactatcgtgccttgatgctttgagctgattaggatttaatttcatttaatcaccatagctattatataacaaaacttgagaaaaataaaggtttgctaagtacttacacttgtggtataatataggcgtagttcaaatttttattttacatattattttttaagggggagatacattttgttaatgaataattttcttaaatcaagaaaatcagttagagattttaagcttaaagatctaagcgatgacactttaatcaaaataaaacaactttgcagcgaagtttctaaagaagatggacaaagctctgtaagttttaatctaattaaggacggcaagagagtttatgaagctttagatggtatcgctggttactcaggcgttatgattaagtcgccacactatatagtgattaacagaacagacgattctagtaaatcaatgatgcttcaaagctactacactgaaagtcttattacaaagctacatagcttagacatcgcaacatgctgggttggactatttggcgcatctgaagacaagaaaagagaagttttcgatatgtacgcaaacaacttagactttgttttagcaatcggttatgaaaaaccatcaaacccatttgacctagaccaatattctgaaagaaaagctgttgaagagcttgtatttgacggcagcttaaaaaatcatatgagcatagagatgcttgagaacttaggcttagacgaagtattctactatgcaagatttgcaccatcaacatcaaaccgtcaaccttggagattcgtaatcaagggaagttatgttgaattatatattgaagataataatggcaagccatcttatgttgatgcaggcattatgatgtactacttaagaagtatgcttttaatgagaaatgataataacatgtgggaactaattgacgatggtgaattagttgacggctacagattgatagcaaagattaagctataggaggaactatgaaactatttattgatacagctaatgttgatgaaattaaagagattgctaagtggggagtagtagacggagttactacaaacccaagccttatcgctaaagaaaagagagacttcaaagaagttgttactgagataacaggtattgtagatggacctatatctgcagaagttgtttcacttaagcatgacgagatggtagaagaagcaaaagagcttgctaagatccacaaaaacatcattataaaggtgccaatgactgaagaaggacttatcgcagttaaagaacttcacgctatgggcattaaaacaaatgtaacacttatctttacatcaacacaagcacttcttgctgcaaaggcaggagcaagctatgtaagcccattcttaggtagacttgacgacatctctacagatggacttaatttaatcgaagaaatcatggatatctttggaaactacgattatgacacagaagtcatagctgcgtctataagacattcaatgcatgttgttgaatgcgcaagacttggatgcgacatcgcaactattccatacaaggtattcaagcaaatgcttcatcacccactaactgacagtggtatagaaaaattcttgaaggattgggaaagtgtaaaataggagagatacaatggatagaaatttagtaatgaacttagcaagagtcactgaagcagctgcattaagctcagccccttggttaggtagaggcgaaaaaaacgctgctgacggagctgcagttgaagcaatgagaaggatgtttgatactgttgacatagacggtactgtagttataggtgagggcgagattgacgaagcacctatgttatatattggagagaaaattggtaatcatgaggacggagcccttaaggttgatatcgcagttgatccacttgatggaacaaactccatcgccaatggtatgccaaatgctatatcggtagtagctgttgcacctaaaggatgccttctacacgctcctgatatgtatatgaataaaattgctgttggaccaaaggcaaagggtgttgttgacatcgaaaagtctgttacagaaaacctaaaagcagttgcaaaggcacttaacaaagaagtatcggaaactactgttgttatgttaaatagaccaagacacgatgctattgttaaagagcttagagcaaatggcgctagaataaaatttataaacgatggcgacgttatcgcagctatacaaacttgctttgaagacactaacgttgacatgctacttggtagtggcggtgcacctgaaggggttctagctgctgcagcacttaagtgtatgggaggagaaatgcaaggcaagcttcttccaaaggacgaaaaggaaagagaaagatgcattaagatgggcatcaaccctgacaaagtgcttcaccttgacgaccttgttaaaggagatgaaatcgctttctcagcaactggtgtatcacacggcgaacttcttgacggagttaaatttatcaagaagaatgtatgtgaaacagaaacactagtactaagagctgagacaggcactataagattcattaaagcaactcatatactagataaaaaaccggagtacgctaaatgattgtagataatcacttagatgattataaattagtagagctgcaagattttgcaaagagatacggacttaaaaactttactaaacttaaaaagcttgagcttattgaatatatactaaagagcatccgcactaatcaagatgaggatgcttttcagtcgtgtaaggacttagatgattttcttaaaaaggccaagagcgcatcaagtaaaaaagcaagcaaagataaaaaggacgaaaagaacataaagtcagcacctaataccatagacggcatagagactgttcctgctaatggcatcttggagatattgcctgatggctttggcttcttaagacgcgaaaattattcgcaaagcgatcatgattactacgtctcgccaacatatataaagaagtttcatcttagacaaggcgatgagattacaggagtagtcagaaagaaagacgaagcaaacgaggagaacacaagaaacgccatagtctacatcaacaaggttaatggtgacagcttagatgtatgctttaaaagagcagactttgatgagctagtccctgaatatccagataagcttattaagctggagactaccaaggacgaagtatcgacaaggtttatagatctaatctcacctataggcaagggacaaagaggccttatcgttgctcctccaaaggcaggtaagactacacttattaagaagatagctaacgccattaacataaatcatccagagattaagcttatagttctgcttatagatgaaaggcctgaagaagttacagacctaaagagatctatcaatggcgatatcatatactcaacttttgatgacgaccttgagaaccatatcaaggtttcacaaatgacgcttgaaagagccaagaggttagttgaacacaaaaaggatgttgtcatacttcttgatagtatcacaagacttgcaagagcatacaacatgactatagcaccgactggcaggtcattatcgggcggcttggatccaggagctttgtttggaccaaagaaattcttcggagctgcgagaaactttaaagacgctggcagcttaaccatacttgcgactgcacttatcgatacaggctcaaggatggatcaagttatatacgaagagttcaaaggcactggcaacatggagctctaccttgatagagaattatcgaacatgagactcttcccagccatcgacatattaaactcgggcactaggaaggacgaactcttacttgatgaaaagactctaaacatacaaaggaagttcagagtgatgatgaagaacaatggcaatgaatatgctgttgagttcttgcgtaagtttatgactaacacttcgtctaataaggagcttgttgacagtttagacaaagcacttattaagagtgaataattttataaaagacttgaaaatagtcttcttatatgatataataaacaaggtaatattttgcattgaagagtggctcgccactctttattttataagaggggtgagatatatgaattataaaagtttaattgagaagcttaagcttaagatagatggagtgcttaaagatatgaacgcagagcttgtcgaccttgagatactaagacataaggacgagatgacggtatctgtgtacgtatacaagaaggacggccttgatatagacctacttcaaagcgtaactgagagattaaatccaatatttgatgttgtaagcgaattaaaagataagtattacttagaagtgtcgtctcctggacttgatagacccatcaaaacagatgatgactttagaaggaatatggacatgaaactcgatgcaaaacttaagaacaaagaaaagcatacaggagtgctaaagaagtatgatttagagacattcacacttgattgtgatggaaaacttattagtataaagaggtctgatgtaaagatgcttacacaggcaatagaattttagggggttatgatgaacaaagagtttatagacgctttagatgaattagaaaaaagtaaaggtatatctaaagaagttatttttgatgcactagagactgcactagtttctagttttagaaagaattttcaaactgaacaaaatgttttagtcgacatcaatagagagaccggagatattaaactttattcacaaaagactgtagttgatgaagtggaagacgatgttaacgaaatatcgcttgaagatgcaaagaagattagttcaaagtacaaggtgggagacactgtaaattttgaagaagctccaaaggaatacggaagaatcgctgctcaaacagctaaacaagttgtaatacaaaaaattaaagatgctgagagagaaaagattcacgacgagttcatagtgagaaaaggcgaaattattactggacaaatacaaagaatatcaaacaaaaacatcttcatagatatgggcaaggtagaaggtataatccctcctacagagcaaattccaaacgaagtatataagatgggagacagactaaagcttgttatatctgaaattagaaagacaagcaagggaccacaaatagttctatctagatcaaaagccttacttgttagaagacttttcgagcttgaagttcctgaaataacagaaggacttataggtatctactcaatatccagagaagcaggctcaagatcaaagattgctgtctacacaaatgacgagagtgtcgatccgctaggagcttgcgttggacaaaagggccaaagagtaaactctatagttgaagagcttaatggagagaagatagatataataatctacgatgagaatccagaggtatttattaagaacgcactatcgccagcagatgttgttagctgcgaaattaatgaagaagagaagtcagctatcgccatagtaccaaactcacaaatcagcttggctataggtaagcaaggacaaaatgttagacttgctgctagactaacaacttggaagatagacatacatcctgaagatccagacagcttcactggcccaatgagcgagccatactacgacagcgacaatcaagagatattaaatgattctttaatagatttattcaaagatgacgaagcataatacttttgagagaaaatgcgttgcgtgtagatcatttcacaacaagtatgagatgataagacttgcaaaaacagatgaaggcgtttttattgacaagaatcaaaggatgcaaggacgcggaacatatgtatgcaataacgaagaatgtattaaaactgcactagagaagaacttatttaagaagtctttaaagtgcaatatagataatgaaaccctagaggagcttagaaatgtaaagaaggagtgattatatgaagacaagagtttacgagttagcgaaagaattgaatatggaaacaaaagaattactagacaaactccaagagcttaatttaccaccaatgacacaccttagtggtatagatgaagaaactgcaaatttggtaagagatcttttcttggaagaagagaagattaaagttaaagaaaagccaaagaaaaaaattcataaaaaagaagaagatactgagaacgtaagagacaataaacaagcaaaaaagaaaagtgtaaagcctgagactaagaaagctgatggacaagaagctaaaaataatcaaggcgcaaagaagaacgatacaaataataacagagaaaataataaaaagaataagaatcaaaacaatcaaaacaatcaaaacaatcaaaataataacgcaccaatgaataataaaaagaataacaagcacaacaataataaaaaccaaaaacaagctgaagccaaaaaggaagaacaagaagccaaaaagccaaaagacgaagtagtattaataccagagaatatagtggttaaagacttagcagaaaagctaggagttggagtaaatcaactaattacaaagcttatcatgcttggcttaatgcttaatcaaaatcaaagcgttgactttgacacagcatcacttatggcggatgagttcggcgtaaaagttgagcttgaagttcctcaaagtgaagaggaagcgcttgaacttgactttgaagacagcgaagacagtcttgttactagaccaccagtagttacagttatgggtcacgttgaccatggtaagacatcactacttgatgctatcagacaaagcaaggtgcaagcaggtgaagcaggtggtatcacacaaaggataggtgcctacagtatcactgttaaaggcaaaaagatcgttttccttgatacaccaggtcacgaagcctttacacaaatgagagctagaggagcacaaattacagatatatctgtaatagtagtcgcagcagatgacggtatcatgccacaaacaaaagaagcaatctcgcacagtaaggcagcaggtgtacctatcatcgtagcaattaacaagatagatagaccagaagcaaatattgaaagaatataccaagagcttgcagataatgatctacttccagaaaagtggggcggctcaactatcacagtagaagtatctgcgaagaagagaatcaacatagatgaactactagagatgataatactagttgctgagatggaagatatcaaggctaaccctaacagaagagctatgggtactgttattgaagcacagcttgacaaaggacaaggtccaacagcaactgtacttgtacaaaaaggaactcttaagaagggcgactatgttgtatcaggaacatcttgcggcaagatcagacttatggttgatgacaacggtaaaggcataatgaaggccactccaagtacaccagttaagattatgggtctaagcgaagtgcctgaagcaggcgaacttttctatgcagttgaatctgaaaagaaggctagagcaattgctgagatgagaaaagaaaaagctagagaagaaatgataacagctacacaaaaagtttctttagacaatctatttgacagaatcaaagaaggcgagctaaaagacttaaacgttatcatcaaggcagacaacaaaggttcaatcgaagccatcgcttcatcacttactaaactatcaaacgaagaagttaaggtaagcgttatacacagcggtgtgggcggaatcagtgagtctgacgttatgcttgctagcgcatcaaacgccatcatcataggcttcaacgtaagaccaaacaacggtgctatggacctagctaattctgaaagtatcgaagttaagacatatagggttatttacgacataattgacgacatcaagaatgctgttaaaggtatgcttaaaccaaagactaaggaaactgtcttaggtagagcaactgtaagagcaacatttagacttccttcaggtcaaactattgctggtatttatgttgacaacggcaagataacaagaaactcaagcataagacttctaagagacgatgttgttattcatgacggcggcatctcatcattaaagagattcaaagatgatgcaaaagaagttgctacaggatatgaagcaggtctaggacttgacggatacaatgacgtcaaggaaggcgacgaaatggaagcctacatcatagaagaaattaaagcataggtgagtttatggacaagagaaggttatatagagtacaagctgaaataaaaagaattgtatctgaactactaatcgaaggtcttaaagatcctaggattgataagatgactagcgtatctaaagttgatttatcaaaggatacttctgtggcaactatatacttttcgatatatggtagcaagaaaactaaggaagatacattagatgccttagaaaacgctaagggatatattagatctcgtcttgctaaggtcttagagattagacaagtgcccgagcttagatttaaaattgatgaaagcgttgaatatagtattgagatacaaaagattttaaacaaattaaatattgaaagcgatgtagaagatgaagagttggatgaagatgaagaataatatgagcataaaagatataggccttgctattgaagaagcaaaaagtataaatattgtctcacacagatcacctgatggagacaatataggctcttcgcttggcttatatctatcattgatacaaaagtataaagataaaagtataaatataataaagcctgatgatataccgagtaagtatcagttcatcgaagagaaaaagtactatgtagagaatcaaaatccagttgacttacttatagtacttgactgcgccgatgagagaagggttttagatggcgaattgtttaagaaggcaaaaaaagtagtaaacatagatcatcacaagagcaacagctattttggatgcataaattatgtcatagaagagtactcatcaacatcagagataatttttgacattataaaagagctgaacttgccactagacaaagagattgcaactatgatatacatcggtattgatacagatacgggcaggtttatgtactcatcaactacagctgaaactatgcataagcttgcacaacttatgagctatggcatagatattaatgaaataaacattaagctctatagaagcatgagcaagaacatctatgagctatatagacttgccatagataaaataaatttctataaagactttgcttatgtcattttaaacaatgaagatttcgaaaaaacgaatactactagagaagatacagatgatatacttgcattcttacaaggacttgaagattacgatatgatagcgattattaaagaagtcaaggacatatataaagtatccttaagaagcaagtacaagtatgatgtaggtaatatcggagaagactttgatggcggaggacacaagtacgctgcgggcttaacttataaaggcaaactagacgaacttgtaaagagattgaaaggatatgtagacaatgcaaattagtggcatagtcaatattttcaaagaaaagggcaagtccagtagatactataccaataaagtaaagtacatcttaaagactaagactggtcatgtaggcaccttagatccaatggcttttggagtcttgccaatagcagtaggtgaagctactaagtttattgactaccttggctttgacaagaaggcatatatctatagaataattttcggaaaaactacagatacacttgatgccgagtctgagatcatagaagaaaagtcttgggacttcgatagaagtgacctagcaagagttttagaagatatggagggcgagtatgagcaagttcctccaaagtactctgctaaaaaaattgatggcgtccctatgtataagcttgcaagggacaatgtagatgttgatacgagcataagagcaaagactgttgagatatataaaaacaggttattaaagtttaacaaagaaaaagaatacgccatagtcatgagcgaggtctctactggaacatatattagaaccttggcttatgatatagcacagagcttgggaactattgcttatattgactacctaatgaggtacaatagcggtccgttaaatatagacgaagccatatgcatagatgagctaaatgaaacagatctaatgtctgtagatacgctcataaacctaccaaagcttacacttaatgaaaagagatttaaggcagttcaaaatggtatgaactcatatgtaaatgactcttacaaggaagagtactataaagtttactgcgctgaaaagttttgtggcgtgggttatgttaaaaaagaccagaacaatagaaataatgtttatatgaaaaaggtttataaatatgaggataattaatctaaatgatgagtttacaagtaaaaataattatatagcactaggttacttcgatggaatgcaccttggtcacttaaagattattaaaagctgtataagtgacgcaagaaaagatggccttatgtcatcggtcttattacttgatttcaaaaacaaaaagtgcttaactaccatagatgataagattaaaatactcgaagagcttggtatagatacggtttatatactcgacttcacagataaaatcaaaaatatggatccaaaagtttttgttaagagtatactcatagatagactagattcagtaagaacatattctggagaggactacagctttggtatagataaactgggggatactaaacttcttcaagagatgatgaaggagtgcggcaggagcgctgtagtattaaattttgaacttgatgaaaagatgcaaaaaatttcatcgagcaatattaagaagatgatactatcaggcgaagtgatgagtgcaaacaaagacttatctagatactactcaatcaaatcaagagtcattcatggcaagagatatggttcatcagtcggcataccaacagcgaacttaaatatcaacactgaatacatcataccataccaaggagtctacgttacaaagattaagattagagacaagatatataaatccatcacaagcgttggtaaaaatttaagctttgatgaggactttgtaagtgtagagagcaatatctttgacttcaaagaggacatatatgatgacgtagtaaggttattttttatatatagaataagagacatgttaaactttgaagataaaagtgacttagtaaaacaaatcaaagaggatatagaattcgcaaaagaatttgaagattatttataattatgagtataaaatgctttacaaaagctaaagttcgtgatatactaatataggtaccttatgctatgtatatcgttcccgtcgatacacttggctaaggcaaataatattaaagggggataataaaatgttatcaaaagaagaaaaatcaaaaattattgacgattacaaaatgcacgagggagacactggttctacagaagttcaaatagcaatatttacaaagagaatcaatgacctaacagaacacttaaagacacacaagaaagaccatcattcaagaagaggactattcaaaatgataggtcaaagaaaaggtcttttaaaatatttgtataacactgatattgaaaagtatcgtgaattaatagacagattaaatattagaggataaagagggcggggctatcccgctcttttgttagattaaaggagatgtgagatgcaagaaaattttaaaactaccttagctggtagacctttagaaattgaaacaggaaaaatgtgcgagcaagctagtggatcttgcttagttaagtatggcgatacttatgttttagttaatgcgacaagcacaaaaactccaagagaaggagtagatttctttccactaagtgttgattacgaagaaaaattttattctgttggtaaaataccaggaggatatataaagagagagggaagaccttcagagaaagcagttttaacttcaaggctaattgatagaccgattagacctttatttcctgagggcttttttaatgatgtgcaagttatagcaactgtactttctgttgacccagacaacagtccagagattgcagctatgattggctcgtcagtagctctatgtatttcagacataccatttaatggaccaactgcagcagtatatgttggacttatagatggagaatacgttataaacccaacacaagaagagatggaaaagtcagatattaacttatgtatatcaggaactaaagacgccatcatgatggttgaatcaggctcaaacgaagtgtctgaagaacaaatgattacagcaatactaaagggacatgaagcaattaaagaagtgtgtgaatttgaagaagaaattattaagaagataggtaaagaaaaatatacttttgaaaaatttgaagctaaagaagaaatatttaaagagattgatgctgagtttagagaagacattaaaaattcaatttttgaagcagataagattcaaagaattgaaaatagcgaatctgtaaaagatgctatactaaataagtatcttgaaaaatatccagatgatcaaagaagtatacttaagactattgacgatataacaagtgaagagtttagaaagggtattcttgagagaaatcaaagaccagatggtagaaatactgaacaaatcagaccgctttctgctgaggttggaatattacctagagcacacggctcaggactattcaaaaggggtcaaactcaagtattaactatagctacacttggttcgtttggcgatagtcaatcacaagatggacttgttgaagaaggcgaaaagcactacatgcatcaatacaatttcccaccatactcagttggagatgttagacctcttagaagcccaggaagaagagagataggtcatggtgcactagcagaaagagcacttgttcctgttgtgccatcattagaagagtttccatatacaattagacttgtatcagaagttctaagctcaaacggttcatcatcacaagcaagtatttgcggttcaactcttgcactaatggatgcgggtgttccaattaagaagccagttgcaggtattgcgatgggacttattaaatcagatgacactacaaggatactaacagatatacaaggtctagaagaccacttaggagatatggactttaaggttgctggtactaaagacggtatcacagctatgcaaatggatattaaagttcaaggtatagatgaagagataatgaagactgcactaaaacaagctagaacagcaagatttgaaatacttgatgtaatcaaatcagctattgatgctccaagagcagaattatcagaatacgctccaaagattgcaactataaagattgatcctgaaaagattagagacgttataggttcaggtggaaaagtaatcaataagattattgaagaaactggtgctaagattgatataactgacaacggcgatgtttacatctcagcagacactatggaaggtgtcaacggagctaagaagatgattgaagatatcgttaaagatgtagaagttggcgaagtatacttcggtaaggttaacagaataactaacttcggtgcctttgttgaagttttaaacggtaaagaaggtttactacacatctctcaaatctctaaagaaagagtaaataaagtagaagatgtattaaagcttggcgatgaaatcatggttaaagttacatctatagatgaacaaggaagaattaatctttcaagaaaagcattagttgaaaatgctgacagtgaatctaaataaatttagggcgacaacatggtaactgtaaagataattaataagagtaaaaacgatataccacaataccaaacagaaaactcagctggagtagatataagagcttcacttgatgaagacttagtattaaaggcaggagagtttaaactagtaagtacaggtatctatttagagataccttcttcttacgaagttcaaataagagcaagatcaggcttaagtgttaagcacggcataggtcttgtcaatggtattggcactattgatagtgattacagaggcgaaatcaaagttcctctaataaacttttctaaggaagactttattattgaaaatggcatgagaatcgctcaaatggttttatctaagtatgagaagatggactttgaagaagtagatgagctttcagactctgaaagacaagatggcggttttggttcaacaggagtaaaataatgacactacttaaagcaataatactcgctatagttcaaggcataacagaattcttgccaataagctcatcaggccacttagccatactacaaatattatttaatataaaagaaggtaatgtattcttctcacaagtcttacacttcggaacattactttctattttgcttgtatatcataaacaagtaataaatatgattaaagaattctttaagatgatagcatcacttataagaaaagagaaaataacacttaatcattatcaaaaacttgcactatacatcattatagcgacaataccaacagttataattgctttgtttatagaaaagtttttggaccaattatatatgtcagcgctacttataggtatatgcttcttgataacagctgtattgatttatattatcgatatcaatatgagaagcactaagaagataagtgaagctggagttcctacagtgcttgctataggtgcggtacaaggtattgctgctttaccaggcatatcaagatctggttctactatatttatctctcatgtattaggtgtaagaaagaaagatgcagtagatttttcattcttactagctatacctgctatgtttggtggctttatcctaggacttaaggacatatataaagagggagctagtgtaagtttcgacacaaatgcaattgttgggcttattattagttttattacaggagttttagcaatcagactaatcaagttattagctaagaataaaaaattccatgtattttcatattacttagttgtactaggtattgtttgcataatagcaagttttttataaagatataagcgaagggattttatgaagactaaaaataacagaacaaataaaagaaaaagaagtaaagtaaataaaaaggtagacaagaatgaatctttattgatatcaggtcttacaatactttttgcgtctatatttttgctaatttttgcgaatagcgacgcaacaggtgtttttggcagatggataaagagtggtcttatctaccttttttctatgggatttaatatatttttattctacttattagctatagccttggtattattggtgccaaagtctaggcattatgcaagaaaacttattatatcacttagtataatctttctaagtcttttagtagtctttgattcgtctactgtacttatgagttctttctcatcacatgtttcacaagcaatcgaactatcaacagatttaaactctggaggacttattggcggcgcttttggatacttattctacagattatttggtgcagtaggtactatcatagttttagttattataaatattattaacatctactcgttaacaagcattaaaaagtctgatatagcacaaaagactgacaatactatgaataaaattcaagatggtattgaaagcagcgttgaaaagataaagcttaagagacaagagatgaagaataaaaaggttttatcatctgatgatatttttagtgacgaggaaaatacatctgttggtgaagaagctaataaaaaagcagataaggacattaacgaagaagactttagtgacgactttgtagacattaaaatcaatgactctgcaaatcaggaagatataaaattagatcaagagcaaaataagaaagaggccttaaaagaagagacaaaagagacaaaagcaagtaaaactactaagaaagaaactgaaaaaactgatgaaagtgaagatatcgatataagtaaagagattcataatgaagacatcattcactatgaatttccatctttaaacttgcttaaagaagctcaagctagcaacaatagcacaaagggcagagagattaaagacaacatcaagatcatacaagacacacttaataacttcggcgtcgatgcaaaagttatcggagttaatagtggaccaactatcacttcatatgagataagtcttgctgctggagtcaaggtaagtaagatattaagtctttctgataacttggcgcttgctcttgcgacaactgatataagaatacttgcgcctataccaggcaagagtgcggttggtattgaagttcctaataagaacaaggataccctactattaaaagaaattttggatactgatgaatttagaaatctaaaatcaaaattgccacttgctcttggcaaggatgtaacaggcaataccatcattagctcaattgcaagtatgcctcacttacttatagcaggtgctacaggctctggtaagagtgtgtgtattaataccataatcatgagtatactttacaaggcgagacctgacgaagtaaaactaatcatgatagaccctaaggttgtggagctaaatgtttacaacaacattcctcatctattgataccggtagtaacaaacgctaaaaaggcacagttctcacttaactgggcggttcaagagatggagaagaggtatcaattatttgcaaagaacaatgtaaaagatatgcaaagttacaacgagcttgagactatcactgagaagatgcctcaaatcgttataatcatagacgagcttgcagacttaatgatggttgctgcaacagaggtagaagacgctatatgcaggcttgctcagatggcgagagctgcaggtatgcacttaatagttgcaacacaaagaccgtcggttgatgtcattacaggaactataaaggcgaacattccttcgagaatttccttccaagtttcttcacaaatagactctagaactatacttgatatgagtggagctgaaaagcttctaggcaagggcgatatgctttactacccatcgaacctttcaaagccgattagagttcaaggcgcctttgtaagcgataaggaagttaagagtgtttgtgactttattaggaaccaaggtgaagcaaattataatcaagatgcagttgagtcaatcacaacaaataacactagtcaaactatgcaagacgataaagatgaattatacgaagaagcagttaaacttgtggtgatggatggacaagcatctatatcatatttacaaagaaagcttaagataggctactctcgtgctgcaagaattgtcgatcagatggaagagatgggcgttgtaagcggttacgatggatctaagcctagaaaagtattgattgaaaaagaagatattgagaatttaaacggtgaaagcggtgaaacacttgaataaagtatttatacttactatgggctgctcaaaaaatgatgtagactcagaaactatggcatataagctaaagaatgatgactatacaattataaacaatccaagcgaggctgattatataattatcaacacttgctcgttcataaatgcagcaaaggaagagtctatagacgcaatatttgatatgattaatcaaaagaaggcaggtgctaaaattatagttagcggctgccttgctcaaaggtattcaaaagaactcaaggaagagataccagagatagatatcatagttggtacgggtatgttccaaaatattgcgagcataattaaagagtatgaagataataacaaagacgatgtttatgttgacaatataaatgcagatattgaatatatagaaaaggatgctgcggacattacagagtatgtaaagattgctgaaggctgtaacaacctatgcacttattgcataataccaaagcttagaggcagactaaggtcgagaccaatcgatgatatagttaatgaaattaatcatctatacaagcttggcactaaagaagtaatacttatagcacaaaacacaacagactatggcacagatatatactcaagaccgtcacttgatatgctattgaaggcgatacttgacaggacgaagatgccgtggataagaattatgtatttatatccagacaatattactgatgagctaattggaacatttaattcatcagatagaatacttaagtacatggatatacctcttcaacatgcatcagaccacgtacttaagatgatgaacaggcatattaacaaagaagagacacacgctttaataagtaaacttagaacaaagatagacgacttagtactaagaacaaccttcatagtcggcttcccaggagagagcgaagaagactttaaagagctattaaactttataaaagaagaaaagtttgataagcttggcgtctttgaatatagcgacgaagaaggtacaaggagctactcctttaatgaaaagcttgatgaggatacaaagaggcgcagaagagaagagattatggatgcgcaaatggacatctcaagagcaagtttagaaaagagagtaggaacagttatgaagtgtttaatcgaagatggggccgatggcgagtatacagccagaagctttatggacgctcctgatgttgatggactagtttacataagcacagataaagatttagaacttggaagcttttttgatattaagatcacagaagcactcgagtatgatttaagaggtgaaatttatgaacctagcaaataaaattacaatgtttagaatatttttgctgccaatttttgtattaagctgttattttgatcaaagtggtatatctagcctattaatatttttacttggatcatttagcgactttctagatggctacgttgccagaaagtacaatatgattacagactttggtaaattcatagaccctatagcagataagatacttgtactaagtgcctttattatgtttatagaaaggggctttgttgagccatgggtagtcatagtagttttatttagagagctacttatctctggctttagaatgcttgcagcgaagaaaaatatatccatagctgcagacatctttggcaagctaaagacaacaacacagttcttctgtgtaatatttttctttttaacaattattttgataagtggaaagatgtttataattggcaaggttctactatatatttctgtagttttaactgttttatcaatgataaactatttatataagaacagggaagtattacatggaacaatgctgtaagattattgaaatcttaaaagaaaagcaaatgacaatctcgggtgctgagtccataacaggtggtcttatatcatgcgaacttgttaaggtatcaggcgcatccgatgtctttcgcggcacgcttgtatcgtatcaatcatgcgtaaaggtagatacacttaaagtaccagtggatcttattgataagtacacaccggtatctatgcccgtactatctagtatgcttgatggagcaaacgagctatttaatactgattttgtatatgcaataacaggtagcgcaggaccgacttcatacgatggtatacctgttggacttgtttactatggtgtgaagtataaatcacatcaatatttacataaaaaggtatatacaggcacaagatgtgatataataaaagaagcgaagaataatttaatcgacttaatattagaaataataagtaaataatagaggtgaagaaatggacaagaacgaaaaagaaaaagctcttgaggatgctttaaagaagattgaaaaagattttggcaaaggttcaataatgagacttggcgatcacgctaagctaaatattgaaagcataccaactggttgcttatcactagatatggctttaggtataggtggtattccaaagggaagaatcatcgaaatttatggacctgaatcaagtggtaagactactcttacattgcatatcattgctgagtgtcaaaaaagaggcggcacagctgcttttatcgacgcagagcacgctttggatcctcaatatgctaggaacttaggtgtagatatcgataagcttatagtatctcaaccagacaatggtgagcaaggtcttgatatagcagaggcacttgtaagaagtggcgctgttgatttagttgttgttgactctgttgctgcactagtaccaaagactgagatcgaaggagctatgggagacgcaactataggtttgcaagcaagacttatgtcacaagcaatgagaaagctttcaggagttatatctaagacaaagtcaacagttgttttcataaaccaattaagagaaaagattggtatcatgtttggtagtccagaaacaacaacaggtggtaaggcattgaagttctactcatcagtaagacttgatataagaaagtttgatgtaataaaacaaaaagaggagacagcagttggcaagaaggaagacgtcattataggtaacagagttcgtgttaaagttgttaagaacaaagttgcacccccattcaaagttgttgaatttgatatcatgtatggaactggtatctcaaaagaaggagatatcctagacgttgcagttgatagaggcataatcgaaaaggctggcgcgtggttctcatacaatggcgaaaaacttggccaaggtagagagaatgttaaacaattatttaaagataaacctgaactaatggaagaggttgaattaaaagttagagaagcaagcaaaagtgaagacgaagctatagaattagaagcgtcacaagagacagaagaataaagttgatataatgaaatttgtatttttaacagatacacatattaaagaaaaaaatcctatcaatagactagataattattttgaaacggtaattaataagattgacgaagtcgcacactttgctgttgacaataaagttgattttatagttcacggtggagatctttttgatactccaaccgtttcaactatttgtcttgtcaaatttaataggattcttttttatttaaaagagaataatataaatttctacgtagttagtggcaatcacgacatctacggacgcaaccctgatacgcttccgagaacacatctaggactgcttgaatcatttgaagcggtagagatgcttgataggtataatacagttgaggaaagatgcagtaacggtaggacaatcaagatagtgggcacgccatatatatacaagatggatggagaggataagaaggcatacctattaaatgactatgagaaagatgataatgagtttttgataaacgttgttcatggtatgctcttagaaaaaccatttattaaagagatagagcacactgttgtgactgatatacttgatactaaggctgaccttaccttatcaggccactaccatacaggctttggtgtgattaagcttaatggaaagacgtttttaaatccaggttcacttacaaggtgctcaaatacgactgaagagtataagaggatgcctcaatatgcactaatcgaaataaatgaagactttaaattagatattaagctcatcgatgtgaagtgtgcaaagccgggatttgaagttttagatagagagtacatcgaaaagcataagaacgacaagcttgaagttcttaacttcgaaaataccatcagagaggctgcaaacttcgacaagtacgactactatagcgtcttagaagagataattaagtctgataatgttgaaaaggctgttatagatgaggcgaagaagcgtttagagagagcggaggaagatatacatggtcaagattaaaaaattagatctaataaattttcaatcgcataagtttacttcactcgaattagctgatggtcttaatgtcatagtaggtccatctgacaacggtaagacatcaatactaagagctatacgctgggtactgtttaacgagccacagggtatgagtatgctcagaaacaatgaggacttcgtatcggtaagaatctacttcaataacgactactcagtggagagaaagcgctcgaagaaggagaatttatacatcatctacaatgaaaagactggtgaagtacaagagtttaacagcttaagaactggacttccaccggaggtcttacacgtgatgaagataaagaaagttacacttgacaaggctaatgacataaacttcaatatacagtttcagcacgatggaccttttatgtttagcttcactgcaacacaaaagtcagccctcataggtaagatgtataagcttgatgttgttgacaaggcaatcgacgatactaacaaggatataaagtcgcaaaagtcagatattaagagaatcaacgaagagataaaagatcttgatgaaaagatactcgtatacgctaacattgaaaaggaagagaaacttcttaaagacagagagcaaattacgagaagagtagaagagtcagtagaaaaactaaactttgtaaacaagataaaagagagcttagaagagaatacacaaaacagagactacttgcttaataagataaaagattttgataagcttctaagtaacgaggcattgatagctaaaattacaaaagcatataaactatttggtgagtacaaggtatacaagcaaagactagacaaagtaaagcttgatatagacaagacagaagcaatatatacaaagagcaagactcttacagataagcttgatatagacaagacaattgttaagaacatagatacattcacaaagctaagcgagttaagaaagcgcttattagatgtaaacgcatccattgacaagggtagatactttatcaaggataatgatgataagctaagtagcgacctaaaagagtatacagagcttcttcttaagctaaagaagtgcccttattgtaactcagatgttgatagagagcacatcgacatgattgttaaagaatatttataataggtgataatatggattatataacaagattagaagcattgaaagatagcttggataaggcgaaactaaataaggttaagtatgaggaaaggttaaatatcttacttaaagatagagagaaaatcattgaagagattaaaaagctcggcatagaaccagacaatattgacaatgagattaaaaacttggaaagcaaaatagcttcagacatagcaaaggctgaagaccttataagagacaatgaataattatactttagagattgaaagaatcaaaaaatttaataagtctttagagaataaaattttgcaggataaaacgaagagacagatgctacttgagaagaaagcttcacttgcgaaagaagcagaaaacttagatgagaagaacatgatctttgagaagacaaaactcttacttgaaaagacgagcgactatgcaagaaagcaagcgataaagggcattgagaatatggttacaggcgccttaagagagatattctcctcgcaaagcaagttcatcatagaagaaaagacagtagctggtaaggtcgctgttgacttttaccttgaagatgaggtcgatggcgagaaagtgcttacagatccacaagagcaaagaggcggcggctatgtcgatattatatcacttgcactgcgttttgcaatgattgaagttttcaatcctaagatcgaaggaccaatattattagatgagccagcaaagtttgtctcagaagactacatctacaacgttgcagagtttttatcaaaggtaagcgaaagctttaaaaggcagataatcatggtaacacactcaaagtacttatcgaacataggagagaagacttttgaagtcatcaaaagagacaatgtatcagaagtagtagagaagtagtagagaagtaggtgagcttatgtttaagtttatatttggtgtaataaagcttatcttgatactgccgttcttaccgataattttcattgcatcattatttcaagataagagtcaaaagaagccaaagaaaataaagcaaaataaaaaagatgatcttgcttggatagatagacttgaagagctagatgccatcatcgaagattaatttaatattgaacaaaagaaaggctatgattattcatagccttttatattgcaaaattatttaattttttctaaaaatatacttttaattctatctaattctttctttgcttcagcttcattctttgttcttatcgagaaatagaacttaatttttggctctgtgcccgacggccttatagctatccacgagtatggatcaagatagtacttcaatacatttgacttatcaagaccagtttcatcatttaagtagtcgactcttttaacaaatttaagttcatcaatctcagccttgtaattatttctgaaatcatccatgatcctatccatcttttctttgccagcaagtccttcaaagactatggactcttgtgcttgtacaaagtagccgtactttttataaagctcatctaagtgctctaagatgtccatgccgcgcttcttgtaataagatgtcatttgcaaaagtatcataaaagcattcacagcgtctttgtctctaacaaaatctttgtaaacatagcctatgctctcttcaaatccaaagaagaagtgcttgttcttatctttttcaaagtcgtttgcaagcttgcaaatatttttaaagccagttaaaacatctacgcactctagaccatgctcctcagctatagcctttgcaaagtcggatgttacgatggacttaacaaggtaagaagtctttggagccttcacatgatttagaatgaagtcaagcataagagcgccaactctattgccatctaagattacatagtcatccttttgtttaagcgccatgttaatcctgtcgcagtcagggtcacttgcaaatatcacatcagagccgtgcttcttagctagtgctatagctaaattgaaagcctccttgaattcaggattaggataagggcaagttttaaaatcagggtctggaatttcttgccttttcggtatatggtaattattaaagccaaagtccttaataactttaagtataggctttagaccagttccgttaagcggagtatagacaaagtttaagtccttgtccatatctaaatctaattttatagagtagaggtctctgtagtaagacttgaaaaattcatcatcaattattttaagaagagcatcgtttgtatcagtaatcgacacctcatcaaagtcgacttctttcattgcactttgaacactatctgccatatcttcaagaatttgtgagccgtgctcattatataccttgtagccgttgtagtccttagggttatgactagctgtaaccataacaccagcgcttgctttatagtgccttataccatagcttacaaatggagtgggtagcggctcattaaataagtataccttgatgccctcattagtaaagatatttttacttatattagcaaagtccttagacatatgccttgtatcatagccgataacaacagatggattagaaaatttttgctttaacaccaaagcaatagcttttgcagcaagctttacagtgtaaacattcatcatattagttcctagaccaagcttacctctaaggccagcagtaccgaagacaaggtcgctagcaaagttactttcaatctttttgctactcaaagattttagagaagccgcatcactactagtaagacttgtgtaagaaagccatttattatacctttcattcgagcttttaattctgatgttcattttagtagaaagtaagtagtaatcagcaccgcaaagcttcgcaatgtcatcgatcataattagagttctctttgtattatatttagtctcgatgtatatgtttctaaacttgtatggacttttaaagtcactacctgaactagagtagaagccattatctatataatacttgtatatagcatcctcgttgtcaacagacagaatctttaacattagttggtatgcttcaatatatgttttaaccccatatgacttaccatttatatacaagtaacttagtactaggccttgtttataattatcataagtaaatgtatatggtttagtgtgaattgtttttgtataagatttaaaagtttcttgatcttgctcattaatatcgtttttaaaatttaatattttacccattaaatcactccttagtataactattataatacatataagaaatataaacaataaaaaagatcaaactaataacagtttgatcatatatggcgggagtatgtgcgaatcgaacacacctatgaagctacaaaccccacatgcacggttttgaagaccggagagcccaccaggactcatctacccccagacttgtatattatagcacaatcaatatagatttacaagttattttattaacaatagaagattttgataaaaaataaagaaaatacaaaaaaagtcttgctatttataaaaatatatggtaaaatatcaatgttatgaaatttggaggtgagattattggcaaacattaaatctgcgaagaaaagaatatcagtaattaagaataaaactttagtaaataaatctagaaagactgagcttaaaaaccttataaagagatttgaattattggttggagaaggcaatacagacgaagctagagaagtacttaaagtgatagatagaaaattaaagaaagcagaacaaagaaacttattccacaagaataaagttgctagaaagatgagtagattaactcataagttaaataaggctgtttagttaaaagagaccttattgtctcttttaactattttaatttttttaaaagaaatttaaaaaaaactctttacaaaacgaaattcttgttgtataatgataaggtagttttggaccattagctcagatggtagagcaactgactcttaatcagtgggtctagggttcgagtccctaatggtccaccacgaagaaacgtgttatagcacgtttctttttttatgtccacagctattaaagaagttcatatatcaatacatttgtgattctaatcaattgacaattaagccatttaatgttaatatattagtaggtgatgatagtggagaattttgtaattatagatggttcgagcttacttaacagggctttttatgcgattagattattgagtaacaagaaaggcatatttactaacggtatatatggctttttaaatatgcttgacaagattaacgctgactacaatccaaagtatatgtgcgttgtcttcgatagaaaggaaaagacttttagaaaagatatgtacgaagagtataagggcaatagaatgaagttccctgatgagcttagcgttcaatttccaatacttaaggacatacttactaagatgggcataaaggttttggataaggctggttttgaggcagacgaccttgctggcactctaactactatcaattgtgagggcgttaaaaagcttttaataactggagataaggactacttgcagcttattaaggatgacactgatgttatcattaccaaaagaggcgttagtgaatttgatacatacaataaagataagatgaacgaggtttatggtttaagtcctgacgagtttattgatttaaaggctctgatgggtgaccaatctgacaatattcctggtatttatggcataggcgagaagactgctttaaagatacttagcgagtatagaaccatagaaaatttatatgaacatgcggatgaattaagtaagaacaagactaatcaaagaattatagaaggcaaggacatggcttttttatcaaagaaattagctactatcgttaaagatgttgatatatctatgaatattgaagactataagataaaagatcaagatgatgaagcgcttagagaagtatatgaagatcttgaactaaattcaaggttaaaatcacttggtagcacaaaaaaggtagaagctgttgaaaataatttagaggtagaaattcttgataaagacaatttagatattcttaaaaatcttaaagatgagtttatattttatattaccactgatactgacaagtatcttagctctaaaatcgtctatattacttttatcttagataaagtttatataataaaaactgacaatttatcagtgataaagcatatacttgaaagttctgagataaaaaaagtatcgcacgacataaagaaagtttatgtattagctcaaaaagaaggtatcaagataaataattttagtttcgatacagctatcgcatattatttgattgattcaaataagtctaactatagcatacaaagtatggctatggactatttgcaaagacaaataaattcgtttgaagatatttataaaaaagaaaaaattaaagaaaaattagtctcagctgttgatatgaatacagctgaaggcgtattaagtaatgagattaagactataaaagatgcgtatccaatacttaaggaaaaaattgatagtttggatgaaagaacactgttttatgatatagagcttccacttagtgaggctttagcagatatggaattcattggatttaaggtggatagagatgagcttttaagacttggcgacgagtatgacgaacttatcaaagaaaaagaaagaattattttcagtttagctggtgaggaatttaatataaattcacctaagaaattatctgaaatactatttgataagctaggcattaagcctatcaaaaagacaaagacaggctactcaactgacgctgaagtcttggaaaagctgtctgacaagcatccgatagcagaccaaattgttgaatacagaacttatcaaaagcttaaatcaacatatattgacggccttaaggatttgattgatgagacaggcaggatacactcctactttaatcaaacaaatactgcaacaggaaggatatcctcgcaagatccaaaccttcaaaacattcctataaggactgaggccggcagaaagattagaaaagcctttgtaagcgaggaaggatatactcttgttgacagcgactactcgcaaatcgagctaagaatacttgcctacattgctaatgatgaaaagatgctacacgccttcaaagaaggctttgatatacacagaaagacagcttcagaagtgtttaatataccatttgatgaagtagatagcgagcacagatcgagagcaaaggctgttaacttcggtattgtttatggtataagcgactattcactatcacaagatctaaagatatcgagaaaagaagcaaaagagtatattgataagtattttgaaaaattttctggagttcataaatatatgtctgatgttgtggaaaaagccaaggaagatggctacgttaagactcttttcaacagaagaagaaatattccagagcttcaaaactcaaactttaatataagggcatttggcgagagagttgctcttaatatgcctatacaaggcactagtgcagatatcattaaaatcgctatagtaaagatatttaataagtttagagatgattgtctagatgcacacataattgtaactgttcacgatgaaatcgttgtagaagtaaagaaagaagagcttgataaagttagaaatatcataaggactcttatggaaaatattgatggcctagatatggacttgaaggttgacatcaatcaagcggacaattggtacgatgcaaaataattatgtcttaacaggttccatagcatctggaaagtcttcagtattaaaaataatttgtgaagaaggatataatacaataagcgcagatgaaattgtcactgagctttatgttgatgaagattttttaagagattataagaactttataggtagagaatactttaccgaagggttaaagcttgataaatataagcttagggatgatatatttagagattctgctttgaaagaaagagtagaatcctttgtgcatccgcaagtttataaaaaaatcaaagaaagtctaaaaagtggatacaattttatagaaataccactattttttgaagcacaaaaatattttcttgaatcagatatagagataaaaggcgtaatttttatgaatatagataagaatttacaagtttcaagacttatgcatagaaataagattactaaagaagaggctgaatcaatgattgatagcagaattagtatcgatgataaaataagctcatcagactatattattaacaacaattcaaattttgatgatcttaaaaaagaagtcttgaaaactttggagaaaataaatgaaaaaactaattaaatttattataaagctgtttatattaataattgtagctgagctagtttacttgcatttcatacctaggaagtatgataagattatagacaattactcagctgaatatggagtagacagatcattagttaaggcggtaatatttaaagagtcacgttttaaggaaacagcagtttcatctaaaggagctattggacttatgcaattaatgccttcaacagcactgtggcttatgaacaagttaaagatagaagactacaagatagagtcaccacagaacaatataagactaggaacatattatttgtcgtatttaatgagtattatggatgaagatgaagagcatgcactacttgcatataacgcaggaccagagaatgctaagcgctggataaacgctgaaggctacaataaacaagatatggataactatgttgactttaatgaaacaagaaaatatgttagagaaattaagctaacaagaaacataattgattttgttgacaaatatggcattcttttaaatgagctttcaaagttattggaggattacttatagatgaagagaaaactatcattattaattatactagtactttgcatcacactagtatcctgcaataagtcaagcgataaaaaagataaaactacttcagataatgaagcttatctcttatcgcaagggggcaatattaatttgccgctaacgccatttaagacatttgatccaatacttaatgataatctttactatttttactttaaagatttgatatactctagcttatttgaagttaacgatgattcatctctaagtaatctcttagctagctctgtagagaaaatagataatactagatacagaataaagcttagagagggggttaagtttcataacggcaaagccttgagcgctgatgatgttgttttttcgtataattacattataaataacaaagacaggtcattttattacaacttaattaatgacgaagctaataaaatattcaatggtgcagagcttttttctttaaacagaattgataatagcactatagaagtgaagttcgcaagtgcaaagccaaacaatttatacgctctaacatttcctatagtatcatcaacagatgactatagcgattataagccgaacggcacaggaccttttatgtttaaatcatatgagaacaacaaaatgcttgtacttgaaaagaataaatcatacttcaacggacaagcatccatagacacagttactggagttgttattgaaaatccggctaatatagaaggcatatttgaaacaggaaagctagatatgtatacagcctttgattcaaactatctagagtttttaaatagctcaaagtactctgttatagagtatccatccaataaactatattatcttgcattcaattataataaaagtccttcattagatttaagaaagataattgatgctagcataaataaagaaatgattaataaagaagttttttcttcaaacttagaattatgtgatggcttttatcctgacgagtcaacatttggtcagcacgatattaaagagagggaagacttaagcaatttattaataaagaaaaatgaaaatcatgaatacattgatgaaagaaacaaaaagattaaattaagagtgctttacaataagaacgatgcgaagagaagtgcgatagcaaatattatctacacgcagctagacaattctggctttaaagtagaactaattgctaaagatggaagcaatattgattttaatgaagactacgacatctatgttggagaatatttagtaaataatgcattcgatcttaactataaattctcatcaagatcagcatcgaatttcacgcactatgcagacgagagatatgaagaactgcttaataaattatatactggcaatatagattacaaagaacttaacaattatttattaaatgaaaaaatatatataccactaggttatgaaaaaaatgctctaatatttaaagagaatatgatctttgatactaaacttaattttcaaaatgtatattcaaagataaaagatttgattattgtgagcgcaaagtcttgataatatttctattaaatgttataataattatttgtgaaatggggtgattttatgtcaatacttaagacctttactggaggcgttcatatgcctgagtacaaggaattatcagaaaaacaagctattgaagagcaaaaagaaccaagtagagttgttatcccactaaaccaacacgtaggtgctgaatgtacaccacttgtaaaaaaaggcgaattcgttagagaaggccaaaagataggggatagtgatgcatctttatatgcaccagttcatgcgagtatttctggtatagttagagatattggcaaagtttacactacaggaggctggcttgtaaattcaattacgatagaaaaagctagtgatgaagaacttgaagctttaggcaatccaaacagtagtgaacttttgatggaaggttacggtgactttagaaacttatctaaagaaaaaatcatcgaactaattaaagaagcaggaattataggtatgggtggaggagcattcccatcgtttgcaaaaatacaatcatcagacgatggcaccatagatactataatcatcaacgctgctgaatgcgagccattcttgacatgtgaccatagaatgatgcttgagtattctgacagaatgataggcggacttaggatagttatgaaatatcttaacgttagcagtgcttacataggaatcgaagacaataaaaaagacgctatagacttattagaagaaaagttgaaagatgacagctacataaaagtagcagtacttaagacaaagttcccacaaggggatgcttacagaatggtagactcaatattaggaagaaaagttcctcaaggtggaagaactaaaaatgttaatacgtttgtaagtaacgtaggtacttttgttgccatatatgatgctgtaacattcggtcacacatctcacaagagagttgttacagtaacaggcaatggcattaagacacctaagaacatcaatgcatacgttggaacatctattagagacctagttgaacaagctggcggatttaatggcaatgttacaaaagtaatcgttggtggaccaatgacaggtgttgcacaattttcgttagatactcctatctctaagaacacatcaggtattatacttttaagagatgaagattacaaagatgaagaagaaagccaatgcattaaatgcggaaaatgcgtagaagtatgtccagtacatctaatgccactatacatctcaagatatcaagctttaggcaatcttaagatgtgtgacaaatacaacgcacaaagctgtatagtatgcggatcttgttcatatgtatgtcctgcaaagagattcttagctgaaagaatttcagtagcaaagagagagattaaacaatctctaagaagatctagataggaggtaactatggaaaaaaatcaaaacattcaagaagaaaagctttacagagtaagtttagctccatatttgcgttctaaatcaactactcaaaggatgatgctagatgttatcatagcactacttcctgcattagcagcaagtatttacttctttggtatgaatgcacttatgctatgcgtagtatcagtagcatcatgcgttgtagcagaagttcttatgcaaaagttatttaaaaagaaagttacagttagcgacttatcagctgttgtaacaggcattttgttagcatttaacttaccagcaagtgcaccatggtggatgccagtatttggtggtttctttgctatatgcatagtaaaacaaatatttggtggaattggctcaaactttatgaacccagcacttggagcaagagcagctatcatggcatcttggccaggactaattactaattacattacacctgatggagtagcagcagctacaccacttcaactaatgaaggcaggtacaacaggtgagttgccatctttaatggacatggcaattggtaatatcggtggagttataggtgaaacatgctcaatattattaatccttggcggaatttatttaatagttaagaaaattatagattggaaaataccatgcttatatattctaacaacagcagttttattagctgcatttggtgtagatataagcttattaccataccatatacttggcgggggacttatactaggtgctttcttcatggcaacagactttgttacttgtccagttacaccaaatggtaggatagtatttgctataggttgcggtgtaataacagctataattagagtatacggcggtatggctgaaggtgtatcatatgcaatcatacttatgaacacagcatcaccactaattgaatcactaactacacctaaagtatttggggaggttaagagcaaatgaaagaaacattaaaacttggtttaatattatttatcattgcggctttctcgggtggagttttatcttatacaaacagtttgactaaacctatcatagatcaaagagaatatgaagaaactcaagctgcatttaaagaattaattccagatgctgacagttttgaagagcttgatgcagcaaaacttgaaagcttaaaaagtgaaaataaaaagatacaagatatctatgaagcgaagaaagacggttcagttgtaggatatacatttaaaacagctggatcaggttatggcggagacgttgttatattaacaggcgttatgaatgataagattacaaatatacttgttttatcacataaagaaacaccatcattaggtgatagaattgaacatgaagaattcaaaaatcaattcgctgacaaggatgcaagtaaggaactagttttatctaagactgcttctggagaagaaatacaagcaatatcaggctcaacaatttcttcaagagcaacagtagaagctgttaatcaagcgattgacgctttaagcaagttaaagtagaggtgctgagatgaaaatatcaaaaatatttaaaaacggtatggttgatagcaacacaatattgtcacaattagttggtctatgctcagtacttgctatttctagtacacttaaaaattcagtaacaatggcagctgctgtaattatagttacaatcctttcaaactttttcatatccttgttaagaaaggttataccttctaagataagaatacctatatatatcgttataatagcaacatttgttactatcattgacttagtattgcatgcatatttacctgatatgtacaagcaattaggcttgtttatcccacttatagtagtaaactgtatgatacttgctagagctgagagctttgcatcaaaaaataatgttttctactcaatgctagatggtctagcatcaggtttaggatatgcttttgcaatatgtttattaggctttgttagagagttaataggcgcaggttctatatggggcaataaaattatgccaggagcctcactattcgtactacctccaggagcattcattgttctaggtatatttgtagcaatctttaacatatacttattgaaaaagaagaaggaggaaaactagatgggaacaatatttaagattttgatttctacaatctttgtaaacaactacgttttcgctcaattcttaggaatttgtccgtttttaggtgtttcaagcaaagtagaaacagcgacaggtatgagtgtagcagtaacattcgttgtaacacttgcttcaatcattacttattatgtacaaaaattattattagatccatttaatttaggatatttacaaacaatagtttttatacttatcatagcatcactagtacaatttgttgaaatggttattaagaaaatttcaccagctctttatggagcaatgggtgttttcctaccacttattacaacaaactgtatggtactaggtgttgcaatacttaacatacaaagtggatacagcatatttgaagtaataacaaacgctatcggcgcatcacttggttttggtttagcactaatactactttcatcactaagagaaaaactagaacttgttgatgtaccagaacctcttaagggaatgcctcttgcattaatcgcagcaggacttatgtctattgcgttcatgggcttctctggcttagtataggaggtattacaatggaagtatatttaatacctatagctgtttgtggtatcataggtttgatatttgctgttttactttcaatagcatctagagtatttgaagtaaaactagatccaacagtagataaagtattatctgcactaccaggagctaactgcggagcttgcggatttccaggttgcgaaggacttgctaatgcaattgcaaagggaagtgcaccagttaattcatgccctgtaggaggtgcagcatgtgcaagtaagatagctgagatacttggcgttgatgcaggcggcactgaaaagatggttgctaatgttttatgccaaggcgactgcgacaaaacaaagttcaaatatgactacaatggcattgaaagctgttcatttgcatcacaaatatcaggtggaccaaagtcatgtgattttggctgcgttggttgtgcttcatgcgttaatgcatgtccatttgatgctatcgagatgagaaatggagttgcttttgtacttaaggaaaaatgtaaatcatgtaagatatgtgttggaacttgtcctaagaaaattattgagatggttccatataagagcaaggtatttgttaagtgtaagaacactaatatgggcaagaaagttaaagaagcatgcggcataggatgtataggctgcaagatctgtgttaagaactgtccaaaggataccatagcttttgaaaacaacctagctcacattgtttacgaaggatgtataaactgtactatatgtgcacaaaaatgtcctacaaaggcaatacatgctgagaatttaagaccaaagcctgtaaagccagcagagccagcaaaacctgctgaagctgctaaaccagcagagccagcaaaacctgctgaagctgctaaaccagcagagccagcaaaacctgctgaagctgctaaaccagcagaaccagcaaaacctgctgaaactgtaaaagaagtacaagtgacaaaggaagaagaaaataagtagataattaattgttttaagggtatggacagccatacccttaaaacgataaaagtaggttttcatatgaaaaaattagacatagttttaattatatctttaatattattttcgtttatctttattattaaggatagattttttgcgtctaattcaaataataaatacatagccatatcagttgatggcaaagattataaaaatttagaatttaaggaaaaaacatacatatatccattaaagacaaagtttggctttaataagatagaggttgcaaaagattatgtaagagttctggaggctgattgcccaaacaagctcgatgtacaacaaggaaagatatatagagcaaatcaaagtatagtttgcatacctaacagaatgattattcagattaaatcaaaggatagtaataataatgatgatgaagtggatgctgtgataaaatgatgaagacaagagattttgtttatattgccttatttactgtttttgcagtagtattaagtatcttagaaaatttcataccattgtcatttagtataccaggcttaaggattggctttgcaaacattgcagtaattgctgttttatatatatattcatttaagtacgctttatttatagtgcttattaagaactttcttgtctttttgcaatttggaaatatcattgcattttcaatgtcaatgtcaggcggtttattaagtcttatctttatgtatatatttaagcgttatttagataagtactttagtatatatggagtaagtgctgtaggtgcattttttcataactttggacagattacatgcgcatctatcatattatccaataagattatatttgcatatttgccaatacttgttattataggaacttttacttcaatagttatagctaaagcagctgagctttttataagcagatttaagaatattagaggttatataaatgaataattttgaagagaaaaaattaatgatgcaagacattaagcttgatgataggccaagggaaaaattaattagccgcggtagagagtcgttagagcttgcagaaattcttgctatcataataggaacaggaactacaaactatagtgcgattgaattatcaaaacaaattttaagaagattcaataatttaggtggctatgcttcgttaaaggttgaagacttaaccgaagtaagtggcataggaaaagctaaggcgtgccaaataattgccgcgctagaattagctagaagacttacaggtccaaacagtttgtatgaagctgaaagcttatctgaccctaaaaaggtttataaggcatatagaaatgagtttatgaatgaagctcaagaaaagtttattgtgcttgctcttgatacgaaacttaaattaattaagattatagaagtatctaaaggaactgttaactctacacaagttcatccaagagatgtgtttagagaccttgttaagtgcaatgcaagcagctgcatattgatacacaaccacccaagcggggactcgagtccatctaatgaagataaattattaacaaagagacttgtagagtgttcaaaaattattggtatatcaattttagatcatttagttatcggcgatgacttctttagttttaaagagcatggccttatggagtgatataatgaattttattaaaaaacatagaataattataacaattttacttattatcgtggctttagttcttattattacaataaataataagaaaaagagccttaatagtgttgagtctgcacctagtgatatcatctcaaaggtatcatctttcttttatagcggtgcgaatagaatttctaatggctttaaaggtttattttctaaagaagattcaaaaagcaagataaaagaacttgaagaaaagctaactatgcttgaagataagaatagagagctagaaactgttattatgaaatcttcatatcttaagaaagaatacaatttattacaaaatacaaaatataatttaattaaagctaagatagcatctatggatcctgatgaatggtataagaggtttactataaataagggaagtaaagacggtatcaagaatggcgatattgtcataggtgcttctgagatacaaaacaatgtctatatagaaggcttgctaggaaaagttactgatgcttctagagattcatcaaaaattatttctcttaatgatgataagtttaaagttagctttaatattttaagaaataatgagtctggtgttatgggcggaacttttgactctaaaattgagggttatatgtttgattctaatgcggacgtattagttggagataaactgattacatcaagctcatctgaagagtatcctgccaatatttacttgggagaagttgtagaagtgattaatgatgagtctaatttaaagaagataataaaagttaaagcggcagtagatataaaagatgtaagcaatgtatttgtcataaaaaggtagcaatatgaaagcattagcatttttaatttttgtatttataaactatattttaaaagtagcgattttgccaaattttctacctacaaattttatctttaatttaacactttgtattatagtctcgcttgcacttcttgctaagaatagagagggtttaacttggactttagtcatagctgtattaaatgatttactttctcatgaagtattatttatgaatctatttttattttcaataatatatttattcttatatttctttagagataatataaatttagagaatttgctaagcatagctttacttaatatagctgcatatatattttatatgctgttttcatatacactcctaagctttatgggcgtagatcttactataaaacatctttttagaaatattttttctataaaggccttatttgtagctttatatggagtacttacgtatcttatatctaaaaggatatttagatataagaattatgatatttaggtggtagtatgaacaatattgaaaagagtaatagatataattttattaatcttgtagttttgattattctaagtgttttacttataaaacttgcacacttgactttagttgaaggagatcactacagatatatatcggacaactctaaaattaggacaataactgttacagcacctagaggggagataagagacaggtatggaaggttgatagctggtaatcttccttcttttactgtgcaaatttataaagatgatatgcttaatttagatgcagatgatagaaataaagctcttcttgaacttactagaagtcttgaagaggatggggttatttatcaaaatgacttcccaatagactttaactattttgcatataaagatgaggcagagtatattagtaacgacaaaacacctttaaagactgttatcgactttatgaaaaataaagaagtaattaatgattgcttggatatgtacatgacttttaaaaatgaagataaaaagtatgatgttagacttgccaatagagcactttatgcaatcaaatcaaagtttgttgactttccagttgagtataagaatactggtgaaaaatatgaattcattgcaaatgataaatttcttgattttaaacaaaagaatgagtttaaagatgacttaagtccaagagcccttgtaaatgagattattgttagtgatgatactatattaagtagagtgttctcacatcctatgattagaaagcttgtatatgaaaagtataaagataacggtttaggaaacattgtgcttaaagactgtgttaatactttgtatgaagcttatcttgagcaaaaaagaacactgatgaaagagtatccaaactatgttacttatgagagcagtgctaaagatgactttataaatatttttaagaacacatcgcttaaaactatgcttggtaaggcttataagaatgaagatgatgaaattattgctccaggtaaaatacttattgatcttataagatcaaagaacatagaaacaaaggttgaagctataattaatcctgatactttagatgttctttatagatataaagatcaaaatgtagatccagagcttgcagctatcgatgagcttattaaggaagctgacaataaagagattatggatcagtttataagcaataacaagataagaccatatgctcaaaagtgcttgctagatgatgaagtgcaaacaaggatatctatagcaggtgactttgagtatgttgacatgattcagtataaaacctttttagagagaatctttaagttcaaagataaatttgaagataagagtcctgaagaaacattaaaaaaggcgatggagaagtataagatagatgaaaattatttgcgttacgaagcaaagacgcttcttagtatatatgagctgttcttaaaacaaggccagcttgcatatcaacctatcaactttgcttatggaataaaacctcaaacggttgctagaattgaagagaagctttatatgaatacaggggttaaaatatctatagaacctataagatattatcctatgggctctgtcatgtgtcatgtaatcggatctttaggaaagatttcaagtgatgctgagatagaaaagtatataaatcaaaagaagtatttaccggattctataattggtaaaactggcatagaagaggcatatgaagacgttttaaaaggtaaagatggagagatgcttgttgaggtagacagaattggcaataaaactagagttatctctgagactaaacctgttagaggaaacactatatacttaagtttagatgccgagcttcaaaagaagtgcgaaaaactacttgaaagaacgattaaaacaataccaagaagcggaacttttcttagtaaatatggtgacttcaagatggagtgggatagaaaaagaaagagaacatatgataatactagctcaggagctcttgtattaaataatcctaatactggcgaagtattaactatggctagttatccaggatacaatctaaacctatttgctaccggtataagtaagacagactgggacagtttaggacctgttgaagtgaacaatccacttgcagcaagaccattattaaatgttgctactcaaactgctgtgcaaccaggatcaatctttaaaatgtgcactggccttgcagcacttgagaaaggtttaagcccagaaacaaagataacagacatgggctatgctgaacttggtacaaagaagtttaggtgtttattgtggaccgactatcatatgactcatggagctatcaatttaagtgacgcattaaaagtctcatgtaactactttttctactctctagcaatgggagagaatcaaagacttggcaagaagcttgatataaaattatcgattgatgatatagttgacatggcaaagagattcggtcttaatgataagacaggcatagaaatcaatgtgcctaacgagttctctggaggcgtaccaaatccagaaaagaagcttcaaaatatgagattctatctaagaaacttcttaaatgataatctgcaagattatgttaaagaaggagtaagatatgatgaggtctttagggataaagctataaaagaaatattgtcatggcttgaagaaggaccgaatatgacaagaaacgaggttatagaaagtcttgaaaagcttggctttgatactgagagaaaattagctggtaagagggaaggcatagctgacattatcaagtacacttatttaaatcaagctaagtggaacctagcagatacactttatgtcactattggtcaaggtgactcgtcatatacacctatacagatgtctaactatgtagcgactatcgccaatggcggacaaagaaacaagttaacattgattgattcgattaaatcatatgatggattagaggatatctatacttttgaaagaaaatctgaagatattggtttaaagaacaagaaggacttagatgttataaagagtggtatgtataaggtaagtaaacttggatctgcaaaaccattgtttaaagatttccctataaatattggatgtaagactggtactgcggaaaagaacggtataaatccatatacaaagatgccatatgattcgttctcatggtttgtggcctttgcaccatacgaaaagcctgagctagcagttagcgctctagtattccaaggtggtatgggtataaacgctggacctatggttagggaagctatagcagagtacctaggaatgaataaagaaaatatttctaatgatttaccactagttacaaaagtcttaaagtaaggagaatatattgattaatagaaagaaattagaaaaaatattaaagcttgtagaaaagcctgcgagatatataggcatggagaagaactctatagttaaagattttgaaaaaacaaaggtgaagtttgctttttgctttcctgatatgtatgaacttgcaatgagctacttaggacttcacatactttactttttgataaatcaaaatgaagactacttatgtgagagagtattcttgccatggcgcgatatgcaagaaaagatgagagaggaagaacttgaattattttctcttgaaaataaagaagagcttaaaaactttgatgcggttggcttcactttgcagtatgaaatgagctttacaaatatattgaatatgcttgacttatcaaaccttgaatataaaagtaaggacagaggagaggatgatccgattattgttgcgggaggtccttgtgcagtaaaccctgaacctatcgctgaaataattgatgtttttcaaataggcgaaggcgaagagatgatgctaaggtttttagagctacttaagattaaaaaagaaacaaaacaaagtaaggacgaatttcttgaaacacttgctaaagaagatggcttttatgtaccgaagttttataagcctcattacaatgaggatgctactataaaaaattatgaaaagctaaatccaaattgcaaggatagagtaaagaggaactatatttcaagcgttgacaagatgtttcaaattgacagaatgattgttccatacatcgatgtagttcataaaagagcagttgttgagatatttagaggttgcactaaaggatgcagattttgccaagctggcatgttatacaggcctataagagaaaaatcagatgagaacatcaagaatatcgccaagactatgatagacaatactggttatgacgatgttagtttgttctcactaagtacttgtgactatactaaccttagagaagttgctcgtgagatgaaagagtactttgtacagaacaatgttagcgtctcactaccatcactaaggcttgactcaccgagcatagatgtattgaaggacttatctgatgtgaggaagtcatcactaacttttgctccagaagcaggcagccaaaggttaagagatgttatcaacaaaaatgttagcgaagaaaatttaattgatgtcatgacttatgtatttggagaaggctggtctaagattaaactttactttatgataggccttcctactgagactgaggatgatataaggggtataaaagaacttgcttatttagttagagatctattctttaaaagagatagggaagatataaagggagactttagactagttgtaagtacatcgtgttttgtgccaaagcctttcacaccattccaatggtttaagcaagatagtatagatgaattttacgaaaagataggcatacttcgctcatgtataaaagataaaaagattgactacaactatcacgatcctgagcttagctatattgaagcggtacttgcaagaggcgacagaaagcttgcggatgcgcttatatatgtctacgaagaagagaagaaggctgagaaagtggataacgattttatctacaacaattacatgaacgcattcaaagagtttaatttagatcctgacttctacgcaagacgcgaaagatcatatgatgaagttctaccttgggatataatagatattggtgttagcaaagagtttttgattagagagtatgagaagtcgatgaaggcagagactacaaaagactgcagaatttcttgcaatgcatgtggtattaagaactgtgaaatgaggggtaagcatgaaaattttgtgtaaatttacaaagttaggttacttaaaattcatctcacacttggaccttgtggacttatttcaaaggactctttttcaaaacaaagttgatgtaaagttctcggagggctttaatccacatccaaggatgtctattgcttatccacttccactaggtatagagtcaaatagtgagtatatggagatatacttaaactcaaagattgatttaaatgattttattattagaatgaacgagaagcttcctcatggcattaagatagtagaagcaaagtatgatgacgatgagtctatatctaacaaggtgaagtcggtcgtatatgcctttaagctattgaacactttttttgaaaagaataagaacgttgatattgtaagcgaactttcgaagattaatgacatggatgaggtcgagatagaaagaaagagaaagaaaggtaagagaaggatcttcgttaaggaaaatgcaaaagactttttgactagattagagcttaaagatgatgcaatatatgcatatataaagatgagtgaggagggctcgttaaagcctgcactaatatttgacatacttaataaatatacagacataactatggatgagcttgacatagacttagaacgcataggcttgtatcaagactatgaaggagagaatgaaatatttttataaaagtataagaattgattataaatagcttgtaaattataaaatttgatgatataatatgaattacagagtagaggaaatgcgctagtgttaaaagatgggatgtagcttttaaacgaatggcgatgagccgcggtatttcttcgcttccgctgtataaatattatattatttagcacagcctctggaattttattttaggaggatttttttatgcaaaaaaggagatttacgactaagaaattagtcctaagtgcattgttcgttacgttaacaattttaatgtctaaatttttgaaaattaaaattgctactggattagttttctcatttggtggatacccactaatgtttggtggtatggttttaggaccttattacggctttatgatgggtatagtttcagacgttataaaatttatgctatcaccaagccaatttggttttaactttgcctttacactattagagggcttgttaggatggttcccaggctttatggtttggaaattaactaatggcgaaggtttctcagcattattggagaacagaaagaaacaaaacatagcaatcatatcaacaagtttatttagagctatatttataaatattatatgtaattcagcacttttacacatatatatgggtaaagcactaatagcactaatgacagcaagaatacttaagaacactatagaaatattcttagtatacttcatccttacagctatagttgaagctttaagagcaagaaaagttaaatttgagttttagcttatatataataaatagtaaatgcctcatgacattccggtgaggcatttatttttggcataagataaggcaggatttttggtcctgccttttaatttatttactagatttatcttttagaacttttttcactgcttcatttaatactttttcattattctttctaaagttaccatctacaatgtatatttcgtttttaaacttgaatactaaagtagatgttgagaacttgctagcgatatatgcttcttcaaaatcatcagagaaacaatcgtacttaatatactctatgttaccttgattattgctaatatttctatctttaataacgctgtatatatagtttaatatgtttttgtttttgcagtagtaatactcactcttcataattaaagattcatatttagagtctgagtatcttgtgaagctataattttttgtgtacttattgacaaagaagtttttattctcaaactttgtattcatataatacctattgtcctttatattctcatccacttggaagatatcttcattgattgcattattaacaggcatttccaacagtcttgtttgtagatttgttatcataaataaagaaacaactataaacaaaaatcttggaaagaacttatcgaagaccttttctatgaatagtttatacacaccgtaagcaagagctgctcctatcaagaatgaatagcttgagaacagtttcaagagtgttatattgccaacagtaaaattatatatgtctatcgatacataaagaacaatcattagtgcaagcagggtaaataatgctagcattaaaattctaccaaacttaaaagctgaaggctgctcaaattttttacgcaagcctttgaagtagaagtaaataattcttcttaagtacataatggatagatctaaaaatattagtggcactaagaccataaacataaactgttttatgtagacaaacttatctatgtttggccagaataaaaagactgtgtttgctaaaaatatcataaagaatgataagaaaactgatattgagaagaatcttatgttagagatgttcttccaacttttttcatccgcatcagctgtagcttttttgctcgcattatgattttcatatatgttaatatctttgaagccacaaacaaatttaaagccagcactctccatatcatataggtgagttgtgaaggctccaaatttattctttctcgatgtagtgaatggataactctcgcaaaaatatacaaaattattagcatcgactgctttttctaagctaatcgatgctttttttacatcttttatcttgtatccatcttttcttaactggtttagatgctcttcaagacctttgtagtcaatgttttgaaagagcattaattcatttattcttgtgttttcttgcataagctttcaccctttttatatagtattacgcctaatggtacgagcagtatcgatatccattgtgatgttgagaagtataagaagtgtcctcttacgtcatcatatcttaaaaattcaactaaaaatcttcctatgccatatagtatgatatataggcccgaaacttttcctctggatctatctttctttgagtagatgaacagaattataaatataataatgttgcctaatgagctcaatagctgaacagggaagagctttactccgcttaaaccaacgctttcttttggaaagattactgcaaatttactattgcatggcaaaccatagcagcagccagccataaagcagccgattctaccaaaggcgtgtgcaagtggtacttcaggggccatagagtctatcatatctaagaaattaattttgtattttttagagtaaatatacaaagcgactagcccgcctatgatgcctccgtagaatacatagccacctgctaagatatctcttagtgttgagactaagtctttagtattctttaaactatctacaacaaagttaaagtctgttataagatagagaagctttgctcctaagaagccaccaatcataccatatactatggagtagtagatggtttctttatctgcgggatactctttttttctataccaataaacaaggcttgctacaactatgccaagggctataagtgagccatagctagcaagtcttattccaaatattgtgtaaaatggtttcatattctaccacatagaactcattaaagagcagccaatgcatgataagcaagctatgcaagcaacagttacaagtagtgtagagcataaacttatagtgttaagtattatacctgtctttgcataagctgtgtctcctttgtttttagcgtcaacacccatgatcaaaccaactatagctatgatacttcctatgaatgatagttgtcctaaaaatatgcatagtagtgatacagcacctaagattaaagatgttaagcctttgttgctgcgtccatagttatcgtcattaaagccggtcctatagttgtaatcgtttttattgtagtcatagtagtgacccttagctctctttctgtcttgtctttcttttatttcatcctcacttaaaacttcttgatcgttgaagtccttatcgtcataaatattgttcataatatccctccttgtatagtattatacccctttaagcattattatacataaaagaaatgaaaattacaagaaaaataaaaattttaaaattatctcttatatggtataataattaatagaggtgattttatgagttttacgcatttgcacttgcatactgagtattctttacttgatggttcaaacaaaataacagagcttatagatagagttaaagagcttggcatggatgcatgtgctataactgaccatggcaatatgtatggtgtaatcaaattttataaggaagcgaaggctaagggtatcaaacctatcataggctgcgaggtttatgcatgcgaagataagcttgtaaaggacaaagaaacaccttactaccacttgatacttttatgcgaaaacgaaaagggatacaaaaatcttataaagatagtctcagacgcctctattaatggctactactataagccaagaactgattttaactatttacgtgagcatagcgaaggcatcattgcactatctgcctgcttaggtggagaggtgcaaaggatgatactcgatcaaaatatggatggagcaaaaaaagctgcgcttagatataaagaaatatttggagaaaacaatttcttcctagagcttcaagatcacggtatgaaggagcaagcatatgttaataattatcttatcgatctttctaaggagctaggtcttggactagttgcgacaaacgattgtcactacctacgcaaagaggacgctaaggttcacgacgtgcttttatgtatacaaactctttcaaagattgatgatgaaaacagaatgcgctttcctagtgaagagttttatgtaaagagtcctgaggagatggagaaactcttctcatatgtacctgaggctataaaaaatactgagattattaaagacagatgtaatgtagagattgagtttcatcaaaaacatttgcctaactttgagatagatgaagacatgacgcactctgaataccttcataagctttgcgaagaaggtttaaagaagagatatggacatgtcagtgaagacataaagaataggatggaaactgagtttaagattatcgactccatgggctatgttgactacttcctagtagttagggactttataatgtacgctaaaaacaatggcatacctgttggaccaggaagaggttctgcggcaggcagcattgtttcttatgctttaggcatagttgatgttgaccctctaaagtatgatttgctatttgaaagatttctaaatcctgagagagtttccatgcccgatatagatgttgactttggatatgagagaagatctgaagttattgactatgtaataaggaagtatcacgaggacaaggttagtcagattattacctttggtacacttgccgcaagagccgttattcgtgatgttgcaagggctttagatgtgcctttaaacaaggcagatacacttgcaaagatggtgccaagagatctagacataaccatagacttagctttagagagaaatcctgagtttaagaaagcctacgatgaagacgaagaggcaaagaaaataattgatatatcaagacagcttgagggtttgccaaggaatattggtactcacgctgctggtatattaatcactgaagagactataacaaaccacctacctcttgttaagaacaaagagtctatatccactcagtacactatgacagagcttgaagagcttggatttttgaagatggacttcttaggcttaagaaatttaacggttattcaagatgcacttgatatgatagagaaaaactataatcttaaagttgactttgataatatggaatgcgacgacaaaaatgttataaatttatttacaaacgctgaaacaataggtgtatttcaattcgagtcggttggtatgagaaggttcttaaaggaattaaaggcccaaaagtttgaagatctaattgctgcaaactcattgtttagaccgggacctatgcaatcgataccaaagtttgtcgaggcaaggcatgatccatctaagataagctacttagatccgcatcttgaaccaatactaaaggaaacatatggttgcattgtatatcaagagcaggttatgagaatatttagaaaccttgctggctactcacttggcggtgctgacatagttagaagagccatgagtaagaagaagatgaaggtcttggagcaagagagaaagaactttatctatggtaaggacgacggggatgaagtgattatcaagggtgctgtgagaaacggcattaaagaagaggtagcaaatcaaatttttgattacatgcttgactttgcaaactacgccttcaacaagtcacactctgctgcttactcggtcgttgcatatagaacagcctaccttaagtactactatccaaaagagtatatggcaagtctacttagctctgtaatgggcaacactccagatgtaataaagtatctagaagaggcaaaaagacttggcatagaagtcttaagacctgatataaacaagtcatttagaaagtttgcaacagaagacgattgtataagattcggactttcagcgattaaaaacgtaggaagtaatgttattgattcaatactaaaagccagaggaaagatagatggctttacttcatttgaagacttcttaacaaagacttacaaagttgattcggctgctatgaacaaaaagtctatagagtctctaataaaagcaggggcgcttgactcacttggattgaatagaagccaaatgcttggttcatatgactttattcttaagagtatacaaaaggatgcaaagagcaatgccgagggacagcttggtctattcggacttagtgatgataattcatcccatgcacaatacaaggtgccggaagctacagaactttcaaagtttatgcttcttgagggcgaaaaagagatgactggcatatatttttcaggtcatccacttgaagaatttacacaagaactaagagataacagcgactttacgtccattgagatgaaagaaaagcttgctgatgaaaccgatacagacattaaagataatatgtttatttcttatgcaggtatgatatctgatgtcactaagaaggtaacaaagaataatcaaatgatggccttcatcgatttagaagatatttatgacaatattagagtggtaatcttcccaagagtttacgaaacttacagaagtttgataaaagaaggagagagaatagtagttaaaggaagattgcaaataagcgctaatgatgagataaacatcatagcagatagagttaaaaggcttgaaaagcgtaaagagactttatacttaagaataaaaaaagataaagatgataatgataaaatggatatcttggatattctaaagaaatataagggagataaccctgttgtagtgtactttgaagagacaaagtctactattgaatccaacgatagcacagctattgacatagacaatgagaagctatatgaggatttaaaaatgcatttaaacgaagatgatatagttatcaaataggaggaagaatgaagactattgctatattaacaagtggcggtgacgcacctggaatgaatgctgttattagatcggttgtaagaacagcgatatataacgatgtaaaagttttagctgtaaaggaaggttacaacggtctaataaagggtgacattgaaacgatgacactatcgagcgttgcagatataattcataggggtggaactatacttagaactgcaagaagcgaagagtttatgactgaagaaggtattaatcaagctcttaaagtaattaagaaattcaagatagatgctatagtcgctcttggtggagatggtacatttagaggagcaagagagctagtaaagcgtggcataaaagtatcatgcgttccatgcacaatagacaacgaccttgcttatactgactacactataggatttttaactgcagttgagacagcagtatccgctataagtaagctaagagacacatcagagtctcacggcagagctatagtactacaagttatgggtagaaactgtggagacattgctctatactcaggcatagctggtggtgcagaagccatagttgtgccagagcttgaaatagatactgatgccataattcaaaaaataaaaaatggtagaaaaagaggtaagaagcaccacatcatagtcactgctgaaggcgcgcttgatgcatacgacttagcaaagattatagaagaaaagagcgatattgaaactcgtgttacggtcttaggttatgttcaaagaggcggtgtgcctacagtacaagacagaattcttgcaagtgaatttggttacagagcggtaaacttactaatagaaggtaagactggccttgtcttaggatataaggacggcaagtttattgaagtagatataaacgaagcacttaatgctaagaaagagctaaataaagaattgcttaagatggtagacatactatcgatttagaggcagacttatgaagaagactatgaaaaagaccaagatagtttgcactattggtccaagctcagactcatatgatgtcttgaaggatttagtaagtgaaggaatgaatgttgcaagactaaacttctcacacggcactcatacggaacataagacaaggatagatactataaagaagcttagagaggatattgatgagcctatagcgataatgcttgatacaaagggtcctgagattaggataaaaacatttaaagatggcatgattaggatagagcaaggacaagattttattttaacgagcgaggacattgaaggagacgagacaaaggtttctgtcacatacaaagacattgccaaggatttaaaggtaaatgacagagtacttattgacgacggtcttgttgagttcactgtaaaatcagtcgatgagaacaatgtttatatgagggctgttaactcgggcgagctaagcgatagaaaaggagttaatcttccttcagttaaagtaaatttaccaacgcttacagaaaaagatgttgaagaccttatctttggcatagaaaatgatgtagattttattgcagcttcatttattagaagcgcaaaagatgtattagagataagaaaaattcttgagagcaatggcggagaagacattaaaataatttctaagatagaaaatctagaaggcgttcaaaatattgacgaaataatcgaagtatctgatggcatcatggttgctagaggcgatatgggcgttgagcttgatgaggaggacataccactagttcaaaaagaaataataagaaaatgcaatctaaagggaaagtttgtaataacagccactcaaatgctagattctatgataagaaacccaagaccaacaagagcagaggtaactgatgttgctaacgcaatactagatggatcaagcgcgataatgttatctggagaaaccgctgcaggagcatatcctgttaaggctactgagatgatgagaaagattgcgcttaaaattgaggacagcttggattataaaatcttaattaatagcactaatgatgagcatgagataaatataactaattcaatcgcgaaagcgactagagaagcagcacttgatttaaatgcaaaactaattattgcagctacatcatcagggcttactgcaagaaatatatcaaagttcaaaccaaaatcgccaatcatcgcagctactacaaatgaaaaagttagaaggcaattatcaattgagtggggagtttatcctataagagcaaagttagctacaaatattgatgaactctttcatgattcagtaaatattttaaagaatgtaaaatttgtaaaggagggagatctagtcatcctaactgcaggtatgccactaggaaaaactggatcgacaaacattatgatggtaaagacagttggtaaactactatgcaaaggtatgggcataggcaagcataaaattagtgcaagagcatgtgttgcaaagaacgcacaagagcttgaagaaaaatttaaagatggcgatatagttgtaactataggcgtatataaggagatgctaccattcattcaaaggtccaaaggcataataacagttgaaggaggacttactagtcaaggtgctatagtcggaataaactaccatctagcgactgttgttggagcaaaagaagctatggaaaacattgagagtggcgagatgataagtgttgacgcatcaactggagagatatatgaaggtaaaatatttaatgaaggggaagtgatttaatggcagacacaagatcttcgtggcaagagtatttcatgtctatcgctcatatgatagcaaagagatcgacatgtgatagagcatatgttggttgcttattagtaaataaggacaacagaattgtctccagcggttataacggaagtataaagggtaatccacattgctctgagataggccacacaatgagagatggtcactgtatagcgactatacatgcagagatgaatgcacttttatattgcgcaaaagaaggcatcaaagttgatggctgcgtgtgctatgtaacacattttccatgccttaactgcacaaaagcgttgattcaagctggaataagcaaaatttattacacaaatgactacagagtagacgattatgctttagaattgcttgacaaaaatcatatagagcacattaaattagatgtagatataaagtagaaaattttgattaggaggagaagaaaatgttaaaagaattcaaagaatttatttcaaagggtaatgttatggacctagcagtaggtgttatcattggtggagctttcggaaagattgttagctcacttgttaatgacatcatcatgccacttatcggacttatacttggtggcacagacatgagcaactatttcattacactagatggtggtcaatacgctacacttgctgaggcgcaagaagctggagcagctactctaaattacggtttatttattacacaagtaataaacttcttaattatagcctttgttatatttatgatggttaaggctgtgaacaaagctagagcacttactaagaagcctgagccagaagcagcaccaacaactaaggaatgtccatattgcaaatcaacaattgatattaatgcaacaagatgccctaactgtacatcagaattaaaataatagaggtgacttatgacaatacttaatagaagtgaagtagataaaaatcttacttgggatacgtcagctatcttcaaatctaaagaagaagcaagaaaagaagctaatgatatactaaatgcttcattaaaattaaaagaagagtacgaaggaaagcttactgactttgatactatcgttaaagcattcaaagagtacgaaaaaatcgttgaaagattttcgctagtagttgattatgcatatctaaacaaggacgttgacctaactaactctgttgaactagctttctttaacgagctattaaatatgtacaataagcttgatgagaacacattatttgttgagcttgagatagctaagcttgatattccgatgcttgaaaagctagagaaggtagatggcttaaaggtatatttccacagtgttatcttaaagaagaaaacatacttaagcgatgcagaagaaaaagttatacaagcttttacaccattaacaatggcaccagagcaattatacaatacaattaaattgcaagatttaacatttgaacccttcgaggtaaacggcaagaagtatagcaactcatatgctttatttgaagaaaagtatgagtatgatgaagataaggacttaagaagagaatcatttaagcatttttacaatgacttatcaaagactatcaacagcacagctatggcatttaacttaaatatgcaaactgataagattatctctaagctaagaggctatgaaagtgtaactgattatctacttgctaagcaagaagtccctagagacatctacgaaaaccatcttgatacaattatgaaagaactttcaccagttatgagaaaatttgctagagtattaaaagatggccttggcttagaaaaaattaattattatgacttaaaggctaatatagacccagaatttgatccagagataacacttgatggagcaaaagaatatatctataatgctttaaatgtattaggtgatgaatatctagaacaaattaaaaaagttttagaaggtaagaacatcgactatgttgagaacaaaggtaagtacacaggagcatattgctctacgccagcaggcttcccttcatatatacttatgatatggacaggcaagatggacagtgtgtttactatgatacatgagctaggtcacgcaggtaactttatgctatctcaaaagtatcaatcatactttgactcagacccatctatgttctactgcgagtcaccttcgacaatgaatgagatgatgcttgccaactacctaatgaagaagacagaagatcctaggatgcttagatggatttacttctcaatcattgctaagacatactatcacaactttgttacacacttcttggaagcatatttccaaagaaaagcatataacttagtagacgagggacaaaacttagatgcagatacacttaatagattgtacaaggaaacacttgaagagttctggcaaggtgaagttgaattaacagatggctgtgagatgacttggatgagacagccacactactactcaggactatactcatacacatactcagcaggcttatcaattgcaactaatgtatcaaaaaagatattagaaggagataaggaagctgttaaagactggttagtggcattgagacaaggcggactatataacccaatcgattgggcaaaattatcaggtgtagacatcactacaacagcttcattaaagaatactattgcatatatatcatcaatagtagataaaattgaagaattaagcaagaatttataaaaaaatcaatgaaaatgcttgacaagcaaagtattttgtattaaaatattggttagtgttttagaaaagacccggaaacttttttaaaaacaatgttttttaaaggaggaaaaaaatgagttcatttatggccaatgctcaaaatattgagagaaaatggttacttatagacgctgaaggcaaagtcctaggtagactagcaagcgaagttgctaagatcttaagaggaaaacacaaagcaactttcacaccacatgttgatacaggtgatttcgttatcatcatcaacgctgataaggtaaaattaacaggaaagaaattattacaaaagaaacactactatcacacaggttatcctggaggacttagagaaatcagttaccaagatatgatgcaaaacaaccctgaaatggctattagattagctgttagaggtatgcttccaaagaacagattaggaagacaaatgtttagaaagttaaaagtatatgctggcgcagaacacaaccacgaagctcaaaagccagaagtatatgaattttaggaaggaggacgaatagatggaaaaacttattcaaggaacaggcagaagaaaatcttcagtagctagagtaagattagtgcctggcgatggtaaatttactatcaaccacagagatattgatcaatatttaaaagaagagttattaaaaaacattgttcgtgaacctcttaatttaactgacacacttggtaaattcgatgtttacgttttagttaacggtggcggatttacaggccaagcaggagctataagacatggcttatcaagagctttacttgaagttgatcctgaatacagatcaatattaaagaaagcaggattcttaactagagatccacgtatgaaagaaagaaagaaatacggattcaagaaagctagaaagagttcacaattctcaaagagatagttttattactatatacacgaaagaccttgcatttgcaaggtctttttttgtgagtattaaattttagatcttttaattaagccgctttcatcaagctcatatatttcatctgcaacatgatttataaagtatctatcatgcgaaacaaagaagatggctccgccaaaggttttcatctcattacttatactaggtaaggagagaggcgatatgtttcttgttggctcatcaagaactaaaatatcaggctccataagctgcatcctagcaaaaaatagctttgctttctgtccgccactaagttcagaaatgtttttagtcacctcatctttagtaaactttagagaagcaagataagttctaatcttagtttcttcatctttagtaaagtcatttcttaaatattcaatagcgtttttatgaacatttagttcttcctcatagttttgtggcatatacgagactcttaagtctttacttatattatctttaataatgtttaatagagttgttttgccagcaccattctttccaacgatagcaattttattattgccatatgattcaagatttatatctttggcaagtattttatcactagctcttaaaactttaagatgcaagtttaaaacacatttgccgttttcaataagtttttctttattataattaacaaagatttgttcttcgtattctggttttttagtcatttttcctttttcccactcgataagcttttcgtgagccttcacttcgtgcatagtctttttaagatacctacctagtctgtcgttcttttctcttctaagatcatgctctacgctatcatgaacatgcctccaccttgcttccttttcatccatgcgcgccttgtcgtttttagctctttgcatttgagtagaaatttgttcttctctaagtttaatataagtatcgtagtcattaccactaatatttatacgtgattttgttttattttgaagcagttcaaaatgtattattttatttgctagttttttgatgaagtatgtatcgtggcttgcaaagatgattttcccgttaaattctttaagcactctctcaagaacttccatagactcaaaatctatatcattagtcggctcatcaagtattagtagagaaggaccctttgctatagcgagtgaaattaaaattttcattctctctccgcctgaatatgtttcaagcttcctttccaagtcgttcacatcgacgttaaaagcgttgattaatttataaaattcgcctatgtcaacagtaagttcatcattagcataaataagatcactcaaacttttacaaagcacatcagctgtagctatttgaggcacaattgctatagattcatcacggctaatctcaccacttatatccgcataagtaagaacatcgtttatatttgtaagcgccttaattagagtagatttaccattgccttcttcgcctataagtgcaagcctgtcgccattgtttatagaaaacgttaaattgtcaattatgcttctaccatctttcttaagtctaatagttaaattttttatctgcatagacgcctcctatatgattatttatttaaattatatattaattgctaaattatttcaaataaatataaattttataaaaattaaagttaaaatattagcaaaaatgtattttatatgttataatgaaatcgaagatttctgttgtgaacatagtaaagtgttcctaaagaaattttcacgacgctataatagttaacaatattaagaagacaaggaggcctaatattttgatgcttagtttagcttaggtgttgaaatatttcttgtaaaaaatattgtatattataaatgtagattaaggaggatgaaaaatggaaggcaaaaaaactgctttatacgatgaacatgtaaaactaggtggcaaaattgtaaattatgctggctggttactaccagttcaatacgcaggcttaatcgaggaacataatgcagtaagacaaaaactaggggtatttgacgtatctcacatgggtgaagtttgggttactggtaaagatgcatttgattttgtaaatcatctaattactaatgacttacacgctatcgaagacggacaagtacaatacaatgttatgtgttacgaaaatggtggcgctgtagacgacttactagtatacagattcaaccaagaaaagttctttttagtaatcaatgcagcaaatgttgaaaaagactttgaatggattactaaacaagctaaaaactttgatgttaaggttgaaaatgtttcagatcaaacatcacaaatagctgttcaaggaccacttgcacaaaaagctgtacaaaaattaacagatgtagatctagatactatcaaattcttccacttcattgatggctttgtacttgctggtaaaaaagttttaatctctagaacaggatacactggagaagacggatttgaaatttacacagataatgattcaatagttcacatctacaaagaagtgttaaaggctggagaagagtttggaattgaaccatgcggactaggatgtagagatacacttagatttgaagctatgcttccactatatggccatgaaatatcacaagatatttctccagtagaaggcggactaaacttctttgttaagctagatcaagaagctgacttcattggtaaagaggctcttaagaagattaaagctgaaaacaagagaatacttgttggctttgaaatgattgataaggctataccaagagaaggatatgaaattgaaaaagacggcaagaagattggctacgttacaacaggatatctatcaccaacacttggcaagaagataggtaacgctctaatcgatgcatcttacaaggaaatgggagctgaatttgatgtaattatcagaggaaaagctcaaaaagctaaacaaattagcagaaaattcttaaaagacattaaaaaataaattatacaattaggaggaatttacaatggaaattaaaaaaggtttactttacacagaagatcatgaatgggttaaggttgatggaaacatcgctacagttggtttagctgactacgctcaacacaacttaggagacatagtatatgttgaattacctgaaattgatgatgaattctcaaaaggcgatgcagtagcatcagttgaatcagtaaaggcagcttcagaagttttcacagcagctagcggaaagatagttgaagttaacgaagcgcttgacgatgaaccagctctaatcaacgaaggaccatatgacgcttggatattcaagattgaaatgagtgatccatctgaattagacgatttaatggacgacgaaaaatacgctgaatttgctaaggaggactagtatgtatccatatcttagtcaaacacctgaaaacataaaagagatgcttgacaagataggtgtaaaatctgaagaagaattatttgattgtattcctgaaagtgttagattcaaaggcgagttaaacttacctaaacataaatcagaattagaagttagaaagatcatgagtgatcttgcaaatatgaactgctctacaaataagaaaatttgcttcataggagcaggagcatatgatcactacatcccttcagtaattggtgctatagcatcaagaagcgagttttacacttcttatacaccttatcaaccagaagtatctcaaggaactctacaaatgatatttgagttccaaacaatgatgagcaatctagtaggactacctattacaaatgcttcactatatgacaactctaacggtgttgtagagtcagctctaatgtgctgcaacacaactcgtaagaaacaagttatagtatcaaaagcacttagcccatcagctagaatggttctagacacatatacacacagccataacatagaagttgttgaagttgacatcaaagatggagcaactgacttagatgacttaaagaagaaactaagcgatgacgcagcatgcgtaattatgcaaaatccaaacttctttggagttatcgaagatatgaaggctgcttgtgacttaactcatgagttcaagaaaacatacttcattgctgacgttgacactaactcactaggtatactacaaagacctggcgactacggtgctgacatagtagttggtgaagcgcaggccttcggtataccactatcttatggtggaccataccttggattcatctcatcaactgataagttcatgagaaaattaccaggaagaatcgctggtcaaacagttgatagaaacggtaagagatcttgggtattaacattaacagctagagagcaacatatcagaagagataaggctacttcaaacatatgctcaaatcaaggcttaaatgtactttgcgcaacaatttacatgtcacttatgggcaagaagggcttaagagaagtttctgagcaatgcgctaagaaagctcattatctacaaaaagaactttgcaaatctggtaaatttaaattaatgtataataaaccattctacaaagaattcgttatcactagcgatatctgcgtagataagatcaacgcagctcttacagctaatggtttcatggatgcatttaaactttcttggttctacggtgatgaatacaagaacgcattcatgcttgctgttactgaaaagagaacaaaagaagaaatggataaattagtagaagtattggagggtgttgaatgttagatagatatgacaaagtaatatttgaaatttcaagacccggtagaactggatacaatttaccagatcttgatgttgaagatttaaaattagatagcgtaattccaagtgaatatttaaataaagaagaactagacctacctgaattatctgaggtagacgtagtaagacactttacaaatctttcaataaagaattacggacttgacaacggcatgtatcctctaggatcatgtacaatgaaatataatcctaagattaatgaagatatggctgctcttgaaggctttagagacttacacccataccaaggcgatggttgcacacaaggcgctttaaaattaatgtatgaccttgctgaatcactagctgaaatttctggtatggacggagcaacattgcaaccagctgcaggtgcacatggtgagttaacaggtgttctattaattagagcatatcatgaagcaagaggagatatgaatagaaacaagatgattatccctgactctgctcacggtacaaaccctgcaacttgctctatgggcggatttactcctgtagaaattaagtcagatgaaaatggtttagttgatcttgaagcactagaagcagctatgactgaagaagttgctggtctaatgcttacaaatccaaacactttaggtttatttgacaaaaatattgaaaagatagctgaaatcgttcatagaaaaggcggtctattgtactacgatggcgctaatatgaacgcagttatgggacactcaagacctggagacatgggattcgacgttgttcactacaacgttcacaagacattctcaacaccacacggcggtggaggaccaggcggtggaccagttggttgcaagaaagaattacttccattcttaccagtaccagttatctctaaaaatgatgacaaatacttccttgactacaatagaccacaaagtataggaaaggttaaagacttctacggacacttcagtatcctagtaagagcttacacttatatcctaacaatgggttcagatggtttaagaaaagcatcaacaaatgctgttttaaatgcaaactatctattaagtcaattgaaagaaaattacaatgttccatacgatacaatttgtatgcatgaatttgtattaggcggactaaagaactgtgatactggagtaacaacattagatgttgctaagggattaatcgatagaggattccatccaccaacagtatacttcccactaatagttcatgaagcattgatgatcgaacctactgaaacagaaagtaaggaaacattggatgcttatgcagctgcacttaacgatatcgctagagtagctaaagaaaatccacaagacttactagacgctccaaagacaactatggtatctagaccagatgaaacattggcagctagaactccagtattaacatatactaaagaagaaaaatagtaagtaatataatggggcacatcaaagtgcccctaatacataaattttataggaaggtataaaatgaacgcaaaattaaagtctaatttattaatagttttaggcgcctttatggttgccatcgctgtttatttctttttaactccaactaagatgactataggtggagctacaggtatagcaattgttttatcgtatttattacatttaccaatgagttatgttttatttgcaacaaacatagttttattcgctctaggatttttattcataggtaataagtttggtgtaaagacagtacttacatcacttggtatatctttaattatattcatactagaaaaaattattccacttgacggacctataattgatgacttgctattacaaatgataatagctgttatagtatctgctgtaggtatggctataatacttaatcaatatgcatcaattggtggtacagatatactatctaaaatcataaataaattcactggacttgatcttggcaagggcgtactactttgcgacttagtcatcactttatttgtaggcattgtatttggtcttgaaatcggtttatattcactactaggtattataatgaacgggttaatcatagattttactatagacggtttaaatacatctaagaatattattataaatacagaaaaaccagagcttgttaaagactacattgttaaagaacttaatcactcagcaaacctttataaggctgttggtgcatatactggtaatgaacatacggtaatcatgactgtttgttcaagaagggactatttacttttaaaaagatttatagaaaggaatgctccagactctttcttggttgtaatgaatgcaagtgaagtctatggctttagatggaggaatatttctgaataaaatataaaattactggaggtactatgtttgattttgacaaaataattgacagaagcgctttatcatctgctaagtatgaaacttcacgtttagcaggtaatgatgagtcagttataccattcacaattgctgatatgaattttgcaacagctcctgaggttaaagctgcatgtttaaagagagcagacagggacttttatagctacactttaccagacgatgatgtatataaggctattattaactggcaaaaggatatgcatgagcttgatataaaaaaggagtggatagtatttactccaggaactgttccaggacttgatcttgttattagatcaatagtcgaggatggagagaaaataataattcaaacaccagtttatcctccattttttaatttctcaaatctaaaaaacatggagatactacaaaacaaacttatatttgacggtaatcattatacaatagattttaatgacttggaagagaaagcaaagctagcgaaagcaatagttctatgtaatccgcacaacccagtaggaagagtttggactaagagtgaacttgaaagattatctgaaattgcatataagcacaacttatttatcgtaagcgatgagatgcatcaagattttacttatggcaataatttttatactccaataatgagagtgtttaaaaattatgaaaaagttgtttcctttatggcaccttctaagacatttaatattgcaggtttaaatactgcttatgctgttatacctgatgaaaaactaagagagaagataatcagtgttgaagctaaatctttgatgggctcggtcaatccatttgggcttgaggcgttaaaggcagcctacaatgaaggtagatcttggtatagagagatgcttaagtacttagaggggaacattaattatgtatgcgagaaattttccaagatagatggaataaaatttcaaaagcctgaaggaacatatttaatctgggtagacttatcagaattaaaatatagtccaaaggctatgcatgaagttttcattaagaacaagatatttttatccgatggagcgatgtttggagatgagatgtcggtaaggattaatcttgcttatccaagagagattatttatttcttagtggatagttttaagaagtcaattgaagagataaaaactttaaataaataaatatactataaacaaaaatatagagagcctaagccctctatatttttttatattctttagctaagtcgtctatatactttgtgattatatccttgatattttcttctttgaaaggattttttaatctactaagctcaatgcttgtaaggaagtcttctttgcttgcgttatccataagtagtgtcatctttttgaaggcttcttccttatcttccaaaagattgttgtagaagtcaattccacttaagtcaccgattgcataattaattgagagcataggtgtattaaatagggtgtggtagttaagccaccacatgccaacatcaaatactttctcatcaacacttatgaaagggaagtactctttgtgaagctttctaaatatttcatatctttcctcaagatctgtgtttatatttagatacataagctcttcaaactcattaattaagcagtagaagagtatatcgaataaaagatttattttatatgaaatcatataattttttgcgccattttcaaacagttcatcagcaaagctcaatataataaatgagaatgcagtagagtaggcgttaactatatcatcttgcggttcaatatactcaataagctcgttgtatgagcctatatatagaattagagcatagcttaggcaggttatgaagtttgaaaagcttaataggtctgcttcataattagcgaacataaatgttatatcgtggttatatatgtttgttgcatagttatagctagctttattttttcttggcaataggtcaagagatttatcgtttataatctttcttattattttacttaaaaatggattatattcttcaagcttattcgctatcttctctaataataggtaaggatcctttatgggcatagcattgtagtctttaaagtatactttaaggtcataagtataaatttgatcaacaccaagcttttctttttttatatcagcaatgacattagcattagtagcaagatgtttttttattgcctctctaaacttaactatatcgttatgattataattaattctgcatctttccttatcggagtagtcaaggtagttattataaccaagtcttttggctatcttatatctcataataacaagatctttatacttctgtgcatagtaggtattgcgctctaagttgcttttattcatttcttcgaacaaacgctttctttgatttctatcattagatagtaggaattttgctaaagttttgttagtaattatttctccatcaaaagagatggactttgtatttctatactcattaatctcttgcaagattttgttttcattcatattaagaccaacaacatctttcttgtagagatcttgcattatacttagcttgtcaaaatagtacttgccccacctctttttaagtctttcaatatcgtcatcttcaagtagtgttagcgcaaatttaatcgtagccttcttaaactcatcttcattacttaaaatatatgaaaattcatttttaaagaattcatcactagtatcttgcgaaaattttacaaatacatactctttaaagctatggtagcgccttttaattatgtcgacctctctaattaaagtgtttttctcatcaaagtcactagagcgtgctagacggctcgcatagtaattaacaaggtttgcttcactaagtatatctattcttttataatctttttcaattttatcaaacaacatagccttcatcctttaaatgtattatcatatttaattatatatcattaaggagcctttttcaattaaataagaatatttatataaaattttaaaaagtagttgacaagccagtatatatgtgataaactatgaatgttaaaaatataccgcggcaaatatatttttagaggtgttttaatgtcaagtttaaacggaccaagagtaagaacggtcagaagattaggcttaaatgtctatggattagcgaaagctacaaaaggtatgaaaaaaggagctgcacgttcagataagaaattatctaactacggtcttcaattactagaaaaacaaagattaagagcttactatggagtgccagaagttcaattaaagaaggcattcttaaaagctaaaaagtctaaagatcaaacaggtcacgctcttatcaaattactagaaacaagattagatgcatttgttcttagagcaggttttgctcaatcaatcagacaagcaagacaaatggttgttcacggacacatccttgttgacggtaagagagtagacaagccagcttatcaattatcagttggacaaaagatcagcttaaaagaaaaatcaagatcaaatgaaatgtttaaggaaaacttccaaacagtagttggaaattcttatccatacattgaaaaagatattgataaattcgaagcagttttatctagattaccagaaagagaagaaattccaatagaaatcgaagacgtttacgtagtagaatattattctcattaataaattagctctcagagtactgagagctttttcattggaaaaacttttattaagattaaaggcagagcataagctctgcctttttaatacaagaagattttattattttcagtaattatagcttcatgcgaattttcatcaagcttttgattgtacttcttcatcaaataatcatatatttctttcttattattaaacttaagcaattgatatggctcttggaagcttagcttttctaaaaagtaatatttcttgccactttcatacataagtcctgtgtgaccaataaagagaatattcccatcaatttcatcattagagtttatatatactgagacaacttttacatcttcattcttaaatttaatgcctcttgcatcaaattctttcataattatatctttataatcttctttagcatctttaacgttgattggtgcataatatgtaatgaactttttaagctcatcatcatttagtagcgacttatcacttatagcttttttgtcaaagtctaatacagaagatttatcattcagctctttctcaatgtctaaactgttcttaattagagagaatgttgttatcctgcagttaataccaagaaagtctggattcttttgtgtaaacttatcaatgctattgttataagaaatattgtcattatacgctgtgaacttagatgctaattcatttgcatcagcactgtcgttatattcatcaacgttattcataaagaagtttacatcgttctcatcaaggcatttatcaataagcgctttctttaaatcgttctttgtttcatcacttgtaatgttagtatacattatagtctcatcatcttcattatctttatcatcaggagcgcttgaaggagcatttacttcactgtctgtaccatttaccttaggagtacatgatactaaaattaaagccatagataaagatagtagtaagaataatacttttttcatataaccacctcaaaacaaattatagtttacaaatgagcacttgtcaattagctaagctttacaaaaaggtaacagtttatattaacaagcttcacatatctttggataggtggcaattcttctttttcttgacataaaatattgcttagtttataattaacttaagtaaaagggggaatcaatatgaattcaaaagatttggcaaaggatttaatcggttttattgataatagtccatgtgccttttttgctgttaaagagattgaaaacgaactaaagaaatcagactataaagaacttaaggaagaagataagtggaacttaagcttgggatctaagtactatgtaaagaagaatgactcggctatattggcttttgatattccaaagaaaaaagacgacttagcttttaagatcatagcttcgcactcagatagtccatgttttagagttaagcctcagccagacatatatcaaaacggctaccacaagttaaatacagaagtttatggaggagcgatactccacacatggtttgacagagctctttcattagcaggtagagtatatactagaaacgaaaaggatgcattgcacccacacatgcacctgcttaatatagataaagatcttatgagcatagtaagtctttgcatacatcaaaacagagaagtaaacaaaggttttgatataaacgcacaaaaagatacacttccaatacttgagcttattaacgatactgtcgaaaagcttaaattagaagatgtaattgctaaagaattaaaagttaagagagaagacatacttgactttgatttatttgcttacgatagagaaggtggcaagattcttggtttaaacaatgaatttatgcaagttggcagactagataacttagctatggcgcatctatcatacaaggctttattagccaaaaaagcatcgaaatttattaacttaatatatgtatcagataacgaagaagtcggatctatgactaagcaaggtgcaaacagtccattcttaaagaatgtaatgagaaggataatattagcgcttggtttagatgacgaagagttctacagagtaaaagcaaaatcatttatgatttcatcagaccttgcacacgcataccatccaaattatcctgaaaagtgcgacattacaaatatgccaaggatgggtgagggcgtttgcataaagtatgctgctaatcaaagctacacatctgatgctgagtctgcagcagtatttaagcaatttgctactaaggcaggagctaaggtacaagctttccttaacagatcagacgttcgtggaggatcaactataggtccaatcagctcaacacaactagacattaaatcggttgatataggcaaccctatacttgctatgcactcaatcagagaatttggaagcgttgaagatcattacaatttgtataagatattcacagaattttttaaataatgaagagtaaaaagactaagctcttttctatacttgtcattgcaatatctattcttgttgttttactaagtgcatattttatagacggaccagagaaaatcattgcaacagtgaggcaagccaatgtttattatttaatattagctgctttcctgatatttttgttttggttctttggctcactttcattaaacgcactactaaaagttttaggagttaagctaaagcaagttgatgcatttaaagttacaatgacgggcgccttttttaacgcaatcacaccatcatcaacaggcggtcaacctatgcaagtattaagaatgagggattttggactagcgccaggactttcatcttcagtggttatattattacttataatcaacaacgtagttacactagttcttggattattctcaatatattactcatatcataatttaggtaaaacctggtttacgggattaatgatgatacttggcgttgcactaagcgttttagtaacgtttttaattgcaacagtaatcatatttccaagaaagagtaaagagtttatagttaaaattgtaaaattatttaacaagaagaatcctgtcgaacagatagaaaagctagatagacagatagactcattttatgactcatttagagtttataaaagagaggggctatataaattacttccttgtgcgatttttgtagcacttcaaaacatatcactatggtcaataccacatgtagttttctcagcttttggaggacaaacgcctgatatagtcctaagtgtgtgcgctgcatgcatggttgcacttatatctggctatgttccacttccaggagcagcattaggagcggagggagcttttcttagtatatttggaccactatataagaacatttcatcagtagccatagtagtaatactgtggagagtatttacattctacgcacctatcatagttggagcgttctttacagttaattttaaaacagataaagaggttgagagatttgaataacgaagaaaaaaagtatataccgagtgtcgatacagtacttagaagacacgtacaaaaggttcctgaagcagtatatagatgctctggcattaacattatgggcagaagaataaagtctttagtcttctcaacagatgttgccatcattagaaacaccaatgcagatggagttatagctgtctatccattcacaccagagttatcaataacgaaggccatactagatgtatcaccaggaccagtttttgttggagtaggcggaggattaactacaggccaaagaagcatacagatagcttttcaagcagaacttaatggagcttttggcgtcgttgtaaatgcacctatgaaaaacgaggttataaaagagatgtctgagtatatagacatacctgttattgcatccatcgcatcttttaatgatgatattgaaggcaagattaatgctggagctagaatacttaacatagcaggaggaaaagagactgcaaatttaataagacacgctaggtctatagtaggagaaaaatttcctataatagcaacaggcggacatactgatgaacatatattagaaacaattagagcaggagcaaactgcctatcatatacaccaagaacatcacctgagatacttgaagacatcatggtggcatatagagacaaataagattagcacctctatgactagaggtgtttttcatgcacggtattatttcttttagattgtttgaataccacacttttattgaaaaaaatgatcttttatgatataatcattgtgaaattttatgaagaggtaagaaatgaacaagttaggaataacaattgaagcaaaagtaattaagcacagtggcagtgattatattcttgaagacctagataaaaacacttatcatgcgaggtctgatgataaaaaatatgacgtaggagacactgttaagatatttaactatccacttgatggcaaagttatatcatcttttaggctgccatacatagaagtaggcgagataaaaaatttaaaagtagtcagcaagacaaggataggttactttttaaacatgggtcttgataaagatgtattactaccgttctctgaagcaataagagatccaaaagttggtgctatggtcttagttaaactttatattgacaagtcgggtagacttgcgacaactatgaagattagaaacacattagaaagaagtactaattttaaaaagggagatatagtagatggtattatctacaacatatccagagaatttggtttatttgtagccattgaagacaaatatgaggccatggttcaaaagaaagatgtatgtgatgactacgaacttggagagagaatgaagtttagagtacaaaccgttcatgaagacggtagacttgtattgagcactaaattagaaaagtcagcatacgatgaacacaagagtgattcattaaaagtgtatgaaatattattaaagaataaaggcaagatgaactacgcagataagagtgatcctgatgatattaggaaaattttcaatatgagtaagtcatcatttaaaagggcaatcgccattttgtatagacaaagaaaaattattatcaatgacgattccatagaaattaaggaggattaatatgtcagtaaaaattaacacagaggtaattgaattaatgcttgtattttggcaaagcattgcagagagagaaaaggtttctgaagattatatcagaagcgtagcagatagagatgaaatgaagtacacttactgcgaaggcttcaatgaggaatctgtaagaaaagttctttcagcaatttctaacaaagaacttttaaataacgctacaaaggaagaaaagaaattctggaataacaatatgtggatgacagaagatttaagcgttgttaacatgatggttgaaccaatcaagaaacttaatcttgatgcagttaacgctgataagaagttaatatttgttcctggacatttagaagaaaagtatatagatggtaatactatagtagtaaacttcttcaagatcaatgttgatatctttggaggaacaggagcagttacagttaacggtaaggattttaaagaatatatattagatctagttcaagataaataataagtagtagacatcaggaggcagtatggaaatattaaaagtagagcacttatcaaatgctttcgatggaaaggaaattttaaaagatgtaaacttttcagtaaattctggagagattattggttacattggacccaatggcgccggtaaatcaacaactatcaagataattatgggtcttaacagagactactttggagatgtttctgtttttggtaagaatattaaagactcacttgattataagaagaagataggttacgttcccgaagctagcgaggtttacgagaacttaacagcaattgaaaatatagaactaaatgcagcactatatgaaattgatgtagaaagtgcagttagaagagctaaaactatgctagaagtgcttgaaatgaaagacgtgatggattcacaaatatcatctttttcaaagggtatgagacaaaagtatctattcgtcttatcactactacatgatcccgacatagtctttctagatgagccacttagcggcattgatgcaaactcggttttagttatcaaagagattcttgcctcacttaaaaataaaggcaagacaatattttattcatcacatatattggaagttgttgaaaaactatctgacaagatcatacttttacaaaatggaaaagttatactaaatgacagcatagataatattaaaaagactcttaataataatgaggatagtgatgagtcacttgaaaatatcttcaatgaagtaactggttttactaatcacaaagagttagcagaagaatttgttaaagccataggtgagagtgatgtttaaattattctcactaaaggtgcttgatttatttaaaccactttttaatggtcttagagttgattataataagcttagagcaatacttaaggctaagcttatcatggaaagcagaagaacatctgccttttccaatagcttttcaggccaagagagcaagagtaaattatcacaattttttcaaaatagcaattttttcaaaagaggctatatattattcttaatatatggactaatattagctggaatatgttatggagcacaggacataaagacaaggtatacagctttattcgctgttggtatgtttttattctttgcaggtattatagttgactttactgaagtacttatagacacaagagacagaaatatattactttttaagcctgttggcgaaagagaagtaaatttagcaaggttaatatcactaatcatatatgtagtgaaattagccttaattatgtttggtccagcgcttttagttacaatcgtaaaaaggccgcaagaagctccaatactgctagtagaagtatttatgttatctgtaagtctcgtaatgtttgaatatatattttactatgcattatttaaaatatttaaaaatcttaatataaagtctataataacaacagttcaagtactgatctttgttgtgcttatgataggctttcaagtttttggacacattgttgataaagaaatggcaataaaaatattttcaagtgaagcttttaaatatttattcataccaatgtggttcacagggccgtttgaattactatatggcaattttgaaaccataaatataatttatacagtattattaattgtatttttcattggatttatagctataaatacagctatatcgaaagattttgaagaaattttatcaaagaaagacaaagttataataaataaaaagacaagctttttacaaaggttaacaaataagttttttgccaagaacgatatggaaagagctggggtaaacatggtattttggatgaagggctctgatgaaaaactaaaatttcaattaggctctatatcacttatgataattgtttatccactaatctttctatttgctgcgtttaagaagggcagcgacccaatggctgatatggttttaaaagatcatgcgaggttcgtgactttaattaattacatgtcatctataatggctatgggcatttggcaaattttaaattatgctacaaattataaagcatcaataatacatttaatcacaggcaatctaagacttaaagaatttaaaaatggtgtaaaaaagggaggattattttcctttatatttgtgccagttttgatagatgcgatgcttatgtcattatttgtaaaaaatgcttggtttattgactacatcaatccaatcatatttataatgctatcaggcgttatctcttcagatcttttactaaagaatataccattctcattggattttacaaagattaagaatggtcaaaaaggatatttctgggctggtatggcatctatgtttataacagctgtgcttactggattaaacgctcttctaatatttttaaatacaccgtttatatatttatattcattaattggattaggagcactaatatacttacttaaaaaataggggaaataatgaaaaccatagatttagaagaaagacgagacttaatacttcatggtgacatgaaaaagacaataataacgctcgcaacacccatagttttaaacaatataatacaaacgctatataatctagttgactcatattgggtagcgggcattggtgagataagtttcgctgcgactggatttatttggccagttatgttcttatttatatctattggtatgggtttatcaatagcatcaacaggtatcatttctcagcttatgggaagaggtgatgctcaaagagtaaaaacatacaaagaaaatgtttatatattaacagcactgctgtctataatagttgtaagtgttggtttattgtgctcatcaacaatattaagattgatgggagcagaaggaaaattattcgaagaaagtaaggcttacctagatatactgtatttaggatgcccctttgtatttttcttcttttcaacaaactcaatatttcagtcagctggtgacacaagaactccaacaataattagtggtatatcaacaataattaatatgctactagaccctgtattcatatacgaagagataccttttataggtttacgtggtttaaatatgggcataaagggagctgggcttgctactataatctcacaagcattcatggctatagcaatcataattattgcttataaaaaaggattaattaatcttaatgtatttaaatatagctttgatgcttctgcatgtaggaagattatatccataggagttccatcatgcataggccaatctggtgaggcagtaggctttataatacttaatacatttgtattatcatatggtcaagacgcattaacagcctttgtaacaataaacagggttacatctatcatatcgcaaccaccaggaggtataggtcaatcaatagtaagtattgtcggtcagaataaaggtgttaagaactttgatagagttaaagaggcctttaggactgcatgtaagatgtcaaatgtaatatgcgttttaggctcaataatagtatggatatttagagatcaagtgctggcgctattcttaaaagatgcaagcgaaaatcttatgtatctttcaaagcagttcttatttttcatattgataacgaacttttgcatgggtctatacaacgtttatcaaggactatttcaaggctcgggtaaaactgatcttgcaatgaagatgcttcttggtagactttgggttttaagaatacctatgatattagtattcaaacatatactgatgatgggccctattgcaatatggcttgctatgagtttgtcaaacttattcacatcgttgtatggatatattttatatagaaaaggtaattggaaaggggatataatctaatgaatcaagctataattttagctgcaggcgaaggttctagaatgaaatcttctctaatcaaagtgctgcacaagattaatggcaaagcaatgctaaaatatgtattagacgctacagaaagagctggcttcgataagagatatctgatagttggcaacaacaaagataaggttatggaagaattctcgtctgataagagcattgagtttatagaacaaaagatgggtccaggcgaaccatatggaactggttatgcggcctcacttgctaagagccatatcaattatgatgacaatgtactagttatttttggagacacaccattggttgacgaagaagtcttaaaagattttcttagtttccataaagacaagaacaacaaccttacaattttaagtgcaatcttagacaattgtgatggttatggaaggatagtaagagacaaagataataatcttagtaaaattgttgaacaaaaggatgctaatgaagatgagctaaaaataaatgaagttaactctggcatttactgtttcaaaggtgaagactttttagactctataaacaatttaaagaatgataatgctaaaaaggaatattatttaacagatgcagttgcttatcttttaagcaaaaataaaaaagttgacgcatatataagtacagatcaaaacattgctttaggcgttaacaatcaattggatttatccaaaattgaagagattgtaagaaagaagataattactaagtggatgctagaaggtgtttactttagaaatccatctaatgtatatatagaagagaatgttaagattggtagagatgttgagatatatccagatgttactcttgaaggggatacaataattgaagacaatgttaagatatatggacatacaagaattataaattcgcacattgcaaaggatgttataattgaaagctcgcttattgaagactcctttatagatgaaagaacaaaggtaggaccaaatgcacacctaagaccaaaatcaaagataggtaaggactgcaaggttggcaactttgttgaaataaagaacgctagcctaggcgatggaactaaagctggtcatcttgcatacataggtgatgctgatgtaggatgcaatgtcaatataggctgcggtgttatatttgcaaactatgatggtaagaataagcatagatcgaaggttgaggacaacgcctttatcggtagtaattctaatattgtggcgccagtagagataggagaaaacgcttatgtggctgctggttcaacaataattaaaactgttatcaaggattctttgtctatagcgagagctagacaagttgataagatagattgggtaaaaaataaaaaaaatatggaggaagaaaaatgaattcatttctaggacaactaaaagtattaacaggaaacgctaacagacaattagcaaaagatgtttgtaagcacttgaacactgaacttattgattcagaagtaacacatttctcagatggagagattgctgttaacatcaaagaaacagtaagaggcgcagatgtatttatcgttcaaccaacacatgagccagttaacgataatcttatggagcttttaatcatgattgatgcatgcaagagagcttcagctggcagaatcaacgctgttataccatactacggatacgcgagacaagacagaaagactaaaccaagagaaccaatcacagctaaattagttgctaatctaattgaaaaagcaggagcagatagagctgttcttatggaccttcatgcaggacaaatccaaggctactttgatataccagtagaccatctatcagctatcaaacacttagcagaatacttcaagtcattgaatcttaatgatgtagtagtagtttcaccagaccttggcggagttactcgcgcaagaaattttgctaatgaattagacgctcctatcgctataattgaaaagagaagaccaaagccaaacgtatcagaagttatgaacgttataggcgacgttgaaggcaaaacttgtatcttagttgatgacatcatagatacagcaggaactatttgccatgctgctgaatatttaactgaaaagggcggagcaaagaaagtttatggctgcgcaactcatggtgtattgtcaggacctgctattgaaagacttatttctagtaagcttgaagaatttgttataactgatacaattcctctaaacataggcaatgttactgataaaatcaaagttgtaagcatagctgatcaactagctaaggcaatcgaaagaattcataacaacgaatcaataagctcgatatttgattaatgaaactcatagtaggactaggcaatcctggagatcgctttgacggaactaggcataatgctggttttgaaacgattgacatcttagcagatgagttaaatcttaagctaaacaatgctaagtttcatgcacaatttggttacacgacatataatggagataagctttatctaatgaagcctatgacatatatgaacgagagcggtatagcaataagagagtttatggcatactataaactcaatatcaaagatttaattgtaatagttgatgatatcgatataaattttgctacgcttaggataaaaaagtcaggaagtgctggcacacacaacggtttaaagtcaattgtttatcagcttaacaacgataaatttactagagtaaagattggtgtgggcaataaaccagaacattttgatttggcagactttgttctgtctagatactctaaagaagaaaaagtagatattgaaaaaacgtatataaacgctgctaaggcgtgtctttgcatcttggataaaggcgaagattatgcgatgaatatgtataacggaaaataggtgtaacatggatattttacaaaaaggcttattagcttttcaatacaaagatataattaaggatattaaaaatggcttaagtccaatctttattaatggtcttgttgaagaagctataggtgtaagtgttaaaactatccaagatgaaagtgacactagctcaatcatcataacttatgatgaatcaagagcaagaagactatatgaggatctaaaaaattctcatgcaaatgtttattatttaaagaagagggagatgcttttctacaatgttagcgactcctctttagaaactgaatattcaagaatacagacacttatgtctgtactcaagaacaaaaactctatcttgataatggatgtaaagactctcgatgaagagcttatcagtcaagatatctataagagcctaagttttaaattaaagactaatcaagttgttaatattgatgacttaattagttctttaactaagcttggttataaaagggcaagtatagcatctaataaaggtgaatttgcccttagaggctctattgtagatatctatgactcgatttctgatatgccatttaggatagagtttttttctgatgagattgattcaataagaatatttgataaggatacgcaaaagactattgccactaccgaagaaatacttattaatccggcaagagagatacttatccttgatgaatataaaaaaagcatcattgataatttaaagaaggactttgacaagactaaagaaacgaataagagctcatactcgcttatgaatgaaaaattcaaagagtattttgagttattaagtgaggatagctatgataagaacagatccttgctcttaagatatatccctgataagtataagtcaagtatatttgattactttgatgacaacacttatgtatacttagatgaaagcaaaaggcttgaagatgagtatgagaagtacacaaaatttcattctcaagagatggagtctttatataagaatggcgagatacttcttaaagaatttaatgccatcatgtcttataatgatgttttgaataaatttaaggatagaaaattagttttattatcaaatattttattaaatacgaaagattttaatcctgaagccatatataatttgcacttaaactccgttactaagtacaatgcaaagtatgatgctttattagaggacttaaaacactataagcatagaggctacaaaatacttctttctataaaagatatagaaaggtatgataggatttattcattgtttaaagataatgacatagggttcattcaagagagtgaagtagaagataagatattatcaggtcaattgttattgagaaatgattcatctacaagaggctttatatttaatgagaataagtttatagtcttatcagaaaacgatatttatggctcacaaaaagaaaaaattagaaagaagaaatcttctaagaaacttgatatttctgatatattagaaggaacttatatagttcacgaagatcatggtgttggtatatataaaggcatagttaagcttgaagtccttggcgctaagaaagactttttatacatacagtacaaaggcgaagataaactttatgttcctatagcccagatggataggatacaaaagttttctgacaaggatagtaaagacgtcaagataaataaactatctactaatgattggataaaacaaaagtccaagtcaaagaaggctatagagaagatggctgaggacttagttgaactatatgctattaggaaggaaaaagaaggttttgctttttctaaggatacgccatggcaaaaagattttgaagaggcctttccatatgaggagacgaagggacaactcgaatctattatcgaaattaaaaaggacatggaatccaataagcctatggatagacttttgtgtggggatgttggcttcggcaaaactgaggtcgcactgagagctgcgtttaaagcaatcatggatggcaagcaagttgcattcttgtgcccaacaactatactttgtcagcagcactatgagacaatacttgaaagatttaataaatatcctatacgctcagcgatgatgtcacgttttagaacgagcaaggagcttaaaaagactgctgaagaattacaaacgcatagtatagacttagttgttggtacacacagacttttatctgaagatgtaagatttaaagatttagggctactaatcatagatgaagaacaaaggtttggggttagagataaagaaaagattaaaaagctaaaagaaaatgttgacgtattatcactgtctgcgactcctataccaagaaccatgcacatggcactctctgggataagaagtatgtctgttatagaagaagcaccgcaagatagatatccaatacaaacatatgttctcgaatacaacaaaagccttgtaagagatgccatacttaaagagatggatagaggcggacaagtcttctttgtatttaacaatgtagaaaatattgataaaatgtataatgaactaaaaacattagtgccagaagcaaggattgctgttggtcatggacagatgagcgaagcaaagcttgagaaggtaatggttgattttatgtatcataagtatgatgtccttctttcaacgacaattatagagactggccttgatattccaaatgcaaataccataatagtatataactcagagaacatgggccttagtcagctttatcagctaagaggaagagtaggcaggatgaatagaatcgcctatggttatttcacttataaggaaaacaaagttttaactgaaacacaagaagcgagactaaaagctataaaagagtttacagagctcggaagtgggtataaaattgctatgcgagacttacaaataagaggcgcaggcaacttattaggcacttcacaacacggtcacatcgcagctattggatacgatttatatataaagtacttaaaccttgctatcaaaaagttaagaggctacgaggtgaaagaggacatcgatacaagagtcgatattaacgtcgatgcttatataccggatgactttgctccagacgaatatgttaagatggacttatataaaaagatagccgctgttgagaatgaagaaatgaagagcgaacttattgacgagatagtcgatagatttgctgatattccaaagtccattgtaaacctaatagatattagcgaacttagatctatggcaaaagagttttcgataacatcaatcaacgaagcgggtgaagatattaggatagagtttcttaatgataaggtcatagatccacaatggatagctgatatatataagaagtataagaacaggctctatattaacaagagatatatgaatgtgattagagtctccatactagacgatgacaaaataaaacttataaaagatatattaattttacttaaaagcagtaaatatataaaaaaagcttgaaaaatatttcaaaaggatatataataactctatgagtaaaatttaaggggagatataatgaagaaacattttaaaattgttttgcttgcattaacaatattgacaatgatgttttcagtatcttgcaaaaagactgaagaaggtgcagtagcaactgttaatggaaaagcaattacagaaaaagagttcaccgaaaattacaaagtatatgaacgtatgtataagcaacaacttggagaagaagcattaaagaaaactgataaagacggtgtttcatttaaggataagcttaaagagaatatactagaaaaacttattgtagatgaacttatcaatcaagaaatcgacaagaagaagattaagattggtgacgatgaagttaacaagatgtatgaacaaactatcaaggatatgggcggaaaagaacaatacgaacaattcttgaaacaacaaaacattacggatgatttcatcaaagacagtataaagaaggaatacaaacaacaaaagttagaagaagcattctacaaagacaacaaaataagtgatgaagagattcaaaagttctatgacgagaataaagataaactcgtaaagtataacttgagtcacatcatgactgataaggaagaagatgctaaaaagcttcatgacaaattagatgcaggcgaagattttgctgagctagctaaaaaagaatctacagatacttactctgctgcaaacggaggagttatgggagaagttcaagcgtcatcactaccgcaagagttcttaaatgcagttaattctactgaaattggttcatattctgatgtatttaaaacagatatgggttaccatatagttaaagttgatgataaaaaagacaaattagatgatctaaagtcagagattgaacaagcgttaaagagtcaaaagtttgtacaatacatgaaagaccttagagcaaatgcagaaattaagaagatggatttacctgagataaaagaagaagaaaaaacagacaaagataataaagaaagcaaagatgctgaaactaaagatgagagcaaagataatgaaacaaaagaagataataaagacactgagtcaaaagatgacagtaaaactgaagataaatcagataataaataatttataaattttaaggaggatatcatgactgaatacaaattaaaagcagaaaagcgtgaagctgtaggaaaaaataaagttgataaaattagacaaaatgaaaaattaccagcagcagtattccaaaaaggaaaagaaacagaaaacatcactataggtgatttagagttccaaatgttataccaaaaagcaggtatgacaagcattattgatcttgacatagatggtactataagaccagctatcgttaaggaaattcaaagacacccattcaagaatcaaatctaccatgttggattccaaggaataaacatggatgaaaagattaagattgaagttccagttgaattaatcaatagagatgaaattagaaaacagccatctgtattaaatcaacaattagacactatcgaagttgaagttttaccagcaaatatacctgatagcttctcaatagacgttcaaaatatggactacgatgatacatttacagtaagagatttagtaggcgacaacaaagatgttgaagtacttatagatttagatgaagttgtatgttcattatcaatgccaagagaagaaaaagaagaggaagaaactactgaaacagctgcagctgacgtaccagtagttggtaaagaagaaaaagctgaagaagcagataacgaataataacaatattgattatatgccttgctattcattaagagtagcaaggctttttttatttagagcacaatatattttttcctcagttatataagtacataaaacaaagaaataaatattgagcgagtagtaaaaagtgcggcttattatattaatttttaagacaataatacatcatattccttgacttataagtgcctttattttataataaatatgtatgcaaaaggagaggactatgaataaaaagcctaagtttagaatagatataatattagtattaacgatattagcgctacttgcttttggaactataatggtgtattcaacaacattatcatttgcaaagcctgtacaaaacagcctaatgaagacacactttttgtctttagcattaggtatattagtgatgtttgtattaatgcttatagattataatatatggggcaagttatacttgtttatctatgctggatgcatcttgcttttaatagcaacattgctttttggtaagtccgttcacgatgctaaaagctggatacaaataggatcaaaattttcttttcaaccatccgagtttgtaaaggtaggacttataatatcacttgctaagtacatagagaacaatattgacaagctaaacaacccatttgttttgcttaagatacttgcttttgcatttttaccagttttattaatactattgcagccagacttcggaactgcgattgtatatgtgttttttatatttataatgttattttcacaaggtatatctttaagatacgtaatgtatgccataggacttggtgttctatctataccagctttatggttttctatgaatcaatatcaaaaaaacagaatatatgactttttggatcccaatagagatgctatgggttcaggtagacaggtaattcaaggtaagattgccttgggttcaggtaagctatttggcagaggactcttcaaaggcactcaaaatatgtataaatatgtaccagaaaagcatacagactcaatctttgccatagttggagaagagactggattttttggaggcgctataatgatattattgtactattgcatgctaagcaggatgattaatatagctaaaaattcagataatgtttttggttcagctatggtatcaggctttttaggaatgtttttgttccatatagttcaaaatattgggatgatacttgggatactacctgtaacagggattccactaccttttataagctatgctggaaccttccagttgacaagtcttgcttgtatagggcttgtattgtctgttaattataacagaggagtatccaggtttattgataagagcttagattttattcaatgattataagtcatagtaaaataaaaaagttaataaagaaatacggagtagatacatttagaattacaaatactgaaagattaatgcctcttggagatgcatctaatgaatttacaaagtttactgaagaagaaaggttaaatcctaaaaaactatttccaaatgcacgcagcattatagtctttgggcttagctataactataaaaaagcagcaaggaaggaaaatacatatctactttctagatcatcttatggatatgattatcacaaagtatttatggataagttagtaaagatagataaggagcttttcaaaaataaagaaagtgaaagtcatgtctttgtggatacaggtccattgatagagagacttctagcgcagaaatcaggtttaggatttttgggtaagaacacttgcatcattaatcctttattaggttcttttatatttattgggtatataataggtaatgagcgaagtgatttttatgacttaccactaaagcttgattgcaaggattgcaatatttgcgagagggcttgtccaaataaagcactttgtaattataagatgaagatgacaaggtgtttgtcatatattactcagaaaaaaggcgacttagatgattttgagaagaggaatttaaagacatatatttatggctgcgatatctgtcaagagatatgtccctacaatataaaagctaaaaaagtttatcacgaagaattccattcttcacaggactatgggcttgtttataaagaagattttaaattaagtaataaagaatttaaagaaaaatacaaagctatgtcagctttgtggcgtggcaaaagtatactttttagaaatgcaaacattatagacaataataatgatatagttaaatgaaaggaagggtattatgtcaaatgtacatgaattaggatttttaaaagataaaatccaagaattaaaagatcaaggagtttatagaaaattacctatattaaactcacctgacgacgcagagattgttttaaatggtaaaaaagttattaacttatcatcaaacaactacttaggatttgcaaacaatcctagaatcaagaaagcatctatcgaagcgatagaaaaatacggtgctggctcaggagctgtaagaactatagttggtaacatggacatccatgaagaactagaaaaagttctagctgagttcaaaagagaagaaagagctttcatttatcaatctggattcaactgtaatgcaggaacaatccaagcagttacagaaaagggagatttaattatctctgatgaattaaaccacgcatctatcattgatggaactagactttctaaagcagatagagctatatttaagcactctgacatggatagtttggaagatgttttaaaggaaaagagaaaagattacagaaacgttcttattataacagacggtgttttctctatggatggagatattgctaagttaccagacatcgttgatttagctgaaaagtatgaatgtatgacatatgttgacgatgctcacggctcaggcgttctaggcgaaaacggtagaggtacagttgatcacttccacctacatggtagagttgacttctctatcggaacattatctaaagctataggatgtataggtggttatgttgctggatcagaaactatgtacgaatggttgattcacagagcaagaccagtattattctcaacaagtttaacaccagcatcagttggagcaataacagaagctataaagatgcttatggaaagcagtgaatatacagacagactttgggacaatgctaaatacttcaaggaaaaattaggcaaacttggcttcaatacaggtcacagtgaaacacctatcacaccagttatcataggtgaagaagctaaggctatggaattctcaagaaaattacttgaaaacggtgtattcgtttcagctatcgtattcccaacagtaccaagaggaactggtagagttagatgtatggtaacagctgcgcacactaaggaacaattagatgaagcttgcagaatatttgaaaaagtaggaaaggaaatgaacattttaaaataatgttcgttactattatgcttatcagcataactatatatgatgctttaagcttaaaagataaacgcatggttcttaaatcgcttattgaaagactcaagtcaaggtttaacatttcgtgctgcgaagctgcagataatgacaagtggcaagtaagcgagataggcatttcctttgtgtcaaacgatagtaagtataatgaaaaaattattgaaaagattataaactttatcgacaatgatgatagagttgaaattacaaatatagataaagagatgtatagttatgagaaaagtattaaataaaaaagaagtaaatacagttttggacttactgcgtcaggattatcctgacgcaggtcctgagctgcattttacaaatgaatttgagcttttaatagcaacgatattatcagctcaaacaacagataagcaagtcaataaagtaacagataagatgtttaaaatattgccagagcctattgattatatagaaagaccactttctgagattgaagatatggtaaagtctataggattttttagaaacaaggcaaaaaacatacaaaagacttgcgacatattagtacataaatacaatggaaaggttccaaatacatatgaggagcttatagagctaccgggagtcggtagaaagactgcaaatgttgttttgtctaacgcatttggcgagcaaaggattgcggttgatacacatgtattcagagtctctaatagaatcggcttagtaaatgaagacaatgtattagatactgaagaggcacttatgaaaaagctacctaagaatacttggtctttagcacaccatcttctaattttccatggaagaagggtatgtaaagcacaaagacctttatgtgaagaatgtaatctagaagagatatgcttatataggaagggaatgaagaaatgaaaaaaggtttagtactatttatagttttgattttaatattgggcggatcatattttggatataaaaaatacactgaacacaaaagaattgaagctatgaaagaagcattaaaaagtgacaaaatatatgaatatataacggtagacggagttgatgtatctggactttcgaaagatgaagcaaaggaaaagataattgtatctaaagaaaacgaagttaaagataaaaaaataaatgtagctgtagaagataaaaattatacttttgagctaaaaaatcttgatcaaaatatgaatctagacaaagctgtagacgaagcatatgactatgcaagagaaggagagctagaagaaagatataataaattacaagaaataaaagaaactgctttaaatatcaacatcgacaaagagattgattattcacatgtggatgaattcgtaagtagtatcgctaaagagactaattgtgaagcggtaaatgctgagtttagcgctaacaatggcaaaataacctctacagaaagcaaggatggaaaaacactggattctgaaaaacttaaaaatgacattattaatgcaattaacaataacgaagattctgttgttgcgatcgttgagactatagaaccagaaaagaaacattcagacctagaaaagattaacggccttataggatcatttacaacagatataagctctagttcaaacgaaagaaagacaaatataagagtctcatcagataccgtttcaaaaaaacttttgcttcctggagaatcttttaattttaataatgcgataggagatgtaactacagcaaaaggttataaaaatgcgcatgtattaaagggcggagaatatgaggacggtctaggaggaggcatgtgtcaaacttcaacaacactatataacgctcttataagagctggggttaaaattcttgaaagacaccctcactcaagagcggctagctatgtaccaaagggtcaagattgcgcggtttggagaggaacaaagaatttaagattcaaaaatgaatttgactttcctgtatatatagactcaaatgtaagtaaaaacaaagtaacattttatgtatatggtgacaaaactaagaaagattatgatataagctttaaatcagagatagttgaagtaattaaatcagaaactattgaaaaagttgatcctagtcttaaaccaggtgaaagagtagttgatttcaagggatatgatggatatagagtagttactaataaaattattactaaagatggaaaagttatctcaaataaacaatttactaaaaattattatccaaagagagatacgatcgttagagtttctgaaaaatctgcagatatcgatagctctaaccaagatagtgaaaataatgatgcggtggtgttaccatgatgaatataaaaatacttgcctttgatatggatggcactttacttaatagcgaaaaaatggtaagtagaggaacatgtgtagaaatagaaagattatacaatgaagggatccatatagttctttcaagtggaagacttcacaggtcgattgaagcgtacgcaaatatacttccctttaaaacatctatagtagcaactaacggtagcgtcgttactgactatgagggcagaagagtttatgaaaaacctatagatacagaagccttcataaaagtaattgatgttttaactgataataagatgaattttcatttctatggagttaatgaattctatagacttaaaggcacaacatcattaaacacatactccagagtgccaaagaatataaaagataacatagaaattgttgaatataataatattgaagagataaaagactcttgcaatgacaagtcatattttaaagtcttattagtagaagaaaataaaaatcgccttgaagagattagatcagagctaaagaaaatttctggcgtaaagatatctagttcttgggcgaataatatagagattgtaccagaaggagtcaataaagctaaatcacttaaatatttatgtaaaaatttaggcttagatatagaaaacctaatgtcatttggagataataataacgatatagagatgatagaagagtcaaaagtgggtgttgctatgagtaacgctacaaatgaactgaagcaaaaagctaatttcattacggattatgacaataatcatgatggcataatgaaattcttaaaacaatatttttaggaggaaactcatggctattaacatagttttgcacgagccagaaataccacataacacaggagccattgctaggagctgtgttttgacaaattcaaagcttcatttaataaagccgtttggatttgagcttagtgataaatatttaaaaagggcaggcttagattattggaagtatctcgatattactacatatgaagacttaaacgacttttttgaaaagaacaaaaatgtaaatttttatcttgcgacaacaaagactacaaagatatattcagatgttaaatttaaggatggagattttatcttctttggtaaagagacagctggtttgccggaggactttataaaagagcacagtgaaagagcaattagaataccaatgataaaagacttaaaaaggtctttgaacttggctaattcatgcacagttattttatatgaagcacttaggcaactaaactttatggaattagtgtaggtgatggtatggagtatttattaggtctgatgggaggccttggtttattcctatatggaatgagccttatgggagacggtcttcaaaaggcagctggcagtaaattaaaaaatataattggagcattgactaagaatacattcttaggtattttagttggtactgtagtcactatgattatacaaagctcatcagcaactacagttatggttgtaggttttgtcaatgcaggacttatgaatctgtaccaagcagtaggtataatatttggagcaaatataggtacaacaattactggtcaaatgctagcccttaatatttctaaatatgcacctatagcaatatttgttggcgttttattatttatgctgggcaagaagaaaaaaataaaaagctatgcagaaattgttttaggacttggcatattattctttggtatggcagcaatgggtgaagcgatgaggcctttaggagaaagcccagtatatgcagagcttatggctaaattaactaatccatggctaggcttactagttggtttagtaatgacaactatactacaatcgtcatcagcagcacaagccatcatactagctcttgcttcacaaaatataattaatatgcacatagcattcccaatactatttggtcaaaacataggtacaacaactacagcacttatatcaagtattggagccaatagaacagctaaacaagcagcatttatacattttatttttaatgtgtttggatctatagtatttttattattgctaaagaatccgatagaaacttatgttgtcaatacttttgcttcacctacgacacaaatagctatggctcacacattctttaacgttataaatgtactttggatgatgccttttgccaaagttttggttaagattgcacaaaaacttataccagaaagtgacagtaaagaagataaacattctattcacctagactatcgtatattaactacaccaggtttagcaataggaacagttgtggacgaattaacaagaatgaatgatttagtattacaaaacatagaagactcaagaaacttattaattaataaaaagattgagcttatggaagtcatatatgaaagagaagaacttataaacagcttacaaaaagaaattatagattatttagtaaaggtatcaacatcaggactatctaaagaacaacacgaaacagtcgacgatttattctttattgtaaacgatattgaaagagctggagaccacgttaaaaacatcactcaattaagtgaagaaagaataaacatggacatacattttactggtgaaggaaagagagagcttaacgaaatgtatgacttaacagttaatgtatttacactaacaatgaatgcatacaaatctatgtctgaagaaatggcatatgatattattaatatagaaaagaagatagacgtttgcgaaaaagaatttagagaaaaacattttagaagacttatgagcaatgaatgcgaagaagagcaaggcatcatattcttagacacaatatcaaatctagaaagaattggtgaccatgctgacaacatagctggttatgtacttaaacatttcaaataattactttaatgtgcaaagaaaacagattttaattcagatataaaaaaattaaatgtagaaaggcttgcaaattaatactatttgtagtataatataatcagtaatggactggacgacagatgcgggagagaacgtatgtcaccgaagggtaaagaatctaagctcactacttatattcaaaagtctcaggtaaaagaaccgcgttttgacagtactctggaaagctttaagcaccgatggagcaatcttgtttaagagaatctcacaggttatggacagagaacaagagtggcttgttttctgttttttaatttatggacaattttgttaataaacaatatgtagtataaggaggaatatcataatgtatgatgtaattattattggaggaggccctgcaggcttagcagctggcctatatgcttcaagagcaagacttaaaacacttatccttgaaaaggaaaaagcaggtggacaaatcgttataactgacgaagttgcgaactatccaggttcagttgaagacgcttcaggtccaagccttattaagagaatgaaagatcaagtagacagctttggtgcagaattcgtaatcgatacagttcaaaagctagaacttaacgataaggttaagaaagttgtttgcaaagacaaaacttacgaaggcaaaactgttatagttgcaacaggcgctacaccaagaaagattggttgccctggtgaagcagaattcactggcagaggcgttagctactgcgcaacatgtgatgctaacttctttgaagacatggaagtttatgtagtaggcggtggagactcagcattcgaagaggctatgtacctatctaagtttgctagaaaagttactctagtatatagaaagggtaaagaagaagcacgtgcagctgaaagtataaaagaaaaagcttataagaatccaaaacttgattatatttggaatgcaactgttgttgaagttaagggcgacggaatccttacaagcattgtacttgaagatacaaagactaaagaaagacgtgaaatattcgctgacgaaaatgacggaacatttggtctattcgtattcgtaggatatactcctaagaacgacatagttgaaggcttacttgatatggaaggcggatacattgtaacagatgaaaacatgcatacaaatatcccaggagtatttgcagctggagacaatagaaagaaagaattaagacaagttgttacagcaacagcagatggtgctatagctgcaacacaagctgaaaagtatatcaacgaacatttcggagactaatagtcttatagtataaaatttaaggaggaattgaaatgttagaagtaacaaaggacaattttgaacaagaagttaaacaagctgaaggttatgtattagtggatttctggggacctacatgtgaaccatgcaaagctttaatgccacatatccacgctatggaagatgaatttaaaaacgtaaaattcacatcatttgatatttcaaagggaagaagattagcaattggagaaaaagttatgggcttaccagtaattgctatttacaaagatggctctcaagttgattcaagagttaaagaagacgctactaaagaatcagttagagaaatgttagaaaaatataactaaagtttatttactattaaatagttaaatatattaaaattttaagggaggtgagattatgcgtctagaaataggcaacgtgcttattaaagatgttcaattcggccaagaaacaaaggtagaaaatggtgttttatatgtaaataaagatgacattatcaaactttgtaaggaagatgaacacattaaatctgtagacgtagaaatcgctagaccgggagaaagtgttagaatcacaccggttaaagatgttgttgaaccaagagttaaagttgaaggacctggtggagtattccctggtatcttatcaaaagttgacgtagttggttcaggtaaaacaaacgttcttaaaggttgtgcagtaatgacaacaggtaaaattgttggtttccaagaaggtattgtcgacatgacaggcccaggtgctcaatatacaccattctcaaaaactaacaatattgtagttattgctgaaccaattgatggtttaaagcaacacgaacatgaaaaagctctaagatattgtggattcaagactgcagcttacttagcagaagcagcaagaaacttgactccagatgaaacagaagtttatgaaacactacctttaatggaaggtgctgaaaagttcaaaggacttccaagagttgcatatgttcaaatgcttcaatctcaaggacttctacacgacacatacgtttatggagtcgatgcaaagcaaatagttcctacaattttatacccaactgaagtttttgatggagctataattagtggtaactgcgtatcatcatgcgataagaacccttcttatgtacacatgaacaacccagttgttaaagaattgtacaaagaacacggtaaaactatcaactttgttggtatgattatcactaacgaaaacgtttatcttgcagataaggaaagaagttcaaactggactgctaagctagctagatatctagatcttgatggagctgttgtttcacaagaaggttttggtaacccagatacagacttaatcatgaactgtaagaaaattgaaggccaaggcgttaagactgtaatcattacagatgagtacgctggtagagacggtgcttctcaatcattagcggacgctgataaggctgcagacgcagttattactggcggtaacgctaacgaattaattgaactacctaagatggacaaagttataggtcaccctgaatttatcgatacaatagcaggtggatttgacggttcattaaaggctgatggttcagtaacagttgagattcaagctataacaggagctacttctgaagtaggttttggatacttaacagcaagaggcaaataattaataataaatttaaaattacaaataggaaaggagagtttttgaatgtcaatatttaatgaaaattcaaaagttgttataattggcgacagagacggtattcctggtcctgctatggaagagtgtgtaaagacaactccagcagaagttgtattctcagctactgagtgttttgtctgaactgcagctggcgctatggacctagaaaaccaaaacagagtaaaagaagccgtagataaatacggtgcagaaaacatcatagttttacttggtggaggagaagctgaaacagcaggcttagcagctgaaactgttacagcaggtgaccctacatgggctggtcctttagccggagtctcgttgggacttaaggtatatcatgcattagaacctgaatttaaagaaagtgttgatgcaggagtttatgacgaacaaatcggaatgatggaaatggtattagacgttgatgctattactagtgaaatcaaaaatatcagagatgagtacactcaatataaatagtgcccaaaaattttagtaaaaggggggaaatatgatgagtaaattaagagtagttcattatattaaccaattctttgccggtgttggtggagaagaaaaagctgatattaaaccttacgtagaagaaaaggtaatgggtcctggaatggctttaaatggtcaattcaaaggagaagctgaaattgttgcgactatagtatgtggtgactcatatttcggagaaaacatagaagaagcaaaagcagctatactagaaatggttaaaaaatatgaaccggatctattcatcgcaggacctgcatttaacgcaggaagatacggtgtagcttgtgctacaataacagatgcagtacaaaatgaacttggaattccagcaatcactggtatgtatgttgaaaacccaggcgctgatatgttcaagaaatctatatatatagtaagcacaaagaacagtgcagctggtatggttgatgctgttcaacacatggctccattagctcttaaattagctaagaaagaaaagatcggtactccagcagaagaaggatacatcgaaagaggagtaagatacaatctattcgtagaagaaataggagcaagaagagctgttgacatgatgcttaagaagttaaaaggcgaagaatatgttacagaatatccaatgcctaacttcgacagagttgatccaaatccagctataaaagatatggctcacgcaactatcgctttagttacatctggcggtatttgtgcaaaaggaaaccctgatcacatcgaagcatcatcagcttctaaatatggaagatatgatattacaggtgtagatgcattcacaagtgaaaatgctcaaacagcacacggtggatatgaccctgtatatgctaacgaagatccaaacagagttttacctcttgacatcatgagagaatttgaaaaagaaggtaaaattggtaagctatataatgcatatttcacaacagttggtaacggtactgccgttgcaaacgctaagaaatttgcatcagaattctcaaaagaattagttgaaaaccatgttgatggagttatattaactagtacctgaggtacttgtacacgttgcggtgcaacaatggtaaaagaaattgaacgtgcaggaatccctgtagttcacatgtgtacagtagttccaatttcattaacagttggtgctaacagaatagttcctacaatagctattccacatccacttggagatccaaaacttgatcatgatgaagaagtttctctaagaagaaaactagttgcaaaggcattacatgctttagaaactgaagttgatggacaaactgttttcgataaataattattgtaaataataaatcgcccttttaattaagggcgatgtacataattatgtttatgtcatagttatactatgttatagataattcataataaaaaaatattacggaggtgtatggatgaattattcagtattaaagggtgcagcttatgtattgttacaagcacctgatatggtaatccacaatggaactacacaaacaacagaaagaactctacatccagattcagagtatctaaaggcagttccaaaacatttaagaagtttcgaagactgtgttaactatttacctaaccaaatttatataggtaatgatgttcctgaaaaattaagagaagtacctgagccatggcatgaacacttactatctggcgcagacagacacggtgctaagggcgaaattcttccacaatctgaacttataggtatgatgaaagttgcagatgtttttgagttagttttcttaacttcagaatttactgatcaagttagaaaagaattcgaagaacatccgctaatcaatgatgaattaattgctagattaggaaaaggtactgaattagcagaaattgaaggcttaattaatgatcacggtgctgaagcaatcatgaacgaagacaaaatcgtaggttgtgttaagagagcacacgatgttgaccaaaacttatctgctcacgtaatgtttgaaaacttagtagttaaagcatcaggtatatttgctgctttaaactgtatagaaaagaaccacatagaccctgcatcaattgaatatgtgattgaatgttcagaagaagcatgtggcgatatgaatcaaagaggtggcggtaactttgctaaatctatagcagaattaactggtttagttaacgcatcaggttcagacgtaagaggtttctgtgctgcaccaactcactctttaatttctgctgcttctttagtacaagctggaacatttaagaatgtaatggtagtagctggtggttctagtgctaaacttggcatgaacggaagagaccatgttaagaaggaaatgccaataatcgaagactgtgttgcaggatttgcatttgttgtttctcaaaatgatggagaacatccaataataagaactgatattgtcggcagacatacagttggcactggttcatcaccacaagcagttatcacttctttagttacaaatccactaacaaaagctggattaaaaatcatagatgtagataaatattcagtagaaatgcaaaatccagatataacaagaccagctggagcaggtgacgttcctgaagctaactttaagatgataggagctttagctgtaaagaatggcgaaatcgaaagaactgcacttcctgattttatcgttgaacatggtatgaaaggttgggctccaactcaaggccatataccttcaggagcaccttatcttggatttgttatagatgatatcaagagcggagcagtaaaaagagctatgattgttggtaagggaagcttattcttaggtagaatgacaaacctattcgacggtgtttctatagtaatcgaaaagaacccaggaaaggttagcgaagaaggtgcagcatctgaagaaactattaagaaatatgtagcagatgcaatgagagatttcgctaaatcattcactgaagaaaattagaggtgacgatatgtcagacaacattaagaaaatgattggacaagtttttaatgacatcgcagatggattagaaactggttcattcggaaaaaaagtacgtgttggtttaacaagttttggtagcgaacacggtactgaaaacttagttaaagctgcagaacttgctcaatctagagattcttcaatggaagttgttcttattggtccaaaagcagaaactgaattaactcaatatgaagtttctgatgaagatcaaggttataagaagatggaagaattattagatgctggagagatagatgcatgcgttactatgcattacaacttcccaattggagtatcaactgttggtagagcagttactcctggttttggtaaagaaatgcttatagcaacaactacaggaacatcttctgcacatagagtagaagcaatggttcttaatggtatttatggtctaatcgtagctaaggcattaggaaatcaagatccaagtcttggtattctaaatgttgatggagctagacaagttgagagagctttcaaacaattaaatgataaaggatttaatattaaatttgctgagtcacacagagctgacggtggagatgtaatgagaggaaatgacttattacaagcttcatgtgacgttgttgttaatgactcattaactggaaatatccttatgaagatgttctcatcattcactacaggcggttcatacgaagctaacggctttggatatggtcctggtattggtgaaggatttaacagaactatccttatagtatctagagcatcaggagttcctgttgtagcaaacgctttaacttatgctgcaggacttgttaaaggtaacttacacaaggttgcgaaggcaacatttgaagcagctaatgcagctggtttaaaagatatacttgcatcattaagtaaagctaatgaaaagaaagatgacggaccaaaagaagctgttgctgctcctccaaaggaagtagtagaagaagctattgctggtattgatatactagagttagaagattcagttcaagcactttggaaagaaggcatttatgctgaaagtggtatgggttgtacaggaccagttataatggttagtaagaacaacttagataaggctaaagaagttttaacaaaagctggatatataacaagcgatgcaaattgctaataaaaatgaggcgcaagcctcattttttattgcaaatttttaaattaaatcagcttaatatatttgacaattaacattggtttatttatctaatgcttgcaaattataattaagaattgtataatgaaataggtgagttaaatgaaaaaatacaaacaatacttaaatgaatatatattggatctaagatctttaatagaattgtcaagtttttctttaatagttcttagtttaataatattacctatctcaaaggtacacagattagacattgcattgagcgtgtcacttattttttattacatttttattaggcctaatattaaagatacacaaacattctatgtctttagactaatagctagtaatgctacgcgtagagctattttgcactttgttttaatcagattaattataaaaaggagcttagatatatactcgaatcattattttataaaatatactttaattatgacaattgtctttatattatatttacttattgttgcatatattagcaataataaaataaaaaagaaagaaatatatttcaaagattttaaatataacgatagacttataattgactactacttatcacagacgtatccattagaaaaacttgagagttttaaatattattcacatctaagttctttatatagtgatgataacacaagtagtgaggacttggagttaaagtatgcatatcttaaggagcttttctcaaagaaggaagatgatgagactaaggaaaaaataagactagaaattttaaagaagctagaagaggcttatcagttcataaaatttgaaaataaataaaaaacataaaaaacataaaaaaagttcttgacaattctttttgttggtagtatgattataaggataaaaaatatagggaggatattatgcttaagggaagaaattatattgatccagaggatctaagcctagaagagcttgatgagctatttgacctaggtaaagaaattgtaaaaaatgaaaaggattttattcacgtttgtgacggtaaaatcctagctactctattctatgagcccagcacgagaaccagattttcatttgaagccgctatgttaagattaggcggaggtgttattggtttctcggagccgggctctagttctgtagcaaagggtgaaacattagctgatactctaagaacagtaagctgctactcagacataattgctatgagacatcctaaagaaggcgctcctcaatatggacacaatgcatgcacagtaccactaataaatgcaggagatggtggacatcaacatcctacacaaacacttacagacttatttacaatattaagtgctaaaggcaaatttgacaatatgactataggtttatgcggagacttaaagttcggtagaacagttcactcgctaattaaggctatgtcaagatattcaggcaataaatttgtacttatatcaccagatgagttaaaggtaccaaactatatcaaagagcaagttcttgataaaaagtctataccatatacagaagtagaaagacttgaagatgtaattgacgaccttgatgtattatatatgacacgtgtacaaaaagaaagattcttcaacgaagctgactatgtaagattaaaagacagctacgttctagaccttgaaaaactaaaaaatgcaaagaaagatctagcgatacttcatccactaccaagagttaatgagatagctgttgaagtagacgatgatccaagagcatggtacttcagacaagttaagaacggtatgtatataagaatggcactaattgcaaagttattgggggttaaataatgttaagtattaatagtatttcaaaaggaatagttatagatcatatccaagcaggtcatggtgtacaaatatttgaatatttaaatcttagagaagctgactttactgtagctcttattatgaatgcacaaagtgataaaatgggcagaaaagacatgatcaagattgaaaatgaaatagatttagacttatctgcactaggatttattgacccaaatataacagtgaatgttataaaagatgaaaagatagaaagaaagataaatctatcacttccagaagttgtagaaggagttatcaagtgtaaaaacccacgctgtataacttctgtcgaaagaaatattccacataaatttgtcttagtagataaagaaaaaggcaagtacaaatgtgcttattgtgatcatgtttatggagaataaaatgattattgataaactatttgaagaagttcaaaaaaatggtccaatctgtgtcggtttagacacagatttctcctatataccagaacacttaaatagcatagagagtatttcagatagggtttttaaatttaataaggatataattgatgcaacatatgatttagtagcggtttataagcttcaaattgcttattacgaggctctaggagtagaaggactacaggcgtataagaaaactctagaataccttagagagaagaataaacttagcataggagatattaagagatccgacatcgcaaaaactgctgaaatgtatgcaaaagcacactttgaaggtgattttgagtctgatttcataactctttctccgtttatgggctatgatagcataaaaccatatctaagctacttagaaagcggtaaaaagggaatattcgtactgctaagaacatcaaatcctggtgctttagacattgagtatcttgaaaataacggcgaaacattgtataatataattggtgataatcttgataagattgctgaaaaatatattggagactatggatactcatctttgggttttgttgttggagataatattatggacagtggagaacaagatgatataagaaagagatttccaagagagtttttcttaataccaggctatggagctcaaggaggcaaggcatctactgttaaaaagctattaaacgagttaaatggtggtgttgtcaactcttcaagaggaatcataactagtcatatgaagcataaggatgatgctgattatgatgacaaaaaatatacaaaatatattagagaagctgttataaacatgaaggaggatatctgtggctagaaatgcatataaagagggaacgatactagaaaacaatcatatcgttgacaatatctacgttttaaaagtaagtggtccatttgtaggagcacctggacaattttatatgattaaatcttggcaaggaacagaccctcttttagctaggcctatcagtatctatgacatagatgatgagggcaatatctatcttttagtggcaaatgtaggcagaggaacagatataatgatgaatttaaagaagggcgacaagctatatttgcttggaccactaggtaataagttcccattgccaaataaagatgaaaagattgccttagttggcggttctgtaggtatagcgccacttaaataccttgctagatcgatacaaaatattactaagaacatagattattatgccggatttagagataatccataccttatagaagattttgaagaatatgtagaaaatacatacatatcaactgaaagtggcaaggttggctacaaaggctatatcatagacataattgagagtgaaaaatacgacaagatatatacatgcggaccatttccaatgatgaaggcgctgcttttaaaggctcataataggaataaggttctagttagtatggaatctagaatggcgtgcggagttggtacatgtagaggctgcagtataaagacaaaggttggcatgagacgtgtttgcaaagatggaccaatatttggaggaggtgtgtttttaattgactgatttaagagtaaagatagctaatattgaatttaaaaacccacttatagctgcgagcggaactttcggttttggcaaagagtatgaagagtactacgacatctcaaagcttggaggtgtatcaactaaaggacttacactaaatccaaagaacggcaacgagggcataagacttttcgaaacaccgagcggattaatgaacagcattgggcttgaaaaccctggcattcaagcgtttattgataatgagctagactttttactatcaaaagatataattacacttgtaaacattggtggaaataatatagaggattatctagaggcagttagattaatatcaaaaacagatgctcaaatgatagagcttaatatttcctgtccaaatgttaaaagtggcggtatggcctttggtataaaaacatgcgttgcaaaggatgtagtaaaaaaggttagagatattacagataaaccacttattgtaaaactttcaccaaatgctaatgatatagttgagatggctaaagcatgtgaggaagttggtgctgatgccttaagtttagtaaatacatttaatgccatggccatagatatatttagacgcaaggcagtatttaataataaaactgctggtctttcaggacctgcaatcaagcctatcgctttaaggatgacttacgaagtatctaaagctgtcaatatacctgttatcggcatgggtggcatacaaaattataaagatgttattgaattcattatggcaggtgcgagcgctgtgcaagtagggactatgaactttacagaacctatgataatgtcaaatattgtagatgacttagaaaaatatatgaatgacaataagattgaaagttttgaagaaattagaggaataatttaatgagtataggtatagatatagttgaaatatctaaaattagaaagctaatggaaaataaaaagtttttgaatcgcttctttagtgatgcagaagttgatcacataagatcatcagcaaaggctgatgagacttgtgctggaatttttgctgctaaagaggcaataattaaggctttaaatggcaatttagatggattgaaatacaaagatatatctatacaaagaaaaaatgatataccatttgcatgtgtgaatggtataaatttttttgtctcaattgcacatgatggtgattatgcaataagagtggcaaatactaatgatattgcatctaaaaatataattgatcaagattttaaggtttttaaaaagaggaacaactttactcacaaaggtgactatggaaagattgcaatatttgcaggctcactatctatgactggagcaccttactttgcgtcccttgcagcaatgaggactggatgcggtctttcatacttatatgtagataaaaatatacaagatatacttagtgtgaaactatcagaaactataatcagaactaatgatgtatataatttatctgatatggatgcaattttgcttggaccagcgtggtcattctttgatgatagagataaaatttataaggatatagttaattctaataaaaaacttgtgattgacgcagatggtcttcattatttaaagaagtatgcacataaactagcgtacagagcggtaatcacacctcactatgcagagcttgctagacttttagatatggatattaaaaaaataatagacaagcctaataaatatgcaaaacttgctagtgataagtacgaagtagtagtagtcttaaagggccacaatacaattgttttagataataaaaaagaatacataaatgatacaggaaatcccggtatggcgactgcaggctcaggtgatgttttatctggaataattacatcattaatcgcacaaggctttactatttttgatgcagcgaagtatggagtttacttgcatggacttgcaggcgatcttgcaaaagaaaagtatggtgagtattcgcttattgcaagtgatattgttgagtttataccacaagctattaagatgatggaggtagaataaatgaatggtaatagagccgcttggcttgaaatcaatttaaataacttagagtacaatattaactctataaaaaaggctattaatcctgagacaaaaatcatgccagttattaaggctgacgcatatggtcacggagctgtagctctcgcaaaatttatggaggggcttggaatagatagatttgttgtgtctgttgcaagtgaagcaatggagcttagaaaagcgggtattgaagaagatatacttatgcttaattacttagaagataattatttagaagaagtagttgagtataatttaacaagcgctatatttagctatgataaggctaagaagctaagcgatgaagctgtaagacaaaataaaactgccaagattcacattgctttggatactggcatgtccagaattggttttcaagcagatgaagtacatagagtaaagtctgtagaagaaatactaaagatatccaaacttgacaacattgacatagaaggcatatttacacattttgctaatgcagatataaaagataaaactttaacagaaaaacaatatgataactataaaaaaactgtagccatgctcgaagaggcaggacttaatataaagataaaacacgtctcaaactcagcatctattatggatttgaaagatttaaaccttgattatgtaagagctggcatcattctatatggctattatccatcagatgaagttataaaagagaatttgcctttaaagaaattaatgcaattaaaagcctgtatatcaaacgttaaagagatagaacgcggcgaaggcgttagctatacgttttcatttatagcagataaaaagactaaggttgcaactataccaattggttatgcagacggagttagaagactactacaaaataaacttgaagttctttacaaagacaagctacttaagagtatcggcaacatttgtatggatcaattcatggttgatgccagcggtactgatgctaagattgctgacgttgttacaatcataggtgatggtacaaacaaggcaatgacatatgatgaccttgctaagatagaaggaacaatcaattatgaagttttaacagacatgaaggatagaatttcaagaaaatacttttataataataaagaaattagctctcacaactataaagatatatagttcaaagcttgtaatcatattgacttatgagcaattttaacttataatatagttgtcttacttatcagaaaggatgtgagaatatgattaaaagaggtgatattatatacgcagatttatcacctgtcataggctctgaacaaggcggcgtaaggccagttatagttattcaaaacgatgttggtaacaagtattcaccaactattattgttgcggctataacaagccaacttaataaatctaaactaccgacccatatagcaatagatggaccggaatttggcttgcctaaagatagtgtcatcctacttgaacagataagaacaattgataagaaaagattgagagagaagataggaactgttactaataaacttatggaaaaagttgatgaagctatcaagataagtttatctttgaataagtaatagtttgttggacataaattacatattacggagttgaatatatataaatatgaaagtattacatctaatcagcggtggagatacaggcggggctaaaactcacattattaatttgctttgcggtttgaaagacaaaattgatgtcaagctagtctgttttatagatggtccctttgctgatgatctaagaaaacatggtatagatgttgaagttcttaaccaaaaaagcaggtttgacttttctgtagttaataaacttaaagggattgttgaaacagagcattatgatatagttcattcacatggagctagagcaaatctaataagttattttttaaaaaagagagtaaaagcaaagtttatcacaacagtgcacagcgattatttattagattttaaagataatttctataagaatattgtatttacaaatattaacaagtttgcattaaagagatttgataattatattgcggtttcagacaacttcaaggacatgctagttagcagaggctttgataagtataaaatttttactatatataatggaatttatttgcaagacagattaattaaggataaagaaacatatttaaaagagaaaaatatagattataaggataaatttatagtaggtattttagctagacttgataaagtaaaagatcatgagacatttcttagagctgctaaagaagtaatttctaaagataagtccgttatatttttagttgctggagatggactagataaagaccatttacttaacttaagaaaagacttaaatatagaggataacgtatattttttaggaaatgaagacaagccttatgattttttaaatgcaatagaccttaatgttttaactagcttaagtgaatcattcccatatgtaattatggagggcggttcattaaagaaagcgactatcgcttccaatgtaggcggtattcctaagataattttagatggagaaactggttacctatttgaaaagcaagactataaagaccttgcatcgaagatattagaattaaaaaacgataaagagaggtgtagaagattaggagaaaatctatataagagaattattgacaacttcacacatataaagatggctgaaagacacattgaaatatataaaaaggtgcttgctaaaagtatactgatgtctggctacttcggattttcaaattctggtgatgatgctatattaaaatcgatacttgagtcgtttaaaactttggactcgagtcttaatataaaggttctttctaaggatactgatttaactgaaaaagaatatggagtagaagcagtagatagattccacttctttaatataatcaaaaatttaaagaaaacagatatgcttattagcggtggaggaagtctattgcaagataaaactagctcaaggtccatctggtactaccttttaataatgaagcttgccatgatttataagaagaaagtttttgtttactctaatggggttggacctattaacaagaaattcaatagaacttttactcgtaaggtattaaataaagctgattatataacgcttagagataatgattcatatgaatttataaagtcgataggtgtaaataataaaaatattaaagtattatctgatccagtttttaatttgaaagaagctgatgacgattcactatgtaaaaagtatgagattaacaaaaatacggttttggttgcagttagatcttggatgaatgatgaaaagctaattgatgagcttgctaagtttttaaaatatcttattgatgcaggtaaaaatattgtatttatgccaatgcagataccaagagacactttaatttctgaaaaaattgcttctaagattaaatcttgtaagattatagatgaaaaatatccagttgaaattttgatgaatctaatgaagagtgctgattttattatagctatgagacttcacgctatgatatatgctatacatcaaaatgtaccgtttattggtctttcatatgacccaaagactgacacacttcttaaagattttgatgaatgtctaaatataaatgtagataatatagattacaaagatttgcttaaagcatatgagtatataaatttaaaaagggaagcttttatcgagaaattaaagcttataaatgaagaaaacaagactaaggcgattgaagcaagtaagcttgtacttgagcttttagaggatgaatgatatggatattaatatactaggtgtaagaataaacaatattgatatgaacgaagctatgggaaggataaaagagttttttgtcagtagcaaagtaaattatatatacacaccaaatccagagatagtaatgagagcaggtagagatgaggagtttaaaacaataattaactcatcatcattaaatttatgcgatggcattggtttaattatagcttcaaagcttaagaaaaagccgcttaaatcaagagtgactggctatgatacatctattaagatattagagctgatgaatgaaaagcatctttctttattcttgctaggagctaaacctggcatagctgaaaaggctatagaaagaattaaaaaagattacccaaacattgttatagctgggtttaacaatggatattttaaaggtagtcacaatggatatgcctcatgtgaagaagaacaagttttaatacaaaagataaatgattcaaatgcagatgctatattcgtaggcatgggtgcaggatatcaagaaaagtttatatattataataaagataagataaatacaaaacttgctattgctaatggcggagtaattgatgtcttggcgggaaatgttaaaatagctcccgctttcattagaaagataggtatggagtggttatataggttagttaaagaaccaaagagattaaaaagacagatggatataccaaagttcttaattaagattatttttactaaaaacgcagtagagtatatagattaaataggaggttaatatggacgttaaacaaaaggtaataaatactatcagagtgctttctgcagaagcgatagagaaggcaaagtctggtcatccaggcttgccactaggggcagcgccggcagcatttacattatttaatgagcatttaaagcacaatccaaagaatccagattggataaacagagacagattcatcttatctgcaggtcacggatccatgcttttatatgcacttcttaatttatatggctatggactaaagattgaagacatagaaaactttagacaatttgattcactaactcctggtcatcctgaatatatgcatacaaagggcgttgaagctagcactggaccattaggtcaaggtattgctatgggcgttggcatggcgatagctgaaaagcacttagctgctatatttaataaagacgacaataaacttattgaccatatgacttatatactttgtggcgatggctgtttgcaagaaggtatatcaaatgaagcttcctcattagcaggaacactaaagttaaataaattagttgttttatatgactcaaacaatattactatcgaaggcgatacaaagcatgctttcactgaaaatgtaagagcaagatacgtagcacttggctggaacactttatacgttgaagatggtaatgacatcgaggctatatctaaggctatagctgaggcaaagaagagcacagataaacctactttaattgaaattaagactaaaataggctatggtgctactggcaaagaaggaagtgctgatgcacacggagcacctcttggagctgaatcactagcagctctaagaaaaaatcttgcctatgaagaagagggcttcaatgttagtaaagacgttcttgattatatggaagaaaaagttgaagacctaggcaaattagaaacagattggaataaagaactacaagcatataaggctaagtacaaagcagattatgataagcttatgagtttctacgacaaggatgtatctgaagaagtgctaaaagcatgtaccgatatagaacttaaggatgatgcatcaagaagctcttcaggtaaagttcttaacaaggtaagttctgtattagaaaatctaattggtggatctgcagaccttggcccatcaaataaatctgtaatgaataaagaagaattcttctcaagcgaatgtccaggaggaagaaatatacactttggtattagagagcatgcaatgggagctattgttaacggcatcttacttcatggaggtttaagatcatatgcagcaacattcttagtgttctcagactatatgaagccatcaatcagactagcgtctcttatgcacttaccagcaatatatatattaactcatgatagtataggcgttggagaagacggacctactcatcaacctattgagcacttagcaatgcttagaagcataccaaacatcaatgtgattagaccagccgactcaagagaagttgtttatgcatggcaagcagctcttatgagcaaagaaacacctacatgcttgatactttcaagacaaggactaaagcttcttgacaattcatcagagcaagcactaaagggagcttatatagtacacaaggaagcaaaggactcaattgacgctataattatagcaacaggttcagaagtagctttgtcaatagatgctgcaaaagacttagaagcaaagggcaaatctgtaagagtagtaagtatgccatcacaagagatattcttaagacaagacaaggcatatattgaaaaggtattgccatcaaatgtaaaggcaagagtatcggttgaagcactatcaacaatgccttggggcaaatttgtaggcctagatggtactgctataggtattgatagattcggagcatcagcgccaggcaaggtactgtttgaaaagtatggcattacaaaagaacacgttgaagaagaagtaagtaaacttatagaaaaatagttaataattataaaaaccctctttactcacaattaaggtgaccccacaaagttggacctaataccagagttagaattaaactagctctggtatttctttatcctatcctacccctagggataggaaatttttatgctgcattcttctttctatattctactggtgataagtatcctaatttttcttttatcctttcttcgttgtaatattttatgaaatcttctattgtttgttttaagtgttcatatgaataaaatttgtttccgtaatatatttcttgttttaatattccaaagaagttttccattggtgagttgtctaggcagttgccttttcttgacatagattgggtgataccgttagcttctagttttgatgtgtattgtttcacttggtatgcccagccttgatctgagtggaatattcttttttctttgcttttgttagttacctttattgcttcgtctaaggcttttaggattggttctattgttggttgttttgatatttcatagcttagtatttcactgttgtacatatctaagtatggatttaggtagagtttttttatttgataggttcctgttttatctttttctaaatacttaaattctgttgtgtctgttgttatttgaatgtatggcttttctactttgaaatttctttttatcttattgtctgctatttttcctacctggcctttgtaggatgagtattttcttgatttccttgaaaaagattttacttgaagttttagattttgaactaatctttgtactttctttttatttattattagtcctaatctttttaacatagctgttattcttctgtagccatagtttggattgtcttttctgatttttagtattttatcttctatttctttatctttatttggcctatttaagcgtttttgccaatacatgtatgttgattttggagtattgaagtattttagcaagtcttttagtttgtatttacttcttaagacttcaattgtttcagcaattgtcttatttctgtatctgtcatttgagacaattctatctttttttttattgcatcattttctagttgaagccaatagtttttttcttctaatttctttattttttcttttaattgtgcttgtgttaatgattcgttttctgaatttgttatgtttgctgatgattctactttagtgttttttaatttctttggggattttgacatttttgaagatcttcctctctttttagaactcagtccttctacgcctttttttctaaagtcatttacccatcttgttatcattgatggattgtttatctttaattcatttgctaggctttgataggacatttctcctgttaagtacaagtttaccacatttaacttaaattctaaagtatattgtgtattttctctctttacttttagtccctcatagccttgtgttttatatgtatttacccaggtttttattactttttctgagggtatgaaatatttatctgataaagatttatatgagatattggattctaaatattcttttactaatttaattttgaattctgtgctatattttgccattaaaaaactgacctcctttagttagtttttaggtctaacttttgggggtcagttcacaatgagtagagagggtgtttttatgcatgaaaagctcatacatctgtatgagctagttttgtaattaagacaaattattcttctgagaaattatcaaagtaacctttgatgtaaacgataggagtgcctttgtcaccactaccgcttgttaagtcacaaagtgagcctataaggtctgttaattgccttggtgttgttccttgtgactccatagatccaactagattgctacctttattgtgtattttttctttaatagcttcttctagttcttcaccttttaatcctgcaaagctattgtcagcaatgtatttaagtttaatctcatttggtgtacctttaagtccgtctgtaaaggcaggagagacaacggggtctgctaactcccaaatcttaccaactgggtctttgaaagcgccgtcaccataaactagtacttctatctttttaccagttttctcttttattttttcttgtatagcgtaaactattttctcacaatctcttgggaatagctttatcttattctcagtggatttgttagagccgagtaggccatatttctcgttaaagcctgaaccatcgattgatgagtttaatatttctgacagacagaatatcttttctgcacctgcatttttaagtttctccttagttctaacacgagtgtgaatgctacaaactagtatgttcttagtgtatttaaggatgtttctttcgttatttccgaaaagcataacagcctgtgcacctgcttcttcaataagttctttgtagtattctatatagtcaacatttgtaaatatatgctttgtatcagggaaacactttttaaattctttttcttcgataatttctccatagggattgatgtcaaagttatctagctcatctggatcacataggtgattaccgacttcgtcatgtgggtagctgaacaatacatacacctttttaaaagctttagctatgccttttaagcatattgcaaatctatttctactcataataggatgtataagagcgacctcatcacagttaaatttattcttaacatcatgagttatgtcatcaatactagcaaagttgttcatagatttagcaacgatggattcagttaagccaacaacatctctatcatcaatattaaagtttccagcttcacttgcttttagtattgtatctacagcaatctctactatatcgtcattagcctttatgatagggcaccttaagcccataacttttgttccaacatatcttttcatagtgttctcctttggaaatttctaatttttctatctgttattaaaacaggtactttcatatcaaatctgcttataataactctatatacataaagttcttcaaaatttatagcaataatcttagttctcttatcaagtgaggataagaatctgtcgtagtatccgccaccgtagcccattctgtatcctctgtgatcaaaggcaacaccagggactataaccaagtcaagtttgcttctatcgaagttttctttcatttctggttctaatataccataagttcccttcttaagttcatcaaaactttttatttcttgcaaaaacagacttctgtcttctttgattgatatcggcaaaatgattcttttaccacttgcaagggaagttttaataaagtcgtgagtgttaacttcagtaccaaagcttgcaaaggccatgatggtattagcattttatattcaactgttgacatcaatttatcaataattatctttgacttcttatgtctatcttcttctggagatatttttcttgtatctaagagctgagctctcagttctttcttgttcaaagaaattcccctttatttttaagtgttttgtattataatgtatatgtatattctaccacaaaatgattataaatgacaagaggtgttatttttgataagattagaaaacgttagcaaaagtatggagaagttctgccctaagcgatataaacattcacattaaagcaggtgaatttgtttttgataggaccttctggtgcaggcaagtcaactttaacaaaattaatattaaaagaaattaggcccacaagcggcaagatatatttaaacaacgaagatataacagatgttagcaatagaaagataccttatattagaaggtacataggagttgtatttcaagactttagactattgcctaacaagactgtatatgagaacgtagcttttgctatggaaataattggcaagagaccaagagagattagaagaagtgtaccaatcatattaagcatggttggcttaagcgataaagcaaagtcgtatccacatcaattatcaggaggcgagtgtcaaagaacagctattgctagagccttagttaataaacctgatgttattatagctgacgagcctacaggtaaccttgactctgatacagcgtgggaaattatgaatcttttacaagatatcaataacagaggcacaacaattgttatggcaactcatgcaaagaatatcgttgatgaattaaaaaagagagtaatcactttaaaccatggaaacgttgtaagtgatgtgtatgaaggtgggtactactgtgaaatttagagaaatgataaacataattaaagatggatttaagggtataataagacatttcagcatggcattcgcgtcagttatatctattctttctgtgcttttaattcttgcatcggtattgattatagttttgagcgtaaataaacttgttggagacacaaaagaaaggattaacgaagtaaaggtatttctgcttgatggcgttgatgatgagggcgttaaagatcttgaagctaaaattaaagacatatctggagtaaaagaagtaaaatttatatctaaagaagaaggactagaaagcatgtttaaggattgggagaataaaagctacttgtttgaagagtataaagaggacaatccacttccaaatgcttttaaagttactgtaactgatattgaaaatattaatgatgtggctaaagctattggcaatttacctggaatagaaatggttagatacttatctgaagaagtagttaatctattgaagatctctaagtatatgcaaattggtggctttggattagtagtagctcttatatttatctcgatattcttgatatcaaatactataaagctatctattaattcaagaagaaaagagatagagataatgaagtatgtaggcgcaactaataactatattacgggaccatatgtatttgaaggcatattgattggccttatagcttctatacttgcaatgctgttcttaaagtttgcgtacacatatttctactcatatctaaatggttcaagtagtaatttgtttagaaacgcactagtaagcccagaaagtataatgaaagatttcggtataatcttcataacgctaggtgtaggcataggtatattaggaagccttaactcactaaagaaattattgaaagtttaggtgattatttgtttaaaataaaaatcgattcttattctattaataattgctttaagttttcaaagcgtctttgcagcaggcaagttaaagaataagaaaaatatcgataaaaattaatgaaactaaaactgaaattaatattaagaaaaagagtctagcagtgtatatagcaagattttaaaatatggaaacaatatttcttctataaatctaagcataaacaatctaaataagtcgatagaagatactgagattaagatcaatcgaaagaatgaagaacttcttgacgcacaagaaagacttaaagaaaatgattccttatttagaaaagaataagaagtatgtatatgaatactgatgacaactacatcactgtattactttcttcaaagtcacttgacgattacttgtctaagaagaatatggttcaaaggatggctaaacgtgacaagaagcttatagaaagtattgaaagcgaagtagacaatatagttgcattgaaaacatctttagagtcactaaaaacatcacaagttgataataaaaataagttatctagtcaaaaagatgaagtttcaaagctaaaggttgaacaagaaaagcaatttaagattctacaaaacgatattgaaaaagctaaaaagagcttagcaaagcttgagaaagactcaaggaaccttagtgcacaaatattaaagttgcaatcaaacacgaaaaagtttgttggtggcaagttaggatggccacttcctggatacacaagaatcagctctccatatggctacagaactcatcctatattaaaaattactagattgcattcaggtatagatatacctgctcctaatggaacaaatatagtttctgctgcagatggtgtagttatatttgcaggtaagtatggcggctatggcaatttgattttagttgaccacggcggcaagattgtcacaggctatgctcactgttctagactacttaagagtaagggagctaaggttagaaaaggagaagcggtagccaaggttggatcaacaggattttcaactggtgcgcatctacattttgaagtaagaaagaatggtaattttacaaatcctataaattgggttaggtagtttaaatattggaggcagaaatgaaattaaagaagacattaataacattattagtgctagcattattcttagtaagtaatcttatttcatataatgtcggcagcactaataataagactgtcgataaaaagatagtggctaaaaaagaacttggagaaaaacatagtaataaattaaatgatgagtatgttttagagagaattaatgaagtcaaaaagatgatcgacaaaaattattacaaaaatgctgacgattatgatgttcttataggcatgctaaagggcgctgtaagcagtttaaatgacccttactcatattatatgacggaagaagaatataaaaagtttaatgaggaaactgatggagaatttgcaggtcttggtatatatgtaagcggttcaatagatgacaatctaattactgtagtcgcacctatgaagggcactcctgcagatagagccggattgaagacagatgataagattataaagataaatggtcaagattttactgctgacaagatggatgatgcagttagcataaatgaggaaaaccaggagaaaaggttaagataactattcttagaagagatgaaaatggaaaggctaaattcatagactttgagatagtaagagattattaaagttcaaacagtttcgtcaaaattgctaaaaataatattggatatattcatattacaggttttgatactccaacatataacgactttaataagcagtataaagaacttaaaaacaaggaatgtgtaaacttatactagatttaagaaacaaccctggaggactactaagcacatctacagaggtagtaaatacatttttagatggcggcttgataatgtatacacttgataagcaaaataataagcaaactataaatgctactaagggtgctgacgatgtaaaaatagccgtgcttgtaaataaaggatccgcttcagcttcagagatagttgcaggtgcattgaaagataggaagagagctactataattggtactcaaacatttggtaaaggcattgtacaaactgtatataatatgccagatggtgaaggcttaaagcttacaacaagtgcatactatacaccaagtggagttaatatacatggaaaaggcatagccccagatattaacatagagctaaataaagaagtaaaatcgatatctatagacaatcttaacaaagataatcaaatacaaaaggctatagaaatattaaataaataggagtaaagacatggcaaaagaatttgaatacgaaatattagaacaactaggagaattttccaacaatggaaaaggcatgattaaagaagtaaatatcatttcttggaatggtgctgatggtaaagttgatataagaaactggagagaagatcatagcagaatgggcaaaggtatatctctaacacatgaagaggcaagaagattaagagatttattaaatgatatagacttaggttcagatgatgaatctaatgatgaagaaatataagatatatagatgaaaaaatatatatcgttatttgctatactcatctcaatattaatacttagtgcttgctctaacggtccactatttattaaagatagtgacaagcgttatggctttgatgatattgacactccaataaatgacacagaggagcttgaattaagtgagaatgcagagatttcttttgtactaaggaagattaattacttaaaagaaatcaatgtgcaaaacgatagagtagaatttgataaaaacgatagttcattattaagcatggttattaagccatgcttaactgatgatatagaggtttcttcagtagtatataaaaagggtaagtttcatatcttgctcaagtctaagaagaactcaaaaaaggtctgtactccttatattagtatcaaacttcttaacaagcttccagatgatatagaagctgacgattttgtcattgataaggaaaacattaaaactattgatataaaatataccaaggataacgcaattaactatgtaaaacaaaagtacaatttgattgcaaacacaccagattctgcagaccttatatacagataaagctatatggttaattaagtataagtttgtatatgataagaatgattatgagcatccaattaaaatatcaacattaactttgatgccaatcagggtagagtgttatcggttaatgaagaggatatatctaagtttattgataatggaactattttgctcttaacacaaagtctgctttctactacaacaaaaacttgacaacaataataatatttacatctttgatattaaaataaagagtctaagaagataatgtcttttgatggatcgataaaatccatatataaaaataatggtaatgacgatatactaattaactttaaagatagctcttctaagcttagaagcgttgtttattttaagaataaaaagagtttaagtttataaattacaaagatgacttagatattgtagatgcaaacttcaagggtagtgatactttgcttatagttagcaagggaagcatcaatgaaacaaagatattagaacttgatattaatgatgagaactacatgaacttatttagcgctgaagacaatattatcagagcatcatacattggcggatactatgtttacttatcaaagtacgatgtaaatcaaatgttatacattacaaaagatttcgaagattatgactttatagatgaggtagaaaattattactatagtgatgaaaactcctttgtatataggaatgataatgaaatagaaggagtaagtttatatgtatataatcttaatgagagattttataagaagcttataaaggagattacttgtatatagataagattaatgataagtatatacttgctaaaaagatacaaaggcagagacttatgatttattatcatgcaaattggataataattttaaggaagagttttatttaaaatgttgacaatcttaatctatatttaacaaacgatttaaagaaacttttaagagcactaaggtaatagataagaattatacaaagaacattatttacgagataaatattagtaaaggtgaagaatagtgaagtttaaattaaagtcagattataaagcaactgggcatcagcctaaggctatcgattcattagctaaaggcattgaacaaggttataaagatcaagttttgctaggcgtaacgggttctggtaaaacttttactatggccaatattatagaaaagacgcaaaggcctgcactagtaatcgcgcacaataaaacccttgcgtatcaattatatagtgagtttaaagaattctttccagagaattctgttgagttttttataagttactatgattactatcaaccagaggcttacgttgcatctactgacacatacattgcaaaggatagtcagataaatgatgatatagatgagcttaggcactctgcaacagctgctttatttgaacgtaaagacgtaattatagttgcatcagtttcgtgtatatatggcttaggagaccctattgactatgagaaattgatggtttctttaagaccgcaaatgcaaatttcaagagacgatgtaattaagaaactaatcagtatacagtatgtcagaaatgatcttaattttataagaggcacctttagagtcagaggagatatactggatatctttccagcatcagaaaagaccaatgcttttagaatagagttctttggagatgagatagataagatacttgagattgactcattaactggagagattgtaggtactagagtgcacgtatcaatcttcccagcatcacactatgcgacaactgatgataaaattaagaatgcgattgagagcataaaactagagctagatgatagacttaagtggctacacgagcaaggtaaactcgttgaagaacaaagacttaaagaaagaactaactatgacttagaaatgcttaacgaaatcggcttttgctcaggtatagaaaactattctagacacttatcacaaagaaagcctggatcaagaccatatactttgatagactactttccaaagaatttcataacttttatagatgagtcgcatgtaagtgtgccacaaataagggcgatgtacgagggagacagatctagaaagacttcattggttgattatggctttagacttccaagtgcactagacaacagacctttaaagtttactgagtttgagtctatgatgaatcaggtgatatatgttagcgctacacctgcacaatatgagattgataagtctaaaaatacagttgagcaagtaataagacctactggcttacttgacccaatcattgaagttagacctactaaaggtcaaattgatgacttaataaaagaaattaagattagagcaaagaaagatgagagagttttaataacaacccttactaagaagatggctgaggacttaacaaaatacctagaggagcttggcatagcagttacttatatgcattctgacgttacagccatagatagaatgcagataattaaagacttaagagagaagaagtatgactgcttggttggtataaacctacttagggaaggacttgacttacctgaagtttccttggtagcaatacttgatgcagataaggaaggctttttgcgtagtgaaacatcattagttcaaacagcaggtagaacagctagaaatgccaacggacttgtaataatgtacgctgataccatcactaagtccatggaaaacgcaataaatgagaccgcaagaagaagaaagatacaaagtaagtataatgaagaaaaccatataactccaaagactattaagaagtcgattagagatgtaattgaagtaactaaggctatggatgatggtgaaaaatatacttatagtactaagggcgtacaagataagattaataaattaaagaaaaagatgaacaaggcggcaaaggatcttaattttgaagatgctgctaagtatagagatatgatagaagagttgaagaaggaggaactattcattggagaataaaataattgttagaggtgccaatgaaaataatttaaagaatttagatattgagataccgagaaataaattcgtagttataactggactttctggatctggtaagtcttcgcttgcttttgacacgatatatgctgaaggacaaagaaggtacgtagagagtctttccagctatgcgagaatgttcttaggcaatactactaaaccaaatgttgagtttataagtggacttagtccatccatatccatagatcaaaagactacaagcaataacccaagatcgacagtaggtacggttactgaaatttatgattatctaagacttttatacgcaagagtaggacagatatattgtcctagttgtggcaagaagattacatcacaaactattgatcaaattgcagatataatcatgagtcataaagaaggacaaaagatttatgtattagcaccaatcgttagaggacaaaaaggacaacataaaaaaattttagaacaaatacaaaaagacggctttgtgagatatatcttagatggagaaatgcacgacattactgatatgcctgagatagataagaacaaaaagcatgacatagacatagttatagatagactagttataaaagatggtatattatctagattaactggttcacttgaaacagcaacacattattctaatggacttgtaaagataaactatctagatttgtatgaaaagtcttattctactaagtatgcatgcattgactgcgggatatcatttgatgagctatcaacaagattattttcatttaatagtccttttggcatgtgtgaaaggtgcaatggacttggatactttagaagtattgacaaggatttagttataccagattattctttatcgttagaagaaggcgttatagagccatttaagagcgcaaaaaaaggcacttactattataagatatttaagtttatactagataaatataattttaaagaagatgagccatttactaaagcgcctaaaaagatgattgacgatatattaaatggaactgattataatgtaaagtttaaataccattcattgtttacaaaaacatcaaaagatttcaacaagaagtggccaggtgttttatctgtcatgatggatagattaacaaattctatgtctcaagcaattagagataacactgaagaatatgtagaagaagttgaatgcccagagtgtcatggagcaagactaaagaatgaagcacttgcagttagagttggtgacttaaacatatatgaattcacacagcttagcataaaagatgagctagaatatataaataatttaaagctaaatgatacagaagcgaaaattgccgaacagatacttattgaaattaaaaagagactttcattcttaataactgttggtcttgactacttaaatctttcaagaatggctaagacgctatcaggtggcgaagcacaaagaataaggcttgcaacacagataggatcagccctagttggtgttatatatgttttggacgagccatccataggtttacatcaaagagataatttaaagctaatacaggcacttagagagctaacagatgcaggaaatactttacttgttgtcgagcacgacgaagagattatgcatcattgtgatgagattatagatattggaccaggcgcaggcattcatggcggagagcttgttgttcaaggcaatataaagaaagttatgaagtgcaaaaaatcaattacgggcgattatttatcaggcagaaagaagatccctgtaaaggatgaatacagaaaaagtgataaaaataatatcttgaaagttataggagctagcgaaaacaaccttaaaaatatagatattttagtgccattaagtgagtttgttactgttacaggtgtatctggctctggaaaatcaacacttgtaaacgacattatatataaatctcttgctcaaaagataaataaatcaaagtataagccaggtaagagaaaagctgttgaaggcattgaaaatatagataaggttgtagtaattgatcaaagcccaataggcagaacaccaagatcaaatcctgcgacatatactggcacttttgatcttataagagatgtctttgccatgactcaagaggcaaagatgaggggctatgaaaagggtagattctctttcaatgtgaaaggcggtcgctgtgaagcatgtaagggcgatggtatattaaaggttgagatgcatttcttaccagatgtctatgtaccttgcgaggtatgtaaaggtaagagatacaatagagaaactcttgaagttaagtttaaagataaaacaattgccgacgtactagatatgacagttgaagagggacttaaattttttgaaaatcaaccgcgtattgcaaagaaactacaaacgctttatgatgtaggacttggatatattaagatcggacaaagttcaacagaattatctggcggtgaagctcaaagggttaagcttgctacagagctttcgaagaagtcaactggtagaactatatatatacttgatgaaccaacaacaggtctacattcacatgatgttgctaagttaataaaagttttaaacaccttagttgaccaaaataactctgtacttgttatagaacacaacttagacgtaataaaacaatctgattatataatagaccttggaccagaaggcggagatatgggtggaacagttgttgcgacaggtacacctatcgaagtagcccaaaatgaaaattcatatactggaaaattcttgaaagatatatttataaaggaaggaaagctagattagattaaatcagaggactatagggtatattactaatacggaggtatttatgaaaagaaactttcttaaaatataataatattcttattagttcaaatattttcttgcaacttgtaaatgttaaagcaatatctaagcctgagcatagttttgttaaagatggagcaaatattatctcacaagatacagttgattatattaatgaaactaatgagaagatgaaggactatggcagtcaagtcgctgtattgacgctcgatagtttgaacggtagagatatagaatctctttcgaacaaagtatttagagattggggcataggagacaagaaaaagaacaacggagtacttttacttgttagtttaaacgacaggcaagtaagaattgaagttggttatggtcttgaaggcgcaataaatgatgctagagctggtagaataataagaaatataattagaccaaactttcaaaataaagattatgataaaggaattagagatgccttcgatagtatcatttattatataggcaaggaatataatgtagtgtttcaagatatagatattaataaattggaacatgcggatgatgattatataagtatacctataataatatttgcgataattattttatacttttaacatctagactcaatagatatagatatatctttggtagaagaggtagaatgtttagaaggcgtagaggcatttttgatgacgatgatccatttggaggcttcttcggaggatcaggagggtctggtggatttggtggcttcggtgagtccggcggaggctttggaggaggctcctctggaggaggtggagcatcaggttcttggtaaattttagataaaggagaattgaaatggaagaaaaaagacaaagaagaggtagattttcaccacttttaattatactaggaatagtaattgcattaggtggtttgatagcatttaagtataatggcctagttaacaaacaggagaacgttaataaaacttgggcagaagttcaaactcaatatcaaaggagagctgatcttataccaaacttagttgaaacagttaagggctatgcaaaacacgaagaggaaacacttgaaaatatagctaaacttagaagtggatatacagatgcaaaaacacctgaagattatgaaaagcttgatacagaactagcaaagaatattaacattgttgtagaaaactatccagatttaaaagctaatgaaaatttcctaagtttacaagacgaacttgcaggaactgaaaacaggatagcagttgctagacgcgactttaataatgaagctacagagtttaataaatctgttaggacttttcctaacaatatctttgcatcaatcttaggttttgataagtttaaaacattcgaggctcaagcaggagcagagaacgcgccaagcgttaattttggcaaataatccagtaaaagtcaaactttgactatgtttgacttttattgtgtatttaagtaaaatatttatttacttataacgatattagtgatataataacaacataagtaattttaaggagtgaattaagtgaaagttaattttgacaaaaagaaaaataaagtttactttaatgtagacgttgattggaaggaatttgaaccaaaatagacgaagcttataagaaaataagatcaaaattcaatattcctggatttagaaaaggtaaagtacctaaaatgattattgaacaaaactatggagttcaagtattctatgatgaagcaataaatataatgcttcaagaaatctatccaaaagctttagaagagttggatcttaaagttgttgatcaaccagatgttgatgttaaagactttaaggagaatgaatctataaactttacttttgaagttgaagttgttcctgagtttgaactaccaaactttgaagagattgaagtagaagatgttaaagaagagtttgataaagaagtagttacaaacgaaatcgaaagattaagaaatgaaaatgcaagatatacaatcattgaagatagaaagactaagaagggcgacatagttaagcttgactttaaaggttatgtagacaatgaagcattccaaggtggagaagctaaagactacgaacttgaaatcggttctaactcgttcatacctggttttgaagatcaattagtagatagagctattggtgaagaatttgatgttaatgttaaattccctgaagagtatcactcagaagacttaaaaggaaaagatgctaagtttatctgcaaaattaatgagataaaggtaaaagaactacctgagttagatgacaactttgcatcagacgtttctgaattcgacacattaaaagaatttaaagcagacttaagaaagaaattaaaggctcaatttaatgagatggtagatgcacaaagagaaaataaggttcttgataaagttcttgaagaaactaaatttgatgttccaaacagaatgattgaagatgaagttgaaaatgaacttagaaacttccaatatagactacaagctcaaggcttaaattatgatgactacaagaaatatactggaaagactgatgatgaaattaaagaaacattcaaagagccagctgaaaagagagttaaattaggtttaatccttgaaaaatatgcaaaagaaaataagataaaagctactaagagagattatgacaaagaacttgacaaattagccgaaatgtataaggcagaagataaagaagaatttaagaaaacaatgagtgaaggctctctagaattttagatagaggcatattaaactctaaatcgatagacgatattaagaaaaagtaaaatatatttaatggggtgattaaatggcattaattcctatggttgtagaacaaagttccagaggagaaaggtcatatgatatctactcaagacttttaaaagaaagaattatatttttatcaggcgaaattcataatgaaatggctgaccttatagtcgcacaattattatttctagaagcagaagatcctgataaagatattcaaatttatataaattcaccaggtggatcggtatcagctggatttgccatatatgatacaatgcaatatataaaaccggatgtatcaacaatatgcgttggcctagctgcgtcgatgggagccttccttttggcagctggtgctaagggcaagagatatgctctacctaacgctgatattatgattcatcaaccacttggcggaactcaaggacaagctgaagatattcgcattcaagctgaaaaaatacttgaaataagaaagagaatcaataaaattttgtccgaaaagacaggacaaagtatcgatattattaatagagatactgatagggactactacttaaatgcagaagaagcagttaagtatggtttaatagataaagtaatggagaaacactaatttatgtctaaatatgatgaaataagatgttccttttgtggtaaaactcaaaatgaagtcaaaagactaatctcaggaccaaatgtatacatttgtgatgaatgtatacaagtatgcatggatatattggaagaagatcatttattaaatgatgaaagcattgatttagaagatatggttcttcctactccgatggagattaagaagtctttagacgattacgtagttggtcaagatgatgcaaagaaaactttatctgttgctgtttataaccattacaagagaatcacaaaagatacaagtgacaaagatgttgaaataaagaagagcaatatattattgttaggaccgacaggtagtggtaaaacgcttcttgctgaaactttagcaagaattttggatgtaccgtttgctatatgcgatgctacgactcttactgaagctggatatgttggagaagatgttgagaatatcatattaaagcttatacaaaatgctaactatgacctagatagagcagaaagaggcatcatctatgttgatgaaattgacaagattgcgaaaaagagtgagaatgtttcaattacaagagatgtaagtggcgaaggtgttcaacaagctcttctaaagattctagaagggactgtagctaacgttcctccacaaggaggtagaaagcatcctcaagaagagtttatacaagttgatactagcaatatacttttcattgttggtggagctttccaaggtttagatgatataattgctaagaggacaaataaaaagtcttatggatttggatcagaactatttgataaggcaaaacaaaagtctgaagcacttaagcatgtcgagagtgaagacttaatgaagttcgggcttattcctgaactgattggaagacttcccgtaactgtaactcttaaagagctaaacgaagatgatttagttaaaatacttacagagccaaagaatgcattaattaagcaataccaagagcttataaggatggacggagcagagcttgagttcactgatgatgcagttagaaggattgcacaaaaagcaattgaaatgaaaactggtgcaagaggacttagaagtattattgaaaaagttatgcttgatataatgtatgaacttccttccaagaaatataatggaactcttaagattgatagttccatcatagatggaaagaaaaaacttacttatcaaaacaatgataaggataatgaagaaaaatcgtttcataataaagctaaggcttgatatatgtagcgcaataaggtcggacaaactagttcgaccttttattaaaggagaaagatatggataaatatgatgaaataattgataattattcattttagatgataatgatgaaaatactttcaaagtacccattgtttctattaacaatataaatattgtgcctaataactactatagtgttaacttagataatgaagaccttgtttctgcaattgctaaggcttcaaatactaatggagttttgcaatatttcaacttaaggcaaatagaaagtctatttcaagtataaagtcagtgaatgaattaggtgtattagctgagatagagtctatatcgccaaataataaatttatgaagatgaactttagaacgctttcgaaagtttatttaactaatgtctttaagagtgaaggtataaattatggccacctagttaaattaaatgatataaatgattattcttttgataatcctgagagtaaatcttattacgaggtaataaatagtgctttagataagctaaatgcattgattatggatagccaatcaagtaaggatagaatagttcctaataagattgactataatattttctagatagtatattctcaaggcttgatattgataaaaacttactcaagagtatttaaatgctgttgataagaaggaaagaactaagattgttattgatactatcaataaatctgttgtgactattgaggttttaaagacacttcaagacaagactaaagaggccatggataagaatcaaaaagattatatactacatgaacagcttaagattattaaaaatgagcttaatgctgataagtcaggtgcgaaaaacatatttgatgcatacagaaatgatataaagaaacttaaagcacctaaagaagttgaagagaaggctcttaaagagatagataagcttgaacaaactccactaacatctcctgactatccttcaacactgcaatatatagagcttattaaagacttaccttggaataaaagaacggatgataccaaggacttaaagtatgctaaggagatgcttgacaaagatcattacggtttaaaagatgtaaaggataggatacttgagtatctagctatacttaataatactaaggccataaaaggctctataatatgctttgttggacctccaggagttggtaaaacatctattgctaattctattgcaaatgcaacaaatagaaattttgttagaatgtctttgggaggcattagagatgaggcagatattagaggccatatgaggacatacgtaggatctatgcccggtagaatcatatctttaatgaagaaagcaaagtcaaagaaccctgttttcttatttgatgaaattgataagattggacaagattttagaggagatccatctagtgctttgctagaagttttggatagttctcaaaataaagattttacagatagatacttggagcttccttatgatttatcagaagtactatttataacaactgcaaactcgcttgatacaataccagaagcacttttagatagactcgaaattataaggatagatggctatactgatgaggaaaaattaaatattgctaagaaatatttacttcctaaatcattggagaatgctggtatcgatagtgatgcaattaaatttactgacgaagctttatataggcttatcgataattatactagagaatctggagttagagagctcgaaagaaagatacaatctataattagaaaactagtttataaaaatacatggatgataagattgttaaaagttgatttaaagactgttgataaattactagaaggtcctatatttgaatatgacttagttgataaagaaaacagcgttggtaaagctgtaggtcttgcatggacaagggtaggaggagacactatcaacgtagaagctcagcttatgcctggagatggcaagctaaacatcactggtaatcttggaaaagttatgcaagagtcatgccaacttgctataagctacttaaaggcaaattatgaatactttaatattgacaagaaaaatttaaagattttgatatccatatacatgttccagaggagctataccaaaagatggtcctagtgctggcataacaattactacagctatactatcagcactatgtgataaaaaaattaacagatactttgctatgacgggtgaaattactttacttggcaatgtacttgcgataggtggactaaaagaaaaggcacttgctgctaagaggatgaagattagagatttgatcttgcccatggagaataaaaaggactttgaaaaactaccttctaatataagggagagtctaaatgtacattatgtaaataacttcaaagatcttagcaaaataatatttgtagatggtgataaagatgcttaagattaatgagcctttcttagaaaggatggctgttgatgagaagagttatcctaacgatggtttaaaagagatagttttagtaggcagaagtaatgttggtaagagttcatttataaatgcacttactaacagaaagaagcttgcatatacatcatcatcacctggaaagacaagaactataaacttctacaatatggacaataaatttaggatagtcgacttaccaggctatggttatgctaaaatatctatgaaagaaagagaaaagtggaagaagattattgaggagtacttggtaaagtccaaaaacattgctcttatatgtcaaattatagatgtaaggcatgagcctactaagcttgatatgatgatgtacgactatatattatcaacaggtagtaattatttaataattgcaaataaacttgataaattaaagtcatcacaagtattaaagcagctaagcatcattaacaaagttttgcataatcttaagaaggacgcactaatacctttctcgtctcaagacaagaggggagttaaagaagtgctagctaagtttgaaaatataatttaataaatataaaataaaggcgaccatactctatgatcgcctttattatgtattaaatacatttttttaagccaatgattggctttaatttgcagtttacagttttgtgaacatgtccttgccaactccacaaactgggcatacccaatcatcaggaatatcttcaaaagcagttcctggagctatacctccatctggatctcctttttcaggatcataaacgtaaccgcatgcatcgcattcgtacttgtccatcttgcaccctccttcctttcatgttttcatatcatatatatacccaaagaatattatttataacaatatgcttagtaatttattttcacgggtataaataaattagtggaggaaggatataatgtatcaattttacggaacggtatcttctaatattgaaagtgtagaagtatttgttgacagaataattgaaaatcttgaaaattatttacctaatgaaatgatatttaacatcaggctagttcttaatgagcttttattgaattcagcatcgcatggcaatctatatagtaaagataaaaaagttaaattatacatatcgattagtgaagacactataaaactaagggtagaggatgaaggtattggtctacttagtatatgctcaaataaaagtatgtgcgagcttggaggcagaggcttaaaaatagtcgaagctctaacagataaggtatctaaactggaccatggtattaagtgtactatcttttctaaatatcttgatgatacagagtaaatacttgtaattattaacaaaaagtattataataaaaggtagtgtttaggaggaataatatgttaagagaagatttaagaaatatagctatcatagcacacgttgaccatggtaaaacaactctagttgatcaaatgcttagacaatcaggtacatttagagagaatcaagttgtacaagatagagtcatggactctggtgaccttgaaaaagaacgtggtataactatactttcaaagaatacagccgtaatacataacggtaaaaagataaatattatagatacaccaggccatgctgactttggtggagaagttgagagagttttaaagatggttaatggcgttgtactagttgttgatgcttttgaaggacctatgccacaaactaagtttgtattaaagaaagcttttgaactaaacttgccagttattgtatgtataaataagattgatagaccagaagctagaccagttgaggttgttgatgaagttcttgatttgttcatagaactaggcgctgaagatgaagcgttagaagcaccatttatttttgcttctgctaagaagggttatgctactaatcaagtaactatagaaaaagacaatatggatgacttgtttgatgctatagttgagcatataccagctccagagtctaatgaagataaaccattgcaactacttatttcaacaattgattataacgactatgtaggtagaatcggtataggtaagatcgaaagaggagttataaagaatggttcagaggctgtacttgtgaacaagctaaatcctgatatgaagagaaaagtaaagataggtaaattatatgagtttataggcctagataaagttgaaactaatgaacaaaaaggtggagccatagttgctgttacaggtatagaagatatatcaattggagatactatcgctgatccagaatgtccagaggcacttgattttgtcaagatttctgagccaacaatatccatgaacttcattgtaaatgactcaccatttgctggaagagaaggtaaatacgttacatctagacaaataaaggcaagacttgaaaaagaattgcaatcaaatgtttcattgagggttgaagaaactgaatcaacagatgcatttaaagtatctggtagaggagagcttcacttgtctgttttagttgaaactatgagaagagaaggctacgaattacaactttctaagccacaagtacttttcaaaaatgatgaaaatggcaagaaacttgaaccaatggagaaggtaactgttgacgtttcagaagaatttgtcggagctgttatagataaattatcaagaagaaaagctgagctattagaaatgaaagaaaattcagcaggatactcaagacttatatttaaaatgcctgctagaggtttgattggatatagaggagagtttatgactgatacacatggagaaggtatcatcaactccatcttcttaggatacgaactttataaaggcgaaatacctactagaactacaggctcactaattgcctttgaaacaggcgttgcatctagctacggacttaatatagctcagggtagaggtatactgttcattgggccacaaactgaagtttacgaaggtatggttgtaggtgaaaatccaaagggtcttgatattgaagttaacgtcactaagaagaaacaaatgacaaacacaagagctgcaggctctgatgacgccatcaggctaagcccaccaagagtactttctcttgaggaagcacttgaatttatagaggacgatgaactaattgaagttacaccaaaatcaattagaatcagaaagaagatactagacacaaataagagatataaatcaaaaatacaaataagaaatagggagattgcggtggatgtatcgctacaagttttaataggttatttattaaacttgcttttaggcttatttattgttttaaagaaagaaagaatataaagtcaacatggctatggttaatgatactactttacttaccatttcttggctttatcctttatatgtttttggccttgactatagaaagatgaaaacattcgatgaaaagatgacgcttgatcgaaaagagaaaaggatattagaaaatcaaaagaagttttatgctcttactaagtcagaagacttaaactttgatcaaaagagcttattaacttatgcctatcaacaagtgatgctacctttactgattataatgacgtaaaattctattttgatggaaaagataaatttaatgatttatttgaagatgtaaaaatgcagagaaatatatttatattgagtactacatctttaaaacagataaattaggaagaaaattcataaacttgcttaatcaaaagctaaaagagggagtagaagttaggatacttgtagatgctgtaggttctagaagcatcagaaagaagtattttagagaattcaagaagcttggaggacagatagattcgttcttcccattattcttctctaaattcacaaccagattcaactatagaaatcacagaaagattgttattattgatggtacgattgcatacagtggcggctttaatgttggcgatgaatacattagtaaaagtaaaaaatttggattttggagagatacacactttagactaaaaggtgatatagttgaggaatacttaagaaggttcaattttgattatagatttgcgactggtataaaagcagatggtgaatactttaaagatcatgatgtaaatacgctaaacagaatgcagcttgtaacatcaggaccagactcaatgtttgagaatattaaaaacgtctacttaaagatgataagttcagctaaaactagactttggatacaaagtccatacttcatacctgatgattcaatatttgaagctataaggatagctgccttatctggagttgacgtaaggataatgatacctaacaagccagatcacatgtttgtatattgggctactctaagctatgttggacagcttcttgaggataatgttaagatatatcaatacgagaacggttttttacactctaagcaaataattaaagatgatgacatatgtactgtaggtacagctaactttgatattagaagctttgcacttaattttgaagcgaacctagtgttttatgatcaaaagacaaacaagcttttaagtgaacagtttttgaaagatatagaaaagtcatctgtattaactttagagaagtacaacaagagaaagagaattgttaaaataaaagagtcaatatcaagactactatcaccaggactataatagattatagtccttttttatgagttatgataaatataaggataaagctataaaaattatctatgtatatcatataaaaccttgcttaacaattaaaagtgtgatataataactataagcgtgatgcttaaaaccaataaaatttaataggaggtgttttaagtttggataagtttttaacaggcgaagtattgatctcagctgctattgctattgtacttggagctatcattggatatataatcagaaagattttaggcgaaaagaagattaaaagcgctgaaattgaatcaagcagaattattgaagaagctaaaagtaaagcaagccaagaagctaaagagaagatactatcagctaaagaagaaattcacaaactaagaagcgacctcgacaaagaagcaaaagaaaaagaaatcgaactgaaaaaatctgaaaaaagattgatcaacaaagaagaaaatcttgataagagaacacaatcttatgaaaagaaagaagaacaacttaaaaataagatgaactctctaaacaagaaagaagaagaagttgaacaattaattgaagaaagaagaaaagaaattgaacgtgtttcaaaaatgagcacccaagaagctaaagacataatcttggatgaagtaaaaaaagaaatgactcacgaatgtgctgcttatattaggcaagcaactgaagatgcaaaagaagaagctcaaaagaatgctagagaaatcatagcagatgctattcaaaagaatgcttcagactatgttgctgaagttagtgtcaatgttgtaaatctacctaacgacgagatgaaaggaagaatcatcggtagagaaggtagaaatataagaacgctagaaactttgaccggagtagatctaatcatagacgatacaccggaagcagtagtattatcaagtttcgatccaattagaagagagatttgtaaaattgctttggaaaaacttatagctgacggcagaattcatccagctaggattgaagagatggtcaacaaagctaaagtcgaggtagagacagttataaaagaagaaggagaaagagccgttattgaagctggtgtacgcaacttacatcctgaactagtaaaacttttaggtagacttaaatttagaacaagttatggacaaaatgttcttgagcattctatagaagttgctaaaatatcagcaactatagcagaagagcttggagcggacattagacttgctagaagaggaggtctacttcacgacataggtaaatccatagaccaacaaatggaaggtagccatgttgagataggagtaaatgcttgcaagagatataaagaaaacaaagaaattctaaacatcataggttcacaccacggtgatgaagagccaacaacagttgaagctgttatagttcaagctgctgacgcaatatctgcagcaagaccaggcgctagaagagaaactttggaatcgtacatcaagagactagaaacactagaaggtatagcaaattcattcgaaggtatcgaaaagtcatatgctatacaagctggtagggaaatcagaataatggttaaacctgaggttatagatgaagataaaatgcttttaatgagccgcgatattgcaaagcaaatagaagaaaatttggaatatccaggacaaataaaagttactgtcattagagaaactagaagtactgattacgctaaatagtattaaattaaaatgtgtagatgtaatgtctacacatttttgtttgtattaaaatattttacgtaatatgcagtaaaagtatttgtatatagaagataaattcaataaaaatctttgacatttataagaaagggtggtataatagatttaaataaaatgtcgctaaatataaatttagtgacataaatatacaatatcgaaagggcacctaatatatggcaattacacaaaaacgatcctaactataaaagacttttaggatatttaaaatcagttaaaggcttatctattaatactatccaaagttattactacgatttaaaatctttccttaaatttgttgctattcgtttagaaatcttagatcaaaatgatgaatattattatacatctgttactgttaatgatattaaaagcttcagattaatgacctatatgcctttatatcctatgcagatgaagatcttgataatactaactatggtaaatatagaaaagctgcagtagttcatgctctatatgcttacctaatgaaggttaatctaattgataataatgttgctaatgaattagaaatgcctaagattgatcagcgtctacctatatttaactcttaatcaatgtgaaacgctattaaataccattatgaagaatgaaaataatgaaatgcgtaatcgtgattacgctataatcatgttgtttttgaactgcggcttacgtatatctgagctaactagccttaatttagactctattaatgaaaatagatatatcaacgttgttggtaaaggcaataaagaaagacaattgtacttaaatgacgcaacctttagtgcaataaaggattatattgaactaagaccaaaagatgttaaagaaagtgataaacatgccctattcatttctcaaaagaaggttcgtatgtcaaaccgcgctgttcagtatatgtttgataagtatctacttgaagctggtcttgataaaaataagtttacagtgcacaagttaagacatacagccgctacccttatgtacaagtacggctcagttgatataaggtccttgcaagagatccttggtcacacatcagtagctacaacacagatatacgcatcttgataacagtactcttaaaaatcaattgaaaataatccattggccaatagaaaaagtattagagcgaatctaatacttttatttttatatttattataatgatatcttcctgcgtctacaatgtcttgtagcgctatcataaggcctaatttgccttgctctaaggacattgatccttggaagtatgcgatatatggctctctaatagggccatctgctgatatctctatggatgagccgtctataaagctacctgacgccataattattttattctcatagcctggcatgtcccaaggctctggtgttaagaacgagtcaacacatgctgccttttgtattgacttacagaacttaataagaatgtctggatctttgaactttattgcacatactatatctgatttgtgttcgttatactctggtgtgcactcaaaaccaagttttgtaaatacatatgaaaacaagctttgtgtctttaaggcttcgcatactactcttggtgacatatataagccttgaagagttgttctaagtgtgccataagataaaccaagctccttacctaagcctggtgcatataaacggtctgcagctagctctataagatcttttcttcctactaaatagccgccgcctaaactgatgccagcgccaagatttttaagtagagatccagctatgatgtctgcaccaatatctgtcggttcaatactgtcagtaaattcgccataacaattatcatacatgataactatgtctggatgtttctctttaaacttaagcatatcatcttttattgcatgtagattgattgcctttctaaattcatagccaattgacctttgcacgactatagctttagtgtttttagtgattttcgattctaaggcctcaaaatctatcgtatttgcatttaagtctacttgcctatacataataccttttttcattaatgagtcccttaaatcgccaattaggcctatacttttttgtatagtatcataaggagtaccggtaacgtatataaactcatcaccatggtcaagaatcgaagaaagcattatatatatagcgtgtgtacctgaaactatagaagttcttactaaagcatcctctgcattaaagatgtctttgaaaatttcttctatcttatctctacctatatcgccatagccataaccagttgcataataaaagtctgatgctgctagtttatttttgcatagcatgtataacttttatttgattaatctctttattattctcatattctttgtatgtctcacttaattcatcggctgcattattgactaaatttatgacagcatctgataattcgtattgtttataaatattattcattattccaccttttcctaatgtccttatatattgcatcaatagtttgatctatatcgtcaaagtttacatcaatgaaatttgcttcgctttcacgcctaaaccatgttaattgtctttttgcataattccttgacttttgcttgataagttcaacagctctatcataagtaatttctccttgcaaatagcttataagttctttatatccaatagcaagaagagctctattcgaagctatttcttgagtactcatatccttgataatgtctttaacttcatctaaaagaccagcttcaagcatcttatcaactcttttgttgattctgtcgtataaaagagctctatctgtttgaagtatatagataagcttatcgtactcatcattatatactctaaagtctttattttcttcactgtatttattaccactctttatataacttccaaggctctgattatcctaaaagtatcatttacactaagcttttcagcatactttagatcaagctcttttaatttattatataaatgctctttgccaaattctttagcttctgtacttagcttttctctaagtgctttatcttcagcctcactgctaaagtctagtttatataataaggaattgatatatagacctgttcctcctatgattatagggattgtcccacgctcattcatatcactaattagcttttttgccttcttttgatagtcgtatacagagaaattatcgtgtatacttacttcgtctatcatatgatgttttacgccagacatctcttcatcagtaacttttgcagttccaatcttcatttctttatatatctgcatagagtcagacgatataatttctgcatttccaagctttttagcaagctccacagcgacctttgatttaccaataccagttggacccgatataactaagattttttctttcatcattgtatcctgtagaacatcttttcaatcatattcttcttaagtataatcatacttggtctaccatgtggacatgtagttggatacttacacttcttaaggtcttcaataagcttatctatctctatatttgaaattttatctcccgccttaatggcgtttttgcaagcgtatttcataattttttccactttatagtcataaatattagtcttttcctcgtcaagtattccgattatatccttaattaagtctaaactatagttacctccaaatattataggtatgctcctaacaacaacgttgtggtcaggatatatatctatagtgaagccgaacttatttagaagagccatgttttcttttatagtttcttcctcattaacggttagttttataggatttacaccttctataaattgtgaatttaccttagaatttttaaatttttcagtaaattcttcatataaaatcctttcgtgagctgcatgctgatcaatcatgacaacgaaatcattgttgtagtcataaagaagtatgaaggtattaaataaaacgccttctatcttatacgcgtcaagtatattgatgtcatccataagaattctattagtatcattttaatatcatcttcaaatattaatatctcttcataattttgtttagattccttaacattattatttctatattgcaataattttgtgtcatttatgaattctttatcgtcaaaatttggtatatctgcattattttctctagtacctatcacttcatcattactaatctcatcttcatatttagtatagctagaattagcataagatatattactcgaagagttattatcttcttcataagtaattattactgaatcattaactttatcgtcattttctcaactatattaagcttagtctcctcttccctctcatctttttatctgaaaagcaattttagctcaacatcgttatttataatgcgctttagatttgaattaagtaggactagtaactcctctatatcttgaattttaacctcagttttagctggatgtatattaacatcaagcatgcttggatctatatcaataaataagaaaaactgggaatctatttaaaggtatggttgatttataagcttcatttacaagtttattgattgcatcattttaacagttctattgttaatataaagtagttgattcttcttattgcttctatataaaaggttatttgagatatatcctctgattttaaacttatcactctctatattaacttccttcatatttattgccgtatcatagccataaaggctgttaattctttcgtatagactttgattactaaaaggtcaaatatcaccttatcgttactcatatacttaaagccaatagctggattagctatagcaagcctataaagaagatcgtttattaggttagattcataagtatctttcttcaagaatttttgtcttgctggtatattgtagaatatatcttcgactattatggacgtacctttattagtggatatattctcgatccttttactgccgttaaaaaagcttatcttggatccaatctcttcgtcttcagttttacttataagtgtaacattgcttatagccttaatacttgctagagcctcacctctaaatcccatagtgtgtatcttatataaatcatcaacattctcgattttgcttgtagagtgcttaataaaggcaagattaatgtcatctctgtttatcccagtaccattgtctgttactgaaatttttcttttgccgccatcatatatctttataataatatttgtagcacctgcatctattgagttttcaactagttctttgactactgagactggtctttctataacctcaccagcagcaattttttctactgtttcttttgatagtacttttatcatctaatcacctaatttttttgctctttcaattatcttgtttagctcgtttagagcatccattggagtcattgcatttatgtttatatccttgattgaatcaatgtaagacatatacttgtattcatccaagctaatatttgttgtttctttttctttttttctaacgctaagatcttggtattcaagcctatccatcatttcttgtgcgcttgatataacgtcgtcatttatgccgctaagctttgcaacatatataccataacttttatcttgcgcttcgttttttatctttcttaagaatataagatcttcaccatcttcaagtatatccatagatatttgctcaacattcttaaaattttcggtcaaatgtggtatttcatggtaatgagtactaaagatggtcttagcttttatctttttagatatatactcaagtatagcaaaggctatcgacaagccatcatttgtgctcgtgcctctacctacctcatctagtacaatgaagctatcttttgtagcaaactttaaaatctcgtttacctctttcatctcaaccataaatgttgaattgcctcgtgatatatcatctgaagcacctattcttgtaaatattctatcaactatcggaagtttagcttcacttgctgggacaaaagatcctatttgatttaggtataaagcaattgctatctgcctcatatatgtcgatttaccgctcatatttggccctgtaattacttttatatacttattagtatcaaagtatgcatcgttctctataaaggctgtatctttaagattttctctattactggatgtcttgaattttaagaacaagaacatcttcacttatactagctcttacatatttatttttctagcaatgtaggctaaattcacaataaagtcaagataagcaatcttttcacttaatttttaattctatataagctatcaagtaatttctttttatttcgctaaatagttccttttctaaagtttcaaacttatcttttgctgttagtatctctgtttcgagtgttttagctcttcagtaacaaacctttcactattaacaagtgtagctcgtttaataaaatagtctggcacaaggtttaaattcgattttgtaatctcataaaaataaccaagtattttattgtattttatcttaagatttttaatctttgtattctttctgtccttatcttcaagaagcagaatttcttttagtgaatcattttgtaggcttctgtacttatcgagctcttggttgtagttaagctttataatatattcgctatctaatgactcaatggcggtatctataagtttaattatatcttgtaaatcataaaagcaaaattcttttaatattttcatctttaattaaatttaaagcatttacagagtatataatgtagtctttaagccttaatatatcctgcttactgacagtattttcattaactctattagatattctgtctatatctctgatattttaagatagtttcttatgcccgtcatctctatttcattttataaaagtactcgactaagtctaatctttcgtttatatcagaactgttgataagaggtttaagcattgcattcttaagataccttaaacccatagctgttcttgtttcatttaaaatatcaaatagggttttagagttattattataagatgaatctatctctagatttaatctagtttgatcgtcaagaagcattgtttttctcactatcaatagattcaaacttaaagtgttttaaatcattcttttgagtatattctagatattcaataaggtagtaaattgcaattacctttctatactcatgtttatttgagcataactcatgcttttcttttagagaattaataatatcttcaaggttttatcaacattataagttttaacataatttaatgatctcttatttagataactaagaagattttcaaaatcattgtaattttgttaatgaagacttctgcgacattatacttaaatatgctatctataatatcataaatatttccttttaatgaataatcatgtgcgtctatatctccagttaagtaatcacacttaacaattgacacacctaaatcatcaatataaagataaattatatacttattaatctcttctccatttgaagaggtgccaggagtaactattttaacaatgtctctttttacaagcccttgagcaagccttgggtcttcaacttggtcaactataacaacttttttgttcatttgaccaagtttattgatataaagtcaacagccttagctggaacaccacacattggcgccctctcatcaagcccacagtcgcggccagttaatactaggtcaagcatattgcttgcctctattgcatcatcaaaaaacatttcaaagaagtcaccaatcctatacataactatagcatcctgattcttttctttaagttctacatactccctcatcataggagataatttgtctttatctatcttcaactttctcaccattcaaagaaaatgatttaacatcatttattttactttaataatatttccaatatcatcttcactagctttaaaattaactagtttaaattcttcagatcttccagaatagaaattatcatcttttgatgatgtaccttccacaagcacattaagcgttttacctaaatacttttattcttttctaaactaatatcattttgaacctcaataagttttgtagtctagaatttttacatcatctggaatttgatcattcatcttagcagctatagtaccaggtcttgtcgagtatataaaagtaaaagcttgatcatagccaaccttttcaataaggtctattgtatcattaaaatcatcatcactttctccaggaaaacctactatgatatcggtagataaggctatatctcttttaagagacttaataagctttatattctctaaataatcttctctagtatattttctattcataagcttaagtattctattagatccagattgtacaggtatgtgtaaaatggcataagttttctaccccatcaaagcatatataagttcttttgatatatccttaggatgagaagtcataaatctaattctttctagtccatctatcttagcaattttgtatataagctcagtaaatgatacttttgggttaagcgttttaccataagagttaacattttggccaagaagagtgacttccttaacgccactatcaacaagatatttaatctcagataaaatatcattaacttctctagatatctctcggcctcttgtgtatggtacaatgcaatatgtacaaaagttatcgcagccatacatgatatttacataagatttgaacataaactttctgttttgtcctatttttctcttgttcttaagttgatttgatcaatatttacaacttgtttcttactgtttaagtgctcttctaataaatcttctaaaatagctatagaattagttccaaatataatgtctacatgtttaaattttcttctagaaattgcctagatgagtcaatttccataacacagccacaaaccattataatcttttctaagtttttgcttccattaagtgttttaaatcgccaagattgcctaatagtttattctctgcattctgtcttactgcacaagtgttaaatataacaacgtcagcactttccatatcatccacttcaagaaaacctagttttgatagtatccaacttatagactcactgtcacgctcgttcatttggcatccataggttcttatcataaaacttggcaatctattgtatttgttttgataatcaataatatattttcgatacttttcaatatttgtctaactcctaactaattaaaggcacgcctaggcgtgcctttaaaatcaattattattgttcttcagattcagaattttctattgcattttaaataacgcacccatatcttcagataaatcttcatcttgtacaggtaattcttttgtcttagcttccttttcttcttctactacttcagctttttcttcttcatgaacttcttcagctactggagctgcttcttcgttttcatgttcttcttcttgaactggttcttcaagtcttctcttagatacgctaactttcttatcttcatgaatttctgtaatcattacttcaaagcggtcgccaacttttaatacatcttttggatcattaactctcttatgagaaatttgtgatacgtgtaataaagcgtcaacgccttccatgattcttacaaaagcaccatatgattcaatattaacaacttctacttcaacaacatcgcctacatgatatttttcagtaaatactgaccatggttcaggaacagtttgttttaagcctagtgaaattctgttcttttctctgtcaacagataaaactttaacttcaatttcttcaccttgttttaaaacttccttagggtttctgattctaccccatgtaaggtctgttatatgaactaagccgtctactccacctaggtcgatgaaagcaccataatcaacgattctagctacagtacctttgattatttctccttctttaatcttttcccaagcttcttctctcttcttatctagttcttgcttttcaacagcttttcttgagaatactaatcttctcttatttatatcaacgtcaataataacaacgttcaattcttgtccaacatattcttcaagattttctttatatctaactgatactagtgaagcaggtataaatccttgaattccttcgtagctaacgattaaaccgccctttgtaagtgatttaacttttactttaactacttcgtttctttctttaacttcttcaattttgtcccaaacttccatctctttcaacttcttagttgatagaacaacattgccttcaccgtcatcaatctttacaacataaactttgattttatcgccttgtttgtaaagatcttttggattaacatcttcttcagctaggtcttcttttttaataataccatcgcttctaaaattgatgtttacactaacatcgttgtcagttacataaagaacttcgccttcaatgatttctcctcttgaaattctcttgaaagaatcatcaattgctttaatcatttcatctttttttgtttctttagcatcctcctttttcattgtttcatcgtggtttaaattttccattactttaatagcctccttaattatatcatcaggcacagaagcacctgctgtaataccaattttataatctggttttattaaactcatgtccagctcatgaatattttcaagtaagtatgttttaggattaatctcttttgatatctcatatagcttttagtattagagctaaaattcgatccaaaactaaaactaaatcaactacttttgcaagctctctaatagcactttgtctattctcagtagcgttacatattgtgttaaatacaagtacatcatcattatgcttttcaatataacttgcaatctcataaaacttattgtgtataaatgtcgattgagcaaagatagcaagatgatttaagcctgtaatattttagcatcatctaatgttttaagtattttaacattagattttgaacgagatgctatagcttttacctctggatgttccttgtcaccaactataattacattataacctatatttgaatattttccactaattcatgaatttttcacttttatgcaagtagtatcgcaaatattttattattttcttctaaaaacttagtgttttcaagagtttcaccatgcgctcttataataacattgtttgaaaaatattttataattatcaacttttaagacctcgcttagaaaaatcatttattacagtttgattgtgtattaaatctccaactatctcggcgtctttatttagttgtaaaaattatttgccttcttaacagctaatctgactcctgaacaaaagccataatactttgctaaatatattttcattataaagataatatccttttcattaagttttctgagaagtctccttctagttttcaaactcatcaacatttatgatttcacaaaagttattttaccttagtaaaagtttgtagtttgtttcaatatggcatggtactatatcagttccagttcttttagcaattaagtgtattccttcctttgcttttagcagttccatctacatttctcgtaccttctggaaaaatatcaaattattaccacttttagagttctcataacatctttaattgctctaatatcagcttttctctatcaacttttattgcattagaatttacaagcacaaattttatgaacgggttatcgtataattctttttggcaaaaagcaacattatgccctaggttcatggctaaaatactggatcccagtttgatctatggttacctgctaatataaaattgctttcttgtttcaaattttctttacctataatttcaaatctaaataagattttacatattataatcccgatgaatctaattattctatacattatttatcaccattttatatgaaagcataagctcaacagtctcgtcaatattcttatcatctgtattaatttctattgcatcaattgcctttgcaagcggatcaatttctctatgcgagtcatagtcatccctgcggataagatcatttttatttcatcaaaatttacttctagtccttttctatatactctttatatcttcttttagctctcacgtcagcagaagctgtcaagaaaatttataattagtattcttaagcacaactgtacctatatcgcgaccgtccatgattacagatgattttgaagcaatttctctttgtagatctacaagtcgttttcttacatctctatactggcaaacataagaaacgtttttgtctattagttcatttcttattttatcatcaacacaaagtccatcaagaaatatatggttttcaaaataatctatcttagtttcttctgcaagagcaacaacatctttttctgattttgggtctagattattatttaagacctttaatgttaaggctctgtacattgagccagtatccacatagtttatattaagtttcttagccaacaactttgctatagtactcttgccggcactagtaggtccatctattgctatctttaaattcttttccatatatttatcctttcttaaggcttttgttttgcctaaatatatatcagttttatttatatcatcatcataaaatacagaggtccttataacaccttgcatttggtcttctacatacatctcatttaaacatattagtgctgcactatttaggccaatgtatcttgcagctagagctgggtatgccctgtctatatcttgcgttgctgtaaatagtatgcatctaattttatttaagtctaaattattttcccttataatttcttttaataaaattatactttgattaattattgaacttgctgtattttgagctccaaccgctcctctaattactaccatacaatcacctactctatattcatagctgcctgatgcgctgttgaaaatgcaatctgaagattatatccgcccgtcaaagcgtcaacatctaagacttcacccacgatgtagagattctttactagttttgattccatagtcttagggtcaatctcttttacattgactccgccagcagtaattatcgcttcatcaatgctccttaaagacgcgtatttaaggtcaaaatgttttagattattaacaatggcctctctttcaattttagttatatcacaagcttttttatagtaatctaaatctattgattttaaaaatatatttattagcttctttggaagtaaattttcaagcaccttaccaatagatttaagatgttcctcagcaaatatgtgcaagagtttattattaatttgctcatagtttaaagcaggttttaaatctaagaaaatcttatattcttcgtcattatccatatatgaagaagcacttaggattattggaccagatataccaaagtgcgtaaatagcatctctccaaactctttgaatatgaatttattctttttatttactacacttacttgaacatttcttagtgaaagtcccataagttccaatttttcatctctgtttaaattagtattcatagcaacaagcgatgccttaatcggctttatactatgaccaaactgttggactagtctatatccatcaccattagatccagtcaccttgtaactcatgccgccgcatgcaattactaagtttctcgaataatttattgcagagttacttgtaatcttaaaaaaatcatcttctttaataaggtctttaacagtagtctcacttttgaaggtgattttcaaatcttttataagctttttgaataactcaatgatttccatggcatcgtcagatactggaaatacacggttacctctttcaactttagttttacgtcattatcattaaagaatttgacaagatctgtagcagtgaagttatttaatgaactatacataaatttactgttatgaacaatatttttaagtatattttcattatctgaaaattacaaatattgcatctaccctttccagttatcctgagttttctacctgggaatttatttttatcatacagtattacagatttacctcgctttgcacagttaatagcagcaaaagtcctgcagcaccagcaccaactattgctacatcatatactttattcatttatcttcataaggatcaaaatcatatatcataagacttataaatcctttccatttcagttagatagttttgagttgaatcaagattcttaaaacttaaaccagctataatgatatttatcagagataatggtgctacgaatgaatctataaatagtattatgtcattttggcaattaatactaggtcgctattctttgcaatagtcgtatttgtattatctgtaagcgagattactttactaccctttgatttagcatattttagtatacttacagatttctttgaatatcttggataacttatacagaagaatgtgtcctcttcattcatgtgtaacatattttcataaactatgtcatcatctgagttgataattatggcgtctttacccattagttttagataaaagcaaaagtagttagcaagaaaagatgatgttctaagacctagaacaaaaattttctgcttttatttaagatatctatcccctcaaataattttctttatctagatcgtttttagtctctttacatcatgcatatctgttgttaaacatgactctactaactcgtccatagttgttatttgtcttaacttaattctgtcaatatttgatagactgattttagcaagctcatgaatatcatcttttaattccttgtaaccatcatagcctagaagtgtagcaaacctaactactgttgactcactaagaccaagctctaacgccaattttgagctgtttgaaatgttgatttgtgaaaattattaagaatatattcagcaatcaacctctggcccttgctaaagttcatcttgttttgttctatcctatagattaaattttctccatcattttcactcctcttctctaaaatataagttttacaaggtttattttctgatttatgaattctaatttaagaacattatactctgtctgatctaatttttagaaactcgttaatcgaatcatcttccaagcttccttcttcgtgaccaggatatgtagttatcattacaattgctgcatagttaagtttatttataaggcattctaaagatttaatagtgcttaccgatttagtgacaatacttttattcgctctgggtaaatagcccaaattatatagcaaagtcaacttttcatttatatctgataaatcatcatgacttttatttaagtatatacagttttgtatgcatatgaatccaagagagcctttagtgtttccaattgctttcttttgaatatcatataaatatattttgttgtaatttacagcatttttaaaattcttaaactatcatgcccattaccgcaagtcatatctactaatatttttgtttttaaaatgagcttaatagatagtcaataaaatgatttgtgttatctaaatatttgtacttcatctaaatgattcaacttcttctcttgataatcttctaaactctccaacctttaaagtgccaagctctatatcgcctatcttgactctcttaagcattatgactttatatcctagtactttgaacatatttctaacttgatgatttctgccttcgcatattgaaatagatactaaagcactgtcatcataaacgtttagaaccttaaccaaacttggggctgtctttataccatctagatacacgccgctcctaagtttattaagatcattttgttgggtgctttatcaagtttagcgatatattctttttatatttcatttttggatgcattatactattagaccactggccatcattagtcaaaagcaacaaaccagtagtgtttgcatcaagtcgcccaaccggataaattctttttatcttataatcatacaagtccgaaatgattttctttgcatatttatcttttaatgttgtaacatagcctaaaggtttatttaaggcaatatatttttatctttatcgatacttatttgttcgccatttagcttaacaatatcagcctgtggatcaacaaagcatggcatcttttcaacaactttattgttaactgtaactctctttttctataagttcatctgctcttctacgagaaacctctgcattttcagctataaacttatttaatctcactttctccattattttgcctttctatattaacatccatatttaaatctggtaattgtgacaaatcttctaatccaaaacttctaagaaaacttctgttgtcccgtagagtattggtttaccaggtgtatcgagtcttcctacctcttcaattaaaccttttcgattaaggtatttataggtccatctgatttaactgatctaatttttctacttccatctttgtaacaggttgtttataagcaattattgacagcgtttctatagaagcattgcttagattgttctttggttttcatttagtaatttttacataatcataataaatgtctctagttattaattggtagctactgttcatccttattattttaagaccgtcatttgtttcatctaattcacatcttaattttctaattcctcttgtgctaaatctaaatcgatgtcacaaacttcacttattgcctttaaatcaagaggatcgccccatgcaaataataaagacttaattatctgttttaaatcactcacgctcatcacccatgtacgtaaaatttatatctgagaatgtagattcttgttcgtagctaataattttgctttgtattaattctaaaacacttataaacaatgtaataacgtatgctacgtcaacaatatcaggtataaactcacttaattttatttttgttcttttaaatttttaacaatatcatgtgttaccttttaacactatatttttccttttatgctgcttggttcttgcttcaaaacagttctcttattcgttagcaaagaaactaaaacttttgataagttttccaattcaaaatttaaatcaaagtctctacatcattttcaagttcatccataggtttaaaacaaaattgttagactcttcatacattgaattaagatataatgatacatctttaaatatcttatattctaaaatattttacttagttcaagccttggatcttcttctacgttgtctttctcaactggtatgagcattttgactttatttcaagaagtcttgatgccattaaaagaaagtcactgctcatctctacatcaatttcatcagaagtattgatataatcaagaaattttcagtaatttcgtttattggtatatcaaagatatccatcttctctttatctattaactctaagagaacgtcaaaaggacccttatagttacttatctcgacattatacattatacaattcttcctataagatcaatcataaaggacaccataggtatcaatattttatctagagctccgctcataattaacaaaagtattaatatgtatccatatctttcatacctaattaaataatactcatacttaagaggtaagaaagaaaataataatttagatccatctaaaggtggtattggtatcaagttaaagactccaagtactatattgaaccaaaatatgttcattaataattcatagaaaatttattaacattgatatgctttattaaaacaactgatataatagctaaaataaaatttacagtcacccctgctattgatacaaagaatgttcctacttttctatttctaaagttgtttggatttatcataactggttttgcccagccaaacttaaataaaattaagcatatagtgcctatagggtctaggtggtgtagtggatttaatgataaccttccatcgtttttagcggtttcatctccacataaatacgctgcaaaaccatgagccatttcatgaggtattatggcaactagaacagctatggacctaataataaattcttgaaattttaaattgctaagcattatttaagcacctctaaaatatgttttcttttacagatttatttgtaaagacaattgacttttgaagccttttgatttgttcttttgttaaagatttgttagaagatattgtgaataacaagtcacccttagttattttgtcaccaatatttctttcgtttattaggcctacagtgtaatcaattttatcatctttttaagtctgccagcacctaattcatttaacatcatagcgatatttttaagcatatagtggtcaatgaagccatcatcgttagctaatatttcagttttatatctagctttagcaaatttatttgtattttaatgtaagatgtatctccaccttgattgtgtacaaattttaaaacatttcaaaagctgagccattgtctaaaacatccattattttacgttctacttctgtatactcaagttcatctaaatttgtcaagagttcaaaactacatgctttatttcttcatataagtcatcatacaatttataatttccctttaaaagtcgcatacttcaattatttctaagttgtttccgactctctttcccaaaggtttgttcatagatgtaataatgcatgttgtatttctttgaaaagcttttgaaattgcaagcatagctctagacaactctctagctctatcgatatcttccataaatgctccgctgccacatttaacatctataactaaagagtcacttctaaactaaatttttacttaaaattgaagatgctatcaatggaatcgagtcaacacttgcacatacatctctaagagcatataatattttatcagctttagcaatgctttcagattgacttactataaaaaatcctaaatccttagctgtcttttcaatccattcatcactatgattaacttcaaatcctggtattgattctagtttatctagagtgccaccagtaaaacctaggcttctgccactcatttttaaaaatttgtagcccatagatgcgagtataggtcctagaattaaactaagtttatccccaactcctccagtcgagtgtttatctaaaatatatgagtcaatacctttaaagtctatatagtcaccattttcaattatagccttagttaaataatatgcctcttcatcgtttaatccatttaaaaagatggccataagtaaacttgatgcttgataatcagcaattgattcgtccaatataccctttatgaagtagttaatgtcgtctttatttaatacttttttatctcttttcttttctataatattaattacgttcatttttaatttttaaataatcatatgcataattaattgcaattatagagcttgcattttgcacttctccatataggactttctttttcaaatcttcaatctcaacctcttctaactctaaaaactcaccatcatcaagatgttgttcagtttttattaagtcttccgcaaggaaaagatcaatcttttcatcagaatatcctggagatgtataaaattccataatatacttagggtttttgcatagatatcctgtttcttcttctaattctcttgttgcagcttgtataggtgtttcttgtacctccactaagcctgcaggcacttctagaagagttttatcaacagcttttctatactgtcttaccattaataatttagttcctttaatcgcaattattacaactgctgctttgtgttctataatttctcttttagaatattttttatttggcatttcaattgtatcaacgcgtaggcttaatattttgccttgataaatttttcgctttttaatgtttttccggttcaatatgttccattctaatcctcactttttaataattcttttgcattttctattgctatatcacttattttacctgaacttaaaagtcttgacagttcaagaactcttccctcgtagtcaagctttttgatatgactaattgtagctacattgttattgtctttttcaactagataatgttcttttgcctttgctaatatttgcggcaagtgtgatattgatattatctgatatttttagacagctctcaatttgtttgcaagacaagttgctgtataaccacttagtcctgcgtctatctcatcaaatataattgtatctatattatcaaagccggctcctaaatttttatagcaagcataagtcttgacatttcaccaccagatattatttcactaataggttttacagattgacctttattagcactcatcaatatctcaacttcatcgtagccattgtctttcatattttgtttcttatctacagaaatttcaacttgaatattattcatattcaatgttttaattcgttttcgagcattttgaaatctttgtcgcaaagatctttctcttaatgcttagctcatctgctttagcatcatataatttttatcttctattaagctcttttctaaagcttctctttcttttctatattctttatctctttaagtttttatctaggttctctatatgcatttatttctgcaatagtattgccatatttatattttattttatttatctcatcaagccttttatttaattcataaagtctttcttgatcataatcaatactttccgaaaatactttatttcttggtttatatcttttattaattcttggtaatctaataacttttcataccatagattagcatcttttgaatactcttttaaatcatcaacaaaattgtttgcgtcagatagcattgaatcaatactataattgtcactatccctaagtatttgatttatcatgtatgaagtttttgatgtcttcacttgaattcagtcttttgatttctgcttctagctcaatatcctcgttgtctaaaatttcagcttcatcgatttcgttcttttgaaattcgataaaatctatttgattatcaatttcttttgattacttggaagattctttaatcgtttattagttttatcaattttattatataaatcaataatttcggatagtaaattttataatcattattaccaaaataatctagtatatggatatgttcgttcttgtctaacaatgtgaactgttccttttgtcctaaaatattaatgcttatattgctaatatcatttaattctttaagagttaaactaagattgttaagatagttcatactagctttgtctctatattactctctttaatataagtggattctttaaatttgaatttaatatagtgttaattctacttagtttatccttatcaatattaatatgagcttcaattgttgatgaatctttgccatctcttatttggttcttactagcttttgcaccaagaactacagataaagcatcaactattatagatttaccgctacctgtttcacctgatattgcagaaaaccatcatcaaaatctaattccaatgaatcaattatagcaaaatctttaatatataatttattaagcatatactcacctactcaaggactcccttactaaactaattatatctatcttatcatttactttgcatcttctaaataaagcgaggtattctacattaccaccaccgccttctattggcgatttgcatatatcatttaggtacatgcctttatttttaaaacatagaacaattttatttattgcatttatatgtaaatctacgtcattaaatatgccgttttcctttttcttgccagactcgaattgtggctttattaaaactacaagactagaatcttcacgtaaaatagaattaaatgcatctactaataatgtaattgaaataaagctaagatctgatgtaattatatcaaatttatgctcaaatgtatctttgcctatattcctggcatcaaaagattcataagatataaccttgctatttccccttattgatggatgaagttgatctttaccgacatctattgcgtaaaccaattgtgctccacattttattaaaacatctgtaaagcctccagttgatgcgcctatatctatacacaccttatccttaatttctagtttaaatacatctatagctttaatcagtttaagtgcacctctagaaacatacttttggatgtcattatcagagtttattttaacaatatctttttcatcgacgtcatagcttggagaatcaataattttgtcattcacttgaacaaaaccaccattaattaactttttagccttagttctgctatcaatattatttagtttgcttatataaatatctaatctcatactagtttttcttcttaaatatgttcttaaattttaggattatcttagaaataaagaaaataatttctctatatttatttattgcgagacctttgcctaatgatttgccgcctactgtgaatcctgcaacactcgctgttattagcgttccaattaaagcaatgtttatatcattaaatttgtcatatattttactaagcaagcttgcacccagtgctccagatataattccggccatatcaccaacaacatcattacaaaaactagaaactttatctgcattttttattaaatctattgctaccttgccttcctgaatacggttagctgccatagagtgaaataatttttgctctgcactagttacacttactcctacaatatcgaacaatataccaattagtataacggaaagcagtaatataacgccaacaaagatattaacgtctttaagcaaatggtctaataaataacttaaagcaacggacatcataaatgtaaagattgtaataagcaatgtccacttataatcagtctttacagcttgacgtttcttatttttttcaaccttatttatacttttctctttatatttattcttaagcattaatttactcctaatataatatgcgcctactatatattaccttattttatgatattaaaaacaagtacttacaataaaagctgatagttacctatcagctatagtggcaactaaaaaagtaaatcttacggcttaggtccagttggttttcccttactaaggctatatgtcaccaatcatagcggtttcccattaatttagtaattatactgttgccaaatataatactggattgccacttagtccgcactgtaatccctttttagtcatcttacgatttagtctagaagttttcccaaacagtattttatatccttagcctcttttgcaacttaggtttcgataacttttcttattgtcctctggccacaagttcaataaaaagaccttatcatccgcactagatcactcaaggcaagctacgctatttataaaaaataggtttacacaagataaatcttatgcctccgcgacagcagggtcaacgcctacatgccgttgtagattgccccatctgtcttactctcaaagaatgcccatgactgggcgtcacaagcacaaatcaagaacttcatcgatacgctctttggcggatttttagccccgccttcatgatatagaatactgactagaatactacaccactaagttgattatactatagatgctatgttttgtcaattaaaataagcttatctgattggtgtcgtgcatatctttgaagaaatttatagacttcaaatatgttattacagtattgttaacttgagtcctcttttgaaagtcttcaatagaattaaattctcctatctctctttctctaataatattatttgcaggatctttaccaagcccagctatgactgtaaatggcggtataacctctccattaataacagtaaactttgtagctagcgacttatctaaatctatagatgacatagttatatttctaagttgcatctctttaactacttccgctaacgacaataggtcaccatcttttttctttatttggggactttgagatatttcttttattagattgtccaagttttcaatcttatataccaaagcatcataatcaaaatcgttaattttttgtgtaaaatatgttgcatagaaggcagctggatagtaaactttataccatgcaagtctatagctcatcatgacataagcagctgcgtgagccttagggaatagatatgatatcttatggcaactatcaaggtaccactcaggtaatggatacttcttaatctcgtcttcatagtttactataattgtttcattatcgacaactttcttttgtattaatggtttgccttttctaacgaattccataatcttaaatgctgttgacttatccatgcctgcatcaataagttggttcataatgtcatctcttgttgatataacttctgacattggtacattcatttcattaactagcttttcagcgttgctgttccatacgtttgttccatgcgaaagaccacttattcttacaaggtcagaaaatgttttaggcttagtatctttaagcatgcctctaacaaagtttgttccgaattcaggtatagcaatagtgcctacaccgtattttagatcatctttatcgactccaagagcttctgttgatgagaataatgataatactttttcatcatcaaatggtatttcttcaatcttagtgtttgttaagtcttctaagtttttaatgatgtttggaacatcatgaccaagtaagtctagttttaatattttaccgcttattgaatgatagtcgaaatgcgttgtaattatatctgtttgcatatcatctgcaggtttttgaattggagtaaaatctagtatactcttgttcttaggaacaaccattaccccaccagcatgttgacctgttgttctctttgagccttttattctcttacttaagaacattgcgtgtaaatatgagatgcttttattctttttttctagataatctaatatacatgctgcagcagttttgtcagcaagcgtaccaatagttcctgctctgaatacaaagttttcgccaaatattttttctgtatttttgtgtgctgttagttgataatctccagcaaagtttaaatctatatcaggttctttatcgccatggaagccaaggaatacctcaaatggtattttttgtccatctctgttcatttcatgtgagcaaataggacaatttttacgtggtaggtcaaagcctgagtcatactttggatcatctataaactcgctgtgcttacaatttggacatacgtaatgaggtataagtggatttacttcagttatatcactcatagtcgcagcaaatgatgagccaacagaacctctagatccaacaacataaccatctgcgtttgattgcaagataagttttcttgctattatatataaaactgcgtaaccgttaccaataattgaatcaagttctttatctagtcttttcttaactatatcaggaagcggatctccatatatgcttgtagctttgttgtagcaacagtccctcaagtccttatctgagttttcaataaatggtgggaatgtatccttaggtataggcctaatgttttcaaactcttcagcaaattttacagtattatccactacaatttctttcgcttcttctttgcttaaatatggaaaattattcaatagctcttttgtagttttaaaataatgatcagtattgttgcattcttttctattaccaacgaagtttttctattgaatactaaaatgatctataaacattgtccttttgatcaatataatacacatctccattagctaatacagggatgtttaattcttttgcagtatcgtataatcttctattaatgttttttattgcatctatctcgtgaacgctttcatcttccactaaatatagatattgatccattggctgaagctctataaaatcgtagaacttcatcatttctttaagtttttcgtcctcttcacatctaagtagtgcattgtatatcgcaccactgtaagagccacttccaactaataaaccttctttattgtcctccaactgacttttataaactataggttgtctatagtaattatcaatgtgtgaaagagatataagcctataaagattcttaaggccagttaaatttttgcaaacatagatactttatgaacattatagtagtttttagacttaatctttgacaaagcatcaaggtcaatgcagttttgttcttttaataaatctaatagctttagaaagacaaaacctgtagctgtagcatcatctatagctctgtgatgattttcaagatttatgttgaacatagatgtaagtacatctagcttgtgcttctttaaatcaggcaataagtatcttgatagttctagtgtatctatatattcgtaatcaaaatgaattcccatcctgtgcatagaacttttgataaatgatatatcgaattctgcattgtgtgcaactaaaacagaatccttacaaaaatccataaatttatccaaaatattatcaaaggatggacatccagcaactgttgcatcatcaatcgttgttaattccgtaatcctatatggaatatgaaaaccgggatctgtaaattcagagaaattatcaatgaccttaccatcttgtatctttacagcacccatctctatgattctgtcgtcaataggtgaaaaacctgttgtttccacgtcgaaaacgacaaatgtattcttattgtctcccttataattattaactagtgatcttgtgtcatcaaatagattagcctcaactccatatataggtttaattccagtttcaatggcggcatccataatctcaggatagctttgaacgacgtttttatccataaaaccgatggattcatatcctcttctcttagcttcattgaaatattcttttgcagaaataaaaccttcttgactcgacatctttgtatgcaaacctatctctacccttttaatgtcttcttcatcatctatagttttatcttcattaattatttcataagagtatattttatactcattatattttgaaacaaattaacattaccacaaaggtaaagctttacaccatcttctatatcataatcataatcatattcgccgtctttattctttcttataaatttactaactcttatagcctcttcgccgtcgtcaacagcaaattttaataacgcatagtcatctctatctacaaactcatattcaaaaacttcgccttgaatagttataaagtccatatctgagtttatgtcctttatcttagtacatttgttcttgtccatttgtttgctattttgaaaaggatttttacctgatgtatcactgctagcttcactttttcttttcttcttttactattttaaaattttcactaattctatctgcgttgttctttaaattatctataaactctttttattgacagttatttctctactaagcgttttattactttattttcaaaatagagcatagagacctcataagctctaaacatggattagcattaaaactatcaagaagtagtttatcgtccaatgtaaaatatatgattcatcgttctcttcatatgagattgatccttcatctatatcagaaaattctacttttattgtttcaaaataatcagtacattttaaatattttatactatttatattaatattttctaaagagaactttaaaaagtagacttaattaattcatctacttctttaattaaatttagatcattaatgttatgataataagttattttaagagtctcatctttcaagacaggactctcaaaaagactttatcttcatttttataaaatctaagttaatatttaattcttctggcttaaataatctcatcgttacttcccgttctttcaatttcttttaacaattctttgactacttcgcttctgtctagttttaatgactttgccttttttaaacagataagcaaagtcactgcccatacttacaccaatatctgcatgcttttgcttcgccagggccattaacaggacagcccatgactgcaacgcttatgtttttgtttatatttgctaataatggctctagctcttcaactataggaataatatctatctttgttcttgcacatgtaggacaagaaacaaggtttacagaattcttacgtattcctaaggcactgagtatcttcttagccgctataacttcttcaacaggatcagatgtaagtgatactcttatggtatctcctataccatcttttaaaagtgttcctatagctatagatgactttactatacccacagatggcgagcctgcctctgttaagcctaagtgcagcggataatcacacaatgatgagaataacctgttagcatctatacaggtatttacatcagatgattttatggatacctttatattgtaaaatctagtttatttaacatttctacttgttcaagagctccataaacaagtgatttctcattaactccagcatacttttcaagcatctctttagatatagaacctgaatttgctccaacccttataggtaggtttttatctttacatatgccaacaatttctctaagttctgaaattgagttaagattaccaggattaattcttatacagtcataaccctctctagcagccatcaaagcaagcttataatcaaattgtatatcagcaattactggtacgtgtatcttttcttttattagttttattgctttagcatcatcttcatcattaacagccattctaattatgtcaagacctttgtcttccatttttagcacttgttcaactgttgctttaacatctttagtatctgtattggtcattgattgtatagttattggggcatcgccacctatagcaacatctccaacaaatattttctagtctttttctttctatcatcttatcaaacctctgacatcattatatgttacaaataagaataagagtatcaataatgaaaaccaattatatttactgcatactcaaatttttattagctttaataccagttatcatctcaaataatataaatacagcctttcctccatctagagctgggaaaggtagaaggttaaaatgcaaggtttatgcttataagtccaagtaaaacattacagagctgaaacctaccttggcggcgctcgctatagttttgattataacaaccggacctgatacctcatttttcttaacattacccttaaaggctcttgataaaaattcaaacatagatctaaaggcatatctgcaagtgttaacactttctttaaaagcacctgagaagtcatgacgtacttgtggcctaatgccaattttcttatattcatatacctttccattatcattaatactagctagttcaggcttaagttcaaaatttaatagtttaccatctcttttattgtgatcgtatctatatctttatttgagttaagtatcatgtttcttagctcaagaaataataaaggtttttaccattatatgaaattatctcatcattttcttgaataccggcaatatatgccactgaacctggctcaactttatcaatgcgtaaatcagtataaccactttgcatattaactatcaaaatgctattactgctagtataatattcataaaagcaccagcaagtataactacaagtctcttataagctttagcattgtcaaagcttctttcatctgaactttcatcgtcctcgccttccatagcgcagtagccaccaagcggaaatattcttaaagaataaagagtctctccaccttgctttttcaaaatcgcaggacccataccaacagcaaactcattcactttgattcctgcccatttagccataatgaagtgtccaaattcatgaattgtaaccaaaactaaaaatactagaaaagctattatcatactcatatattaattactccttaaaaacaaattataacaaatggacaaaccaataaaacgctatcaaatctgtccatcacacctccatgtcccggaaatatgtatccatagtccttaatattataagctctctttagttttgaaaatattaaatcaccaaattgtgctacaattggcactaaaataagcctatgtaataatattgattgcagcttaaattaaagtatctaatatagatacgttagagctacagttattatgtacgagccaagcgaaccttcaattgttttattaggacttaccctctcaattaatttatgcttaccaaacaaggtaccacatacatatgcaaacacatcgcttgatatagaaattaaaatacaagtataagcacatttctatcttgtatgctgtagaaaattgagaatggatatataataaaaatgttgtaaatatcaagcttaaaagcttttgatgtgaaatctttgtctgcaacgcttattacagagaaaataatacttgccaataaaatatatgttccattggcataataaaatataagtattaagataaattaaaagattaattaaaattgcaaggatataagttaatatcttcctagaatctgccatcatatttaacatttcatatgatgcaagtgttgcacataaaagataccaaatctatagatatggttcatatcataaataattaatattagaagtaataatacaactacagacgtagctaatcttttaaaaacttttcattatattcctccataccttctttgcctatgtgcaaaactatctaaggcttcagcaaaatcttctttatgaaagtccggccataacttatcagtgaagtataactcactgtatgcacactgcataagtaaaagtttgataatctcttccccactagttctaataattagatcgggatctggtatatgaattataaaagtatgctttaagatcttcataagagttaatcactttaccatcgttattagcaagatttatagctctaattatttcatctcttgaaccatagtttaagcaaatgttaagcacaagtcctgtgttttatatgttctttcaattgctaaatctattacacttttgattcaggatataccttccaagtcgccagatacaacaatcttaacattgtttctatctagttcatcaatttgactgttaatataaattataattagtttcattaagaaggatacttcttccttaggtcttttccaattttctttagaaaaggcatatagtgtaagatatttaatgccgtaatcagaggcgtaccttacattttctataactctattcataccttctttatggccataagtcctaggcatgtttctcattttgcccatctgccgttgccatccataattattgctacatgatttggaatcataactatctccttgtaaataaccccctgtaaagagggggttaatattttacacttccattaattctttttgttttctttgtaataagttctatcttttcagtgtatttatcagttaattttgagcatcttcttcaaatgtctttctatcatcttcactgatatctccatcttttcagccttcttaatagtatccattaaatctcttctaagatttcttattataatcttagtatcttcacctttcttggaaactatcttagttaactctttacgtctatcctcagttaattgagggaacggtaaacgaattaatttaccgtcatttgatggcgtaatacccaagtctgatttttgaatttctttttctatttcaggaatgctatttgcatcatatggttgaatgactaacaatctaggttctggtgctgaaatattagcaagttgttgaagtggagtcataacaccataatagctaaccataattttatcaagtaaagctgggttagctctgccagctctaactgtatttagatcctctttaaaaacttctattgttttattcattttcggttcatattcttgactaaatctatcaggcatattaatcctcctttacaatagttcctatcttttcgccgtctacaactcttactatgttatcaggatcatctataccaaatactactagtggtatattgttatccatacataaagatgttgcagttgcatccataatttttaaattcttgcctagtatatctagataagataaagtatcaaattttttagcatccttgttaagctttggatcgctatcataaattccatctacacccttcttagctaaaagtatagcttctgcgttaatttctgcagctctaagcgcagctgttgtatcagtagagaagtaaggattaccagtaccagcagcaaagataacaaccatcttcttttcaagttgtcttattgctcttcttcttatatatggctcagccacagctctcatctctatagatgtttgtactcttgtaagaacattcatcttttctaaagcatcttgcaaagcaagtgcattcataactgttcctagcatgcccatataatcagatgttgctctttgtatgtttaatgagtctcttcctctccagaagttacctcctccaacaacaataccgacctcaacacctttttcagtgataatcttaactctcttggctatagacttaataacttcgttatcaataccagtcttttcgccaccagctaaagcttcaccgcttagttttaaaacgatccttttataagccataaattaattgcccatttgctttgctacttctgcagcaaaatcttcttctctcttttctaggccttcgccaacttcatatctaacgaaacgtctaatcttaatgttttcgccaatcttagcaattttttcttttaataagtcatttactgtaatgcttggatctttgatgaatggttggtcaagtaagcatactctttcaaagaatttatgcattcttccttcaaccatcttttcagcgatgttttgaggttttccttcatttatagcttgttgaattagaacttctttttccttatcaatagcttcttgaggaacatcttcttcgcatagatattctggatttgatgcagctacttgcatagctatatctttaacgaattctttaaattcatcagtcttagctacaaagtcagtttcagagttaacttcaactaaaacgccaattcttccagagtgaatataagaagcaactaagccttctgacgcaattcttgatgctttcttttcagcagaagctaaacctttttctcttaataggtcgatagctttatctatgtcgccatcagtttcaactaggacttttttgcagtccatcatgcctgctcctgtcttttctcttaattctttaattaattgtgcacttatagccatatttacctcctaattttcttcgttatttatttcttctgtgttttcttcagctttttcttcagaatgttcttgtttgccttgcttaccttcgataactgcattagccaatgtttcagttattaatttaaccgctctgatagcatcatcgttacctggtatagcaatgtcaacttcatctgggtcgcagttagtatcaactaaagcaactactggaattccaagaatcttagcttcgttaatagctatcttttctttcttagggtcaacaacgaataatagttgtggcattccacccatgtctttgataccatttaggtatttagctaatttttctttttctgctcttatagtagcaacttccttcttaggtaaaacgcttaaagaaccatcttcttccatcttgttgtattcttcaagctttttaattctacctttgatagtattgtagttagtaagcataccacctaaccatctttggttaacatagaacatttcagatctcttagcttctgattcgatagcttcttgagcttgtttctttgttccaacaaatagaacctttccgccttcttcaacaacttccttgatcaatttgtaagctttttcaatttgatctacagtcttttgtaggtcgatgatatagattccgtttctttctgtgaaaatgaatctagccatcttagggttccatcttctagtttggtgtccgaagtgaacacctgcttctaataagtctttcattgcaattactgccatgtctttctacctccaagtttttttctttacacttcattcacctgccgccttaactatataatagcacctgaggcgtgcatcgtgaagtgtgcatatttttactaatcaattataacatatatgtatacaaattacaagcatttttctttgagataaaaatttttatttttattgtttgtcgctagtatacataacttaaatcaaaatttaactagtagttcattaattaacaatttattttcattttcatagaaaaagcgaggcatatatattacctcgctttgaatatttgaattataaattaattttgactgctatatcttgattagcaacgatgtcttttgctttgcttttatcaagtgacttaactatatccatgttagtgataactataggagtagtagcctctttaccctttgacttgatatagtcaatgtcaaactcaattaacttttggcctttcttaacatgatcgccttcattgacaaagcctttaaagccttcaccgttaagttctactgtatccatgccgatgtgtacaagtatttctacatctttagtttttaatcctatggcgtgaagagtgtggaaaagctgaacaacttcacaatcaaatggtgcgtataatacgccttcttttggttctattgcaactccatctccaagtattttttgtgaaaaaacttggtctttaacatctgttatatcaataagctctcctgtaattggagcatatagatcaagttcttttttctttgaaaataatcccatattacacctcgtgaatttcatctaatatagatccatctctatattcactgtaaccgataattctatctttcttctttatttcttttggctcgcccataaagttatctgcaattgcttttaattcttgtattgtcataacatttaaaccgcttgccttaaacttatcaattaagtcttgtctcaatggattaactgctatacctctttcagttacaaggacgtctatagtagttcctggtgttgctataacatctactctgtttttaataactggaagtcttgatgagaatagttttgaaactatgattgacatctttgctccagccgctgtgtcttggtgaccacctgagccgcccattaaaactccatcagcacctgttataacattaacattaaaatcaaggtctatttcagtagcacctaaaataactacgtcgaggttatcaacgacagctgatacttctggattgccgtattcggatccactcattcttaaatgatttgcgttctttttaatagattctattgctttaaggtcgaagcattgaacatcataaagagatgtaaataaaccttcttcaagcatatcagttaagtatccagttatgccaccacttgcaaatgatcctttgatgttttctttaatcatatagtctcttaaaaaatcagtaactgcaagtgaaattccacccgcaccactttggtagctaaagccatctttaagtagtcctgatgccttcattactttaagtgtatctttagcaatcttaagtccaactgggtctttagtaacttttgttgttcctgatactataccgtttttatcaccaatgctatctacttttaaaatgtaatctacatagtcttctgtaatatcgcttggatagttaggatattcaactattgtatctgttatagcgattttctttttagcatagatagcatcagctatagcatagcccatagatccgcaggatgcttctccattaactccagagatattacccatagggtcacaagatggagctgcaataaaagcgtaatcaatcaccacgtctttatcgattatgcttctagctcttccgccatgcgattgcattagtatctttcctttaagctttccttttgatatagccttagccaaatcaccagatatatatgatgtaactatgtttgttatagttccatcttcaagcaatggaataagttctttatgaactgggaataatgatgaagctactaatgttatatcttttatgcctcttctttgtagttcaagcatcatcatatttaacacagcatcaccgtttcttaaatgatgatgtgaagaaactgttataccgtccttcaattcaagtttatcaaatagttctttgatactttcataaactttgcttggcttggcttctttctttggataatctttcttatttaatatttttatatcatcattataaaagctcatcatattcctccttgtaattgtcagacatctttaaggtatttattgctcttaatattattggtctatcaaccatcttgccatcaagcgagaatgctcctagacctttttctttagcatctttaagagcttccataactctgattgcgtgattaacatcttccttgcttggagagaaaatttcattgactggatcaacatgtcttggagatattaaagccttacctgtcatacccatagccttagctttcttagtatccataattaagccttctatatcatcagtatctgtccatggagtatcaactgcttgtagaccaagcgactttgcacatgaaactattctcattcttgagtacttaatttcatctgattcttttgttctctttgcacctaagtcaagtgttaagtcttcagctcctaataaaacaccttttactctattcgatttagcaaggatgtttctagcgtcttcaacaccttgagatgtttcgattaagcaaaatatatcatacttttgattattatcatccaaatacttagaaagcgcttcaactgattcttgggatgctttggcaagcataatgccatcaaaatttagtccctttaatgcatctaggtctttatagaagtaatcagtgtcaagaggattaactctaacatatatatctgatccacccttaccttcagacttaaatgtttttaaatattctttaacaagttctcttgctgcgtctttctcaggtagagatactgcatcttctaagtctataattatagcatctgctccaagtatatcagacgattgcaacatacctggattgttaccaggcataaataacatagttctatagttcattttgactcctttcgattgcagttctcattctcgctctaatggtaaagtctaaagctcccttatcgttaatgacgatattcgctttcttcacgccttcatcttcaagtacctcattaatagcttttagaatcatatcaccatattgctccttaacaacagagtttagtgtgatttctaatttgtcagaaggttctatcataatcataagatcatttgattcaagcgaacctgcctttgcagctttgctaattactcgttcttttctttccattctaaatactccttcttgccttcaatatatagatcctttccatttgggtcaactataacagttgctggaaacttttctacagttatctctctaagagcttcagctcctaaatcttcgtaagcaataatcttagcagtttttattctatcagcaataattgcagcagcgccacctatagcggcgaagtagcatgcgccatgctcaacgatcttagcttttacattgtcatctctcttgcctttgcctatcatgcccataactcctgcgtccatcatttgtggtgcatatggatccattctatagcttgtagtaggtcctgctgagccaattactcttccaggttttgcaggtgatggtcctacatagtaaatacaagctccttttggatcgaacggcaattctttaccttcattaagtagttcaactaatcttttatgagctgcatctcttgctgtgtatattgtacctgttattaatacattgtcgcctgattttaaatttttaagagtttctcttgtaaatggtgttttaatttctatagccatagtaatatccccctttataatgaaataactttgtgtctagcagcgtgacattgaatgttaacagctacaggtaatccagctatgtgtgttggatgagtatttataaagactcttaaggctgttgtcttaccgccaaatccttgaggtccaatacctaattcattaatcttttcaagtaattctttttcaagatcagcatagaatggatttttattataatcatctatatctctcataagagattccttcgccatgatacatgatttttcgaagtctcctcctatacctacgccgacaataataggtggacatgggtttggtccagctgtttcaactgtttcaagaataaatttcttaacaccttcaagtccatcagcaggtttaagcatcttttgcttagacatattttctgatccaaagcctttggcagcaaaagctatttcgaatatatcgccttcaactatttcaaagtgaatgatagctggagtgttatcctttgtattaactctatcgataggatctttaacaacagattttctaaggtaaccatcagtatacgcttctcttaccgcttggtttatagcatcttttatagatccgtccacatgtacgtcttgtccaatcttaacaaagcaaataaccataccagtatcttgacacattggaacgctatctctttgtgcaagattatcgttatctatgatagttgttattgtttctttcgctagaggccacttttctttatctctaagttcaacaagtctgttcattacgtctcttggtagaactgaagctatttccaatagaccctcttttaattttttagtgatatcactacttttaatctctctcaaaattttaccccctatgtataatatgaaagtagcaatacaatattgctactttcaatgaaaaatattatctgttattaactagtgctactactctgttcatttcgttattaacgatcatgataccttcgtcaacacccatacctggtttagctaattgttgatcagctcctgtagccatagaaatatttactaatacttcagcagatctgttagtttcattgcaagtaccaccgcagtaagcacctacatggtgatctttacaatatttaacagcttcaatagtgttattgattccgcctaagtctggagtcttgatttgaatcatgtgtccagcgccattatcaacgaagtaaacaacgtcttcataagtgttgcaccattcatcagcaactaattctacattaatcttttcatcatcaagcttcttagttaagtctctaagaacttccatttgtttagttctttcacccatgtccataggtccttcaattctaagtttgaatggtttagcagcttcttcaagtgtctttagatattcagccatcttgtcaacatcgttgttaaaagcatcacctatagttccatatacgtcgatgtggaaaattgggttgtatgattcattgtgtctatgttcaataattctgtttcttaaccaaacaacatattctcttaataattcaccgtttttaccagttttttcttcaacattattaaatagaccgtgaggtaaaacgtctgcttcttttataatcatcttgtcagcgtttaaatatctgtcatcgcctgattgagcaaatataggaactctctttatttcaacgccagtattatattcttttttaacaacttctgccatagttactttgttagtcttagcaactgcatcaagtaaagcttgagtgataccatatctgatggcagtgtgtaatctcttgccatctacatgcatatgatcaaactcttcagccatttccttgaaagtagttatttctcttccttctagtttaggtgcaatgtttttattaataaatgcaataaaatcttctgctaagaaaagtgggtctcttccacctgctcctgagtattgaactgctgcacagtcacctagtgcaacttgtccgtcttcaagaactaacataactgagattgattctccagcttgtctgattgctttaaaacctggagttacaggatctcctaaataaaacattccatcatgttttgcgcctaatttgatagccttttggtcatcaaagtaaaaacctgttttacctgctgagcagataacttttttaattttcataatcaagtctcctttttatattaattattttttggtctacctattaattttccgaagccaactgcaaatatatcgtcagttgtcatgtcaaagcttactggacgtccttcgaattttgctctttcttcaagcttttctctattgatgtcaagtatatcttttgtaaatggtaagttaccagtgaatagatatctaacagcaccgttattatctctagctggcatcatctttcctgcattgtacttagatggagcaaatggtacgtccataactccttgtgcaaagccttctacagtaccaacagctaagtcacccttacctaattcaaatagtttttctataatacatcttgtttctgcttttattagttcaatttccgctcttaattctttaccttctggtaataattgaccttctgtcatattaagaaccatcttagtagctctaataccttctgcgtttgcttccttagttggaataccaatagcttcgtgaggtgtcttaacgataacttttgtagctcctgctaatgaaccagttgcagcaccccaagatataacaccaaatgctttagcttcatcttgagggaaaccgcccatccattggtggaatactgtagttattaatacatcgttatatccaaatttctttaagtattcattaacttgttcttcaagtgatctaattgctgctacgtcttgaattaagttaccgcattgaccgtagccaacagttatgtttttaacgccttgttcagctgctagcaaagcttctactatagcaactgcgtttgatgttgatggtggacaaagtgtaccagtaagtggtccaaatggttctctgttgatgtgtacaccattttcttcatagaaacctactagtctgtcacaatattgccagtcatgtaagcatttatctataggaacagattttgcatatggaacgttgtagcttatagctccaccttcatttgatgtgaatccacctgcgtgaatgatttcagaaagcaatcttgaatctggtgtaccatgtcttgcttgaagaggtttagaaacagcagcataaaccattctacagcctttaactccgtggttaactgctgggaaaccatttaataatgatcttcctgcttttaatgattctttaataccaacttcacattcatcgtatctattttgtcttgtgtatgagtcaattgttgatggcaataagtctgctccaccttgatcagttaagaatgttaataattctatgtgagcatcgattagagcaactccggctcttggttgtgctagtgttttgccttctttttttgcctttgccatcacatcggcaaagttcttctcttcaggaaccttctttaaaaagtcaattgcttcttgtgaatcaacctctgctcctgtgggccattgtttaagaactttttcacgctccgcaaaaaattcttcatcagtccatcttttattttctactttcatagcttccccctatataactatatatttcttcatcattctaactgccatgtttttatcaatcattgttaataaacccatagctgaaagtatataatgtttatctactgaaaattcaggatatctaggctttaatgagtttaaatcttcctgatcataaagtccagcctttagtatttcttctggatgttctgaattaactagtatacctccagtaccaatcatatgctttagctcagttaggtccttacctacttgttgatacattgttcctagaggtgaataaacagcttctacatagccgcagtgtcttttcattgatatgtcaacacaaatctttgccatcatttcatcgaacttaatttctttttcatcggtgaaaaccaaatcagtgtgattgtatctctttttaaattcttcttctacatcatatccgctgatatctaagtacttctttatcatccttaaaccagatgcttcatatacgctctctgatgagtatctcataccaaggtcaccttcaacagttctctttgaaagtggttcttccaaacctctatatataacaccaggttttgatggtgcgccatctgctatagagtgaatatctgttgtcgcgccccctatgtcaacaactactaaatcaccaacgccatcttcatcaggtgttcctaaactaaaagcttctgccgcctttaaaactgcttgtggtgtaggcatcaatatgcccgagatgtcatcctcaatgtgtgtcatgcccttggcttttgtaattctttccatgaatatgtctctaattgtttctcttgcaggattaacattgatttcgttaagtttaggcattacattttcagtaagtctatattccactttatctgcaaatatcttttcaatttcatcatagctactcttatttcctgcaactacaactggtttagtaataccaatatcagcaattgattgtgcattatgtagaattacttctgtattgcctccgtcagttcctccagctaacaaaatcatatctgcgtttgaatcccttagctcttcaatctcatgagagttcatcttatatgaatatgtcttaataactctagcgcctgctcctaaggctgctctctttgctgcttctgcagtaagctctggtactagacctatggctgcaatctttaagcctcctgccgctgaagagcaagcaagcttcttaataatttctacatcgccatcgacctttgacattaaatccttataagcattgtgatatccaatagcaacatcagtctcaacagttgtataactcttggcagttgctatgatttcttctttttcaatatctattagagttaattttgtaaatgtgcttccaaaatcgataaaaagatatgctttcatttaattaattcctaagtcctttttcatatctgcaattgtaacttcaggactagttcctggtggataaaccctgttaaagcccatagctttaaatctaggttctacttcttcccacttttgtttaccaacaactatgttgcctccaacataaagtggtatgtctttaagacctgcttcatcacatgcttctctcatgcccttgcagtctatctctccttgaccatatagtgatgatacacagattaggtccgctttagtttcaacagctgcgttgatgaagtcttcttgaggtgataaaacacctatgttaactacgttaaagccagcattattaaaagcgtggtctaatatagtcaatccaactgcgtgacaatctgatccaattacccctaggatgattgtcttaccatttttttctttcattgtactcctcctatttgaattatattctcattttatcatataaacatataattttaaatagtaaaaactcattttttacggcgctttacttgcaatgaataaatttaatgttaattttcaaaatctgtcaattatgacttaaaaatgcgtgctttttaaatatttttgcaacatcttattttttacttgcaaatcaaattgttaaatttttgtcatagttatctaaatgactttattattcgtttcaaatactcctcatctgccaaataatatgttccttcatcttcatttggattagttccaaagaaaagctttttatttgctaacgtagatttatcaataaaaactttatttgatgatatgtgcaattgatctacatgcaacttagctttaataaaatcaatgttattctcttactccgcctgtgataaactctaatttatcgtaatattttcatataatgaattaataattttataagtatctgtgattttattatctccgcccttagttaatacacgtttaaagccaagttctataagctttttgcaattagcatctaagtttggatctatatcgaacgctctatgaaaaacattgtccatgccttcgcagtatttaagtagatactcatttgccttcatattgatgcttccgtcatcattcaaaacaccaaaaacaaaaccttgcactccaagctctttaagtgctatgatatcttctttcataacatctaaatcatactttgaatatgagaagcctgcttgtctaggtcttatcattgcaacaaaaggtatatctagctcgttaagtaccttcttacacaatccataagaaggtgtaataccgcctaagacagttgatgctattaattctactctatcagctcctgctctttgtgctatgagtgttgattcaaatgagtcagtgcatacttctaatgtatatttcatcatattacctccaatctatctgtttacttgtattatatcatatattactttaaatgataataattattgaatattaaatataaatatagtataatgtttgcaaggagaagtaatatatttataggtgagaaaatggaaaagaattatttagaatttactgcaaaagataataaaagatcaagtatttagagtggaaagttgaaaaccctaaaatgtgtgttgaaataatccatggtatgcatgatcacgctatgaggtatgatgagtttgctaagtttctccaagctaacggcatttctgtttatgctttagacttaagaggacatggcatgagtgctgtggacaaagaacatttaggtcttgttccatatacaaacgcttggatgaaaatggttgatgatatcgatgtattaaacactataattagaaaggaaaatcctgataaaaaactagctatgattggtcaatccatgggatctatacttgccaggacttatgcatataagtttggtgactatatagataagttattacttttatcatgcattaaaagcccaatatttgtaaataaattatttaaattgtttttaaagcttgctcttgccaaagaaggttacgatggtaagaacgaagctcttaataaaaaagcctttgactttatataaggctagtaaagataatatgctaacatcagattcagaagaaaatgcaaagtttttaaatgatcctttgtgtatctttgaatatagtaacggcttcttccaaatgattattcacggcacagataaggctaatagaaaagagagcttagattatattccaaaggacttaccaatatatctattcactggaaagaaagatccactatcgaactacgacactggcataaaacaaatgtatggacttttaagaagcaatggtattgataacttagagatgtatgagtatgagaacctaaaacatgatttgcttcatgatattgagaaagaaaaagtatatcaagacatattaaaagctcttcttgcttaagaagagcttttgcttttattgtatattatctatatcaactaagagcattgcgaagtcatctctttgatctccgaatgcatactgaagaaccgctatatcaatcgctttaagaagcttatttggcttagaaagtattgttgttattaatctatctagcccaaattcttcgccatgaacatttttactctcaactataccatctgtgtatagtagaagcttatctcctgctcttaacttagtttttttgacttcataatcacttcccaagtctatgctcattattggtctaccctttgcttccaatacagaaatattgttatcgttaaaaattattggcatagaattgtgaccagcgtttgcataaacaaaatcttcagtctttgcataatacactccatagaaaagtgttatatatctgtcactttgcaatgttagttccaaaaacttatcgcttatgtacttaagcgctttttttggttcataattatctttgtttaagtttctaacagtctgccttataaacattgtaagcatagatgcagcaatgccgtggcccgcaacatctgcaatataaattacatatatgtccttttctatctcaaagatatcaaacatatctcctgatagcgtttcagttgcttcatataagtagtctatggcaatgttcttatgcttagtctttgtcggaagtatgttcttttgaattctcttagtgatttccatatcgtgaaaaacattttcgttgctttgtataagttgaagctcaagaactctttctcttgtaacatctctaaagacctctactatggcaacagggttcattttatcatcatatataggcgagcacttaacttgataataattctcgccaatatttagttctttttgaattatctcattcttttctatagcacttgctgtctcacttgtgtcaagctttagaaaatcatccaattcatcagtgttcatacctgttggatcatagccaacagcgtcctttaatgattgattagcataaagaatcttgccattaatattaactacctttacccagtcagccattgcatcaagaacttctacggagagtatcttgtctaatatttcatcttttctttcattcttcaaaatatcagctcctatttctcaggctttttgccataaaattggtagtagtatgtctttaaactgccattgtatagctttctattcttatcagcctttctttcaaaatctctttcaatctgttcataagatgttaacacatacacagaccatgtgtctaaattcttaatcttcttaccaaagtcactatagagttttctcaagtcatcttcctctaaacgcttaccatatggtggatttgttatcataacaccataattattcttaatgtctacatctctaaagtctttaacgaagaagcgtatgtcatcacttaaaccgagattttcaagattgtgcttagctatagcgatagacttatgggaaatatcacttgcgtctatatatacctttgatttgtagtcaatcttctccatcgcttccatcttggcttttttatacaaatctttgttgataaacttaaaattcatactatcgaagtttctatctaatccaggagctatgtttcttgcttgcaaaagcgcttctatagctatagttccagaaccacagaatggatctaaaaacggtctttccttattataaaacgatagcttaactaaagcagcagccatagtctccttaagaggagctgcgccttgcatgtctctatatcctcttttgtgaaggctctcacctgatgtgtcaagagttatgcttgcaatatcattaagtagcgaaatctcaagtctgtgtctatgagaagactttgaaaacctacttatttcatgttttgtttgaagctttttaatgatcgccttctcagttatcctttgacagtcagatattgaaaatagttttgacttatgagatcttccttcaacaataaaattagaatcttcatctaaaatttcattccatggaagctcatatatgccatcaaaaagttcttcaaagctctctgccttgaagctcttcaagtttataagtactctatcagcacaccttagattaatatttgctcttgctatatcgatgtcacttccattaaaataaatgtgcccattatctgttttagtaacttctaaacctaaatcattcagttctcttttaactatcgcctctagtccaaatgaactagttgcaattaattcatacataatatcacttccaaaataattataacatataatacagcacttctcaatattaatatgtaaaatatcattaattatacaatatatgtgttaaataaatttgattgggtatatatagtgtgacaagggggtttgataatatgaaattatcagaattaattaaaagcgctgactggaagagcgaaaaacacgttccagttattcacgtagcaaaagaagcagacgcattaaaggtatgcgtaagtgttggagatgaaatagctcatcctaatacacttgaacatcacatagcatggatgaagttattcttcgtacctgaaggaaagcaagttccagttgaagtagcaagttatgtagcatcagctcacggtgaattagatctatttactgaaccatctatgggcgtaaagcttaaagcgaatgcaaagggtactttacttgcactaagctactgcaacatccatggcttatgggaaaacacagaagtactatagtttgaaaacggcaaaggtggactttgggtccatcttttttcatgcctatagattgacaaaagatttatatttatgttataatcaaggcaatttaaaggagtgattttatgaacgttttgacgtgttaaaagaaagaggttacatcgacaattgtaactatgaagatgacttaagaaaattattagataaagaaaaataacattttatactggatatgacgcaactgccaactcattaacaattggccactacataacacttatggttatgaaacacctacaagctgctggacatagagctatatgcttaactggtggtgcaacaactatgattggagacccttcaggtaaacaagatatgagaaaacttcttactgaggaaactattaacgaaaatgctagaatcttcgttgatcagttatcaagattcattgactttaaagatggcaaagcaatacacgtagacaataaagactggcttcgtgacctaagatacctagactttatgagagatataggtgttaacttcaacgtatctaagatgcttgcttatgattgctacaaaaacagaatttcatcaggtttaacattctttgagatgggctacatgctaatgcaagcttatgacttcgttgagttatatagaaaatatggctgtattctacaagttggtggatcagaccaatgggctaacatgcttgaaggaactgagcttataaacaaacttgaaggtaagcaagcctacgtaatgactctaaaactattaacaaatgctgatggagttaagatgggtaaaactgtttcgggcgctgtttggcttgatagaaataaaactactccttacgaattattccaatacttcagaaatgttgatgacagagatgttattaagttcttaaagcttcttactatgcttccaatggaagagataaatgaattagctaagctaaaagacaacgaaataaataaagcaaaagaaatacttgcatatgaaattacaaaggacgttcacagtaaagaagatgcagacaaagctttagaagctagccgtgctctatttagtggatctgctaattcagaaaacattccaagcactactatggataaaaagttatttgaagatggtattggtctactaaacttattaaaaaagcttaaccttactaaatcaaactcagaagcaagacaacttattagtcaaggaggtatacttctaaatggtgaaaagaaagtgatgctggtaaagttattacactagatgactttaaagatggcgagcttttaattaaaaaggtaaaaagtatttcataaagttatttattaaataataaacataaaaataggagcttcggctccctattttaatgtgtaagctaattttatttattaagttttattattttgctcctaaagattccataagtttactataaatttcactatcatgatatgttccttcatataattctgctgttgcgcctagtgcgtatataggcactggcacagctgtatgagcaaatgttgaccagccaataccagctttattatcgattatatgtgttagcgttgcgctaaatggattatatccaccatataataaatttgtttcaatagatttagttcttttatctttgtctttcattgattctgcaaaagctgttttcaatttcgcaagttcataatcatttagcacaaataattcatcttccttattagtgttcttatccttaactattagtccaaatgattctttaactaaatttaatgcatcctcaaagttaagattttattattttctttaattcttcaaatttcttgtcaaattcaacataacttaattttgtttgtcaaatatttcaaaatgagtgtcatatcctgttccttgataaccaaggcttagtccgcctgtttcatgatcggcagtaactaggattagtgtttcatctggatgctttttataaaatgcaatagcttcttgaactgcatcgtcaagtgcaagtacttcgtgtattgatgagagtgcatcgtttgcatggcatgcccagtcaattttaccagcttctgccatgataaagaatcccttgtcattgtcaagcacttctatggcttttctaagcgtatctcttaaagtcatatcgcctttcttttgatctagtgtatacggcatagcaccatcatcttgaattctttcagtaactgcaaatactttcccagtatttttgttaatcttttcaaaatctttctttgtttcagttactgtgtagccgcttgcttttaaaatatcataaagatctttttcttttttcttcttgtcatcaccagttctatgagctagtgatcctccagcaaaatagtcaaatccactcgtcgccatttgcttacctatttcataatattgttttctagaagtaacattagcataaaatgctgcaggagttgcgtggtttagtgttacagttgatataatacctatctttttgccctgagccttcatcttttcagcaacagtagtaacattcttttgaagatcacttgtcttacctataacaccggaatgagttttattacctgagcttatagctgtggcggttgaagctgagtctggacaaaagcttgtagagtcttctgtattaacaagaccaactgttggaaacttataaaactctaatggttttatctctactttctttttgtctccagtgtagatttgtgcagcatttacttgagcagccccataccatcacctataaacaaaatacatacttagctttttagaattttactttcagcaaagcttctttcacctaggaatgagaaacttgatacaaagatagcaagcactaaaattaatacaaagaatttaaaatttttcatggaattctccctttcttgtgcttattataattattatatattaaatataaatatgtattgtgtaaattttatgtaaaaacctctctacttaatttagtaaagaggtttaataatatttgtttaataattttattcagttaattttaaaactcatcaatttctttctttatagtttctagtgatgcgtcaaagaattcttctttagtaacatctatgccaactgatttacagcaatctttaatactcatcttgcctgtatttcttagaagtgtatcatattttctatgaaggcatctccttccttcttatatactgtataagcctcttgcaaataaaagtccaaaacaatatgggaagttataataaccaagtccgctactgtagtagtgggacttgcatatccacatgcctttgtttaacttttctggatctagtccatctttaaatgcttctttttgtgtattcatcataatctcatcgaaatcatctgcatctaaagcaccatcttttcttcttctaaacacttcatcttcaaacaagaatcttgaatatatatcaacaactgtttgtgctgctcctgatataatattttcaagtataaatatcttctcatcattgttctttgcatctttaagtgcagcgttataagttattgtctcagcaaatatcgatgcagtctctgctattggcatagtatagtcttgattgattggcgcttcttggaatataactcttccgtggtaagcgtgacctagttcatgtgcaaaggtaatcattgaatcaaatgtgccaccaaagttagctaaaactcttgattcttttatagctgagcagcttgagcagaaagcgccgcccactttaccttctctaggttctgtatctaaccaattattttcaaaggcatgtttagcaaagtctcctaacttatctgagaatgaataatattgtttgataacgaagtcttttgcttcttcgaatgtataagtgatactgcccttacctactggagcaaatgtttcatagtaaggaagcttatcatagccaagtaatttagcttttcttttaaagtacttaacaaaatctggtaaatactttctaactgatgaccacattgcatcaagaatttctctgtcaaatcttgaatctataagagtttttgctaatggactttcatatcctcttaattcacattcatttattacttcgccctttattgagctaagtgacattgctattgagtctctaattttgtcatagcactcttcttcggctataaaacttcttcttctaaggtctttatcgtcttcatattgtaagtttctaattgctggtaaatttatttcctttacatctccatcagaaaattctactttgcttgtaactttactagttaaattagaatgaagtctgttccactcgtatgaacctgtttcttttatacgagcaacagcaatctctacatcatcactaagagagtgctttgcattttcacatccctcatttaatataaatctatattcttttagagtatcctcttcatcaataatcttgtttatatcatcaatgctctttaaaaatttgtcaaaaattacactaagctcaataaactctctgcgaacagttattagtttagacttttcattaagtgcttctttattgttaacgttttcgcttaaatttaacgatacatatccaaataatcttgctgcataattatcaatgatattagctttgtctacatatttaagtaaaactttctttttatcatcaaaattattacttataaaagaatttagatctttaatttcttttaaaattttctcataatcttctttgtacttaggatcactaaatgatttgtaatatgcggataaatcccacttcatattcttcctcctctttcaaaaaagagggtagcaaacgctaccttctcttaataatttttatttccaacattaattctgttgattgccttcttaagtgcaagctctgccttgaatgtatctgtgtctttgtcctctagttttctgcttgctctttcctttgctctttcagctctgttgatgtctatctcatcttcccactcacaagcgtcagatacaacagttatattgttatttctcacgtcaatataaccaccagcacaagctgcaacttttctttcatctccatctttaataacaagtctaccaatatcaagtattgttaccaagggagagtgattaagaagtattcctacgtctccttcaattgttctagcgacaagcatatctatatcgccttcaaaaaacaatttatcaggtgtaacaaccttaagatataatttagtcattattttgcctcatactctcagcttttttaacagcatcatcaattgttccaacaaacaagaatgctgattctggtaaatcatcgtgcttaccatcaagtatttcttcaaaacctctaatagtttcagctataggaacatattgaccctctatacctgtgaattgctctgcaactgagaacggttgtgacaagaatctttgtatccttcttgctctagcaacagttaatttatcatcttcagataattcatccataccaagtattgcgatgatatcttgaagttctttgtatctttgtagtatctcttgaacacgtctagcaacttcatagtgtttttctccaactacttgtgggtccaatattcttgatgttgaatctagtggatctacagctggatatatacctaattctgaaatcgaacgtgaaagcactgtagtcgcatcaaggtgtgtgaatgttgtcgctggtgcagggtctgttaagtcgtcggcaggaacataaacagcttgtacagatgtgattgatccattctttgtagatgtgattctctcttgcaattgacccatctcagtagctagtgttggttgataacctacagccgatggcattcttcctagtagtgctgatacttctgaacctgcttgagtaaatctaaagatattatcgataaatagcaacacgtcttgatgtttttcatctctgaagtactcagccatagttaagcctgttaaagcaactctcattcttgctcctggtggttcattcatttgaccgaatactagtgcagtcttattaattactccagactctttcatttcgtagtaaaggtcattaccttctctagttctttctccaactcccgcaaaaacagaaagtccaccatgctccttagcgatattatttattaactcttgtattaatactgtcttacctacaccggcaccaccaaatagacctatcttaccacctcttgcatatggagcaataaggtctataacttttataccagtttcaaaaacttctcttgttgtgacttgttcatcataagtaggtgcttgtctgtgtattgggtcatatctatcatatttagacttaggatcttcgtcaatattctcacctaaaacattaaatagtcttcctaatgttttatctccaacaggcaccttaataggacttcctgtatctaaagcctcagcacctcttactaatccgtcagttgatgacattgaaatacatctaactatgtcatcgcctatgtgttgacttacttcagctataagaggctttccattaagatcaattttaatcgcgttaagaaggttaggtagagaattttgtttaaatcttatatcaagaaccggtccaattatttgtacaactttaccaatattttgattttccataatttcaccccttctaatttaatgcatttgcacctgagacaatctcagtaatttcttgtgtaatttgagcttgtcttgctctgttaaattttaaagacaaactctcaagcatatcattagcattatcagtagcattcttcatagagtttcttctagatgcttgttctgaagctgctgattcaatcatagctccaaatatagttatggatatataatcctttactaatctgtttaaaacttcttcagcagatggttcatactcaataagtctgttttccatattgccattttatctattgattcggctggtaacagtttaaccatactaggcactaagctaagtacagtagaaaatgagtataaactaatagtacttcatcaatttctttcttttatataaatcataacagatgttaccaatctttgcagcattgttaaatgaaggttcttctgaaatatatgaaaattcttccactatgccactgtatcttcttttgaaatactctcttgcttcaacctcaactagtataaacttagttccaatcttatcttctacatatgactcagcctttcttataacattgatgttataaccgccagctaagcctctgtctgatgttaaaacaattataagtctgttctttacttctctcttctctaataaatcatatctaacaccctttgtattagcaagtatctctaatacttgattcaacagtgttataatatggccttgtaagctcaagttttgtctagatttacgaagttttgaagtagatactaattccatggctctagtgatttgctttatattagatacacttttaattcttcttttaatttctttactttgttcagccataataaacctctagttaaaagtcttttaaattcttctatcttaagtttaagctcttcttttatttcgtcagttaattctttcttttcaagaattttcttagcagtttcgcttgaagtgttttccatatattctaagaaatcttttcaaatgctttaactctgtcaacaggaatatcatcaagatatctgttagtaacagcgaataaaatcataacctcttcttcgacttttaaaggtttatattgtgcttgctttagtatttccataatcctttgaccatgatttagtttatctgcagtatctttatcaagctcagaaccaaattgcgcaaatgctaacaattctctgtattgagcaagttctagtttaataccgcttgaaactttcttcatagccttgatttgtgcagctccaccaacacgagatacagataaacctgcattaacagctggtctttgtcctgagaagaataattgtccttcaaggaatatttgtccatcagttatggaaataacgtttgttggtatataagctgaaatatctccagcttgtgtttctatgataggaagagctgttatagatcctccacctaacttatcagatagttttgctgatctttcaagtagtcttgagtgtagatagaaaacgtcacctgggtaagcttcacgtcctggtggtcttctaagcaatagagacattgaacgatatgcaactgcgtgctttgataagtcatcatatatgataagtacgtctttacctgcatacataaattcttcagccatagcagttcctgcatatggagcaatatattgtagtggtgctaattcacttgctgatgaactgactactatagtgtagtccatcgcaccatgttcttcaagcacatttactaattgagctacagtcgagttcttttgaccgattgcgacgtatatacatattacatcttgatctttttgatttattattgtatcgatggcgatagcagtcttacctgtttgtctgtcgcctataattaactctctttgtcccctacctatagggatgatggagtcaatagttttgataccagtttgtaacggctcagatactgattttctatcaataatgcctggagcattagcttctataggtctgaacttattgctttcaatcttacccttgccatctatagcttgacctagtgaatttacaactctaccaataagcgcttcgcctactggaacttccacgattctcccagttcttttaactggatctccttcttttaagttcttatcactacctaaaagcacgcaaccaatattatcttgctcaaggtttaatgccatagcataaacgccgccaggtagttctagtagttcaccagccatagcattgtcaagtccgtaaactctggcaataccgtcaccaacttcaataatagatccaacttcaaccgtatctaatttttgtcataattttgattaaatttttataactgagctaatttcttctggttttaaccccatttagatactcacctcactattatttattaattcttttcttaattcattcaattgaccttttaatgttgaatcgataagtttatcaccgattttaacaatagccccacctaataaagtctcatctaaaatattgcttaattttacatgtgcttttaatgaagctgtcaatttctcttcatatttttgatttcttcatcacttaatttgttttagtaataatcgttccatttacaatattattatcaatatcatataaattattaaattcatctattactgatgatatgatatcaaatcttttggcatcaattaaaacgagcaaaagttcattgttaattttgatatattcttttcatatatctttaataatttccttttctcatttttgatagtaaagggtgattaaatacttccatcaatctaggatttgaatcaatagtttctttaattaaatttagctcctcataaactaatttaagacaatcatcttctttagatgcttcaaacatagactttgcatataaagtagtagctaattcttccattgtccattacctacttcttctatagacttttctatgatatccttgtctttctttgtgctaatattctcaccaattagtttttctgcagctaaaatagcaatatttaccatatcgccttttaattcatccattgccattgactttttattagcaagttctttatcagctttctccataatttttctagactcttctttagcatcactaacagacttattaacgatatcatctgctctcttctttgcttgatcaacaatatcgtttgcttcctttttcgcttctttcaatttaagctcatagtctcttaatgctacttgagacttcaaattatttttctcgctatcttcaatgttcttcattatataatcttgtcttttctttagtaaatcttttataggatagtataaaaatttacgcaaaatgaaatataaaacgagagtggctgtaagctgaacaagcatattgactaaattaaagtcaacgcttacatttaagccttccataataaactatactaaaggcttaactaggataagaattagggcaataactagtgaataaatacctgttgtttcggcaacagcttgtcctaaaatcattgtttgaatgatatcacctttagcttctggttgtctacctactgcttcagcacccttacttgctgcaataccttgaccgataccagggcctaaacctgctatcattgctataccagctcctaaagctgacatacctaaaataaaatcgtgacctgaaattccttgcatttaaaatttctcctttcaaaattaattttcttcttgtcccatacccattgcaatgtaaatcattgttatcattgcgaatatgaaagtttgcaacacacctgagaatacatcaaagtagatgtgaaaccatggtgctactattggtgtaagtaaattacttacaaagcctagcgcagcatatacaagagccataattaacgaaccacttacaatattaccaaataaacggaatgaaagcgatattggaagcgcaatatcaccaataatgtttatcgggaacagtataaagattggctcgaaataaccttttatggaatcttttaagccgttaacttttatcttgttataatgtatcaaaacaaaagttattagcgctaatgtgagtgtaacatttagatctgatgttggaggtttaaatccaaataaacccatcagatttgaagtcaataaaaacatcatcaagctaagaatgtatggtgaaaagccttctctgttcttgcccatagtttgttcgattagtgaatctattgatgttacagcaagctctagaacgctaactagtccagatggtctagctttatagtcggttttctttatctttccataagcgataaaaataaatactagtaaagccatgacaactataacagagttgataacgcttggtgtcaacgaatatacattcttacctatctgaaagcttatcgacaattccatcttattaccccttttctttattcaaatctagtgatttgtgaaattatttaccaatcctaaacacttcaactataattatcgaaaatttaatcatggtaaagccaattgcagttgtataaaattaaaatttggattttatatgctgcatataatattaaaccatatatgatgagtcttaaataataattattagtagtaaatctcttgcttgattgtgcatccttctctacagccttcatagcatttctatacattaacctaaagaataatatacttattaaggtgcctaagtatagccccaaaagtaaatcctttcttaagccataaagtattaaaattgctaagcttaaaagtaaagctaagattgctgctactcttatatacttaaacgtaaaatccttatcatttctcatcattattttctctttattatctttctctttattatctttcttcttaaaataatacttaacacttctatagaaattgtaaaagcctgccgctacacctattataataaaacaatagaaaatacgccattcgtcctaaataatttatccagtccatagccgataagatacgaaataacaatgctcgatactatatctatgcctatctgaccaactaaggctagaggcttttaattttctatcataatatcaccttattcataagccttcagtgctccaaccatatctgttttctttaacttttatgaactataagcataaccataaatataaataaataagttagaactgctgagactatatagttataccactgaatatttgatacaagttgaatattgcttggtgtgatgtattcaagtataagatgcgttaatccaatacctcctgcatatccaagtaaaattctaatgtagacagaagtattgtctctgtaaatatagcttgttagctctcttggatagaaacctaaaactcttaaagttgcaacctctctgattctttcagatatgttaacattgtttaaattatataatactacaaaagcaagtgttgctgatgggtaagtataataagtaatattacatagttaagattagatagccagtcatttgctacacttattgttttagatacatcaaaacatacataacgctgtcaattttattaagattttaataaaattatctttaagttctttattgtctgagttaagtttgattatgtctgcattatcttcatatttttattaaaagcttctcataataatctttactcatgtatgcataatgtcccaaatagttttcattactgttaacaacatgcattgtgtaatatttattgtttgaatctctaagctctatgtcatcgcctggttctttatggatagactctaataacttttattaataattatgccttctttaggaatttctatcttttattttttttatttagtaagtgtacataattatcaaatttatcctcatcatttataaccataagaacaacattttgatccggcatatcaactgtgtcggcaataaggctttctgttctaatagtcattctatctttaatatctgtattgttgtcgataaatttagtatattccttaagttgatatttagagaagtctttatcataattaactataatgtcataattaaatatcctgccatattgtctatctataacttgtgcaacggctccttgtattgcaaaaccaaagaacaataaactcatacaacctgcaacacctaaaagtgtcataaacatccttgatttatacctaaatgtatttctgaatgttaccttgtataaaagcttaatttcttccagaagaatggaattttctctaagaatattttagatccagcttttggagcctttggtctcattaattgctagaattttgctttaaatactttgctaaaactaaacttactggtacaactatcgaaacataggatataatcgcactaattagtgggaatcttacattaaaatagtcaagtggtttttaagagtaaaagatgcagagtatgttctaaataccatcttagttaaaatattttgtcctagtgcaacacctatgataacacctatagttgtagctataaatccataaaacaaatatttttgtatatcaaagttgttgtaacctagtgctttaaatgttccaatttgtgttcttctttcttccgccatacgcataagtgcagttaaagcaacgattgatgcaatcaagaagaaaatgctgggaacactaaagctagtatatccattctatgtccagagtcgtagaataattgtaaaccttcaatattttctctgtctataatgttatatgttggtctcttcatattcttaagaactcttttgcttcatctaaatcactttttgcatcttttatctttttatcggcttttgtcttttcagaattatatttttaagaccatcatcatactctttttgtccatcagaaatctttctttttgcatcttttaattctcttagtcccgaagcttttttgtcttcaaactctttttgaccttcattgtatttttcaagaccatcgttatacttatcatagccttcatttaattttattaagccttcgtcatactttgctttattttctatatgttatttcaagcttatcaatgttttcttttaactcatctaattgtgttttgccttttctaactcttctttgcccttcttgaactcttgcaacttatctgcaggtatacttgatgctggcaaagcagacatagcctctacggccttatccatctcttctttttagcagtatactcagccatagaactttcatatgtctctttaagttcatctagtttagatttaagttcgtctaatttagttttccttcatctaaatcagccttatttttatctagtgtttctttactatcatctaaagttttcttattatctgcaagtgtttttcagcatcacttatagattcattatattttcttttaccatcattataagactttcttgcatcagataatttaatatttgcatcatccaatttattttagcatcatttagttttcttctgcatctaatatcttttcatcagcttcatctatcttttcttttatatctgatttaatgctttcaaattttctaatgatctttcattaaaagctgtaattagtttctttctgctaagtccaacaatatccttatattctttatctgtagttttaaaccgttaataccgtctataagtattctcgctttgctctcatcagtatcattaaaagcgtctttgagaacataagcaaaaagtcataatctcctaggcctttcttgctagtacctttcataactgtagacatattttctgcagaaacgacctttcctactatagtaaatttatatttttaaaatcttttgctttcaaaatcgaatttagattttgctctcaaactctaatgtatcaccaatattaaaagagcttttataggatatgcgtcaatgactatctcattaatgttttcaggcatcctaccttcaataagtttaggagttgatattctatcgggtattgactcaatgcttactatcgcctcatttttagtctctaccatgtcttcactatatacatactctatgtcttttatatttaatatagagttaataatatctttatctttatcctctaatgaaaattgtgaattcaaatataaatcagctaaatttgattcgtcaataaaggtgtcagcggttttctcattaatggacctactgactttaggcctgtataaacaaatacaccaagagtaatcaataaaacgatagatatgaatctacctggagaattttaacttctctaaaatatctttccataaagcagtttttcataaaatcactaccattctatttcatctatagattgaatattttcgttaacgtacatatttctaactctggagtcattaatttctattactctgtttgctattggagtaattgctttattatgtgtaataataactactgtgttgccgtcctccaagcttcttctttgtaataactttaatattttcttacctgtatggtagtcaagtgcgcctgtaggttcgtcacacaataaaagttttggatttttagcaatagctcttgctatggcaactctttgttgctctccgccagaaatttgtgacgggaagttattggctctatcttcaagtccaacatctttcaaaacttgcattgggtcaattgcatcctttactatttgactagcaagttcaacgttttcaagacatgttaagttttgaactagattgtagaattgaaatacaaagcctatatcatatcttctgtaagtggtaagttctttttcattgtatttttgtatgtctttgccatcaattagaatttctccttcatcagcagtatccatacctccaattatgtttaatagagttgactttcctgctcctgacgggccaactataacaactaattcacctttattaaatgaaaaattaatatcattgttagcaacaataacgctatcgcccatcttataccttttatacatatgttttacatctacaaacattttctcaccactaccttaaactaactatttagaaagtgcctcgtcaatagcttttgccgccttctttccagcacccattgcttcaataacagttgcgcttcctgttactacgtctccacctgcatatacataatcacgtgaagtcttttctgcatcattaacaatgatgcagcctttttcattaaatttaatgcctgtacttgtttctttaataagtggattaggtcttgtgccaagtgccatgattacaacatcagcatctatttcaaactctgagccatcaatcttaattggtctttgtctgcctgatgcatcaggttcgcctaattccatctttatgcattttactttgttaacgtcaccattttcatctgctagaatttcaataggactagttaagaacataaagttaatgccttcttcttttgcattttcaatctcttctctacgtgctggcatatctttatcttctcttctataaacaactgtaacatttgatccaaaacgtcttgcagttctagctgcgtccatcgcaacgtttcctgctcctacaacaactgtatttacacctactctgataggtgttgcagtgtcttctagatatgctttcattagatttgttcttgttaaatactcatttgcggagaaaacaccgttatagttttcgcctggaatattcataaatactggaagcccagcacctgtgcctataaagatggcatcatactcatccataagctcatctacagttacagttctaccaagtattgtatttaatttgatgttaactcctaaagatttaatgttttcaatctctttcttaacaactccgtccttaggaagtctaaattctggtataccataagttaaaactccaccagcttcatgaagtgactctattaatgttacttcataacccatttttgctaaatctgctgagcaagtaattccagaaggtccgcttccaacaacagctacttttttaccattgcttttagcatctttcttgattcgaataccgttctttagtgcataatcaccagcatatctctctaatttacctatagcgatagattcgccttttttaccaagaatacatgtcatttcacattgattttcttgagggcaaactcttccgcatacagctggaagtgtagtatatttaaacaattcctcagcggcttcaccaggtttattctctgcaagcttatgtataaatgaaggtatgtctatgttcactggacacatcttaacgcattgtggattcttacattgaaggcatcttttggcctctataacacactcatcctctgtataaccgtaacatacttcttcaaaattcttaattcttttatcaggatcttgatattttacttcagttcttttaaatctatccattatcttaatcctcctatcaaattgcagaagtgctttccttccttctctaccttggaatattgtcttgatcttcttaaaacttcgtcccaatcaactaagtgtccgtcaaactcaggtccatctacgcaagcaaaaacagtctttccatcaacagtcaatctacaagctccacacataccgcttccatctaccatgattgtgttcattgaaactattgttttaatattgtgctcttttgtttttaagcacgcaaatttcatcattatcataggtccaacaacgattgcatatgtatatttcttgcctttatttgtaattagatcttctaaacaattagtaataagtccgttaaaaccgtatgagccgtcatcagttgcaacatagacgttcttagcaatctttttcatctcatcttctagtatgattaaatccttgcttctagctgcaataataacatctacatcgactccgttgtcatgcatccacttaacttgtggataaacagctgctgttcctaagcctccagctaaaaatactatagattctttcttaagttcttcaagtggaatgtttataaaatcactaggctttccaagtggtccacacacatcttttactgtgtcacctacattaagttctcctagcttttgagtggtagcaccaatcttttgaacagctatcataacagtgccgtcttctggattgctatcacaaatagttagaggtaacctttctgacttttcgtcgataataataattaaaattgtccaggtagagctttttgcaatatctggagcttttatgtacataagaaatgtatttaaagcaatatctttttctctgtaatttcgtacactttaaaacctcctcgataaaatttaagtactcaaatatacatatatgatatcataaaacaagtaaattttcaatattttaaaataaataggctcacaaaatgagcccctttacttattatttcacttaatattttactctttaaaatttattttctcaaagtttaagaataatataaatatcaaaattaataattcaatagcaactaaaatttgtacaaatagtttgttttgttcaaatgtgcctccaaacactctaaagtacgataaaaggagtggtataaataaaattattgctaatataagtttgttttccatctgtcttctatagtagtattcgttgtcatctacgcctaatacttcttctatgctctcgccaacttttggttttgctaaaacatatatgtgagtagcaaaaagactagctttataagatatatctttagaattactatcaaatgttgctgccataaatgagaataacgatatttgtgatgcgcttataggatattgaaaaatttcaatatcattcttcctcgcatatgctagaaatgatttaacatctttttctgggcccttgaaataataaactttgtattcgtatttagactctgtttcttcaaattcaaaaaatgaacctcttaaactgcttaatttataattcttttctcctaaatcattaagccacttttgcattgaatatatggggtctaaaaattttttaaactttttcattaaataactccattttgattattgttgctcatggccatctcaagtactataaacgcaaagccaaaaacaactgcaggtattacccatgcaaagccttctgatcctagtggaattctatctaagaaacttctaatttgttcgaattttccgatattagcaatagtatcaagtaaacttgccataaatgctccaagtgttgcgcctttatatatagctttatacttaatgcgagtatcaaataagttcaataatattatgacaattgcaactggatataaaacagaaagtattggtcctgagaaagttattatagaatctacgccattagttgatactatagcgctaaataagcacgtgaaaataactatatgtttgtattttaacttaccatgagttaagtctgagaaaaactctcctgctgttgccgtaagacctatagatgtagtaagacacgcaagagcaacggttaaagctaaagcgattgtaccgtattgacccataatcttgtttaccataaatatcaagttagcgactctgttaggattatcagcatctatagtaagaaattcgcttccagtaccgcctatgaatacaagtccgccataaacaaaagctaagcaaagtgcagcaataatcccagagataactgtcatcttgaacatatcattttggcttgtgtagcctcttttcttaacgctgctaataactattgttgccataattattgatcctatggcatccattgtttggtaaccttccttaaaacctttaacaaagttaagagtgctaccagtgttttaggcactccaataggttttataattgataatataattattgtaaatagaataactaaaagtattggtgttaatattgagcctatcttgtctactacttttgattggtttaatgtaaaaataatgttaaaccaaagaatactatagctactaagattgggctgacattaccaaataaaggttgtattgctatttcatatgtagtggcgcatgttctaggtattgcaagtaagggtcctatacatatcattattaatgagccaaataaaattgaaaatgttttgtttaccttgcctgcaacatcttctagctttcctccagctttagctgcagctacaactccaagtataggcagtcctataccggtcatcataaagccaatcattgataggaaccacttgtcaccagatatagctccaagtgttggtgggaaaataaggtttcctgctcctaaaaacatcgcaaataatgcaaagccaactaccaatgtgtcaataatttgttttcttttcacttcaatccctccagtaccatagttattatactatatctattatttaatgtaaatatattttagcattttgtaacgttctaaagtattattgttagtgctgttaggtgtatatgaataacagtgctaaagcaaaaggtatatgacattatataagtcagattaattatgtatgataatatataaaatcttatcatacatacaaacataaaaataactcacagcctaagccatgagttatttttatatttattttgtctacatcattggcattccaccaggcatgcctccagccattggcgcatcttccttaggaatgtctgctactgctgcctcagttgttaatatcattgatgcaactgatgctgcattttgaagagctgatctagttacctttgttgggtcaactatgcctgacttaatcatgtcaacatatttgttattaagcgcgtcgaaaccgataccatctttttcgttcattacgttttcaactacaactgatccttcaagacctgcgttttcagcaatttgtcttactggttcttcaagagctcttagtatgatcttaacaccagtcttttcgtcgccttcaaagtcatcaactatagctttcaaagctttgattgaatcagctaaaactgttccaccgcctggtactataccttcttcaacagctgctctagttgctgataaagcgtcttcgattctaagctttctttcttttaattctatttcactagctgcaccaacttgaacaactgcaacgccaccagttaatttagctaatctttcttgcatcttttctctatcgaaatcagaatccgaagcttcgtattgagtcttgatttgtttaactctagattcaatttcttctttatttcctgctccattaacaataacagttgtttctttgtcaacttttaccttttgagcagtaccaagtagatctattgtagcttcttttaggtcataacctagttcttcagaaataacttttgcacctgttaagatagcaatatcttgtagcatttcttttcttctgtcaccaaaacctggagctttaactgcaacacagttgaatgttcctctaagtttgttaacaacaagtgttgccattgcatcgccttcaatatcttcagctattatcaataatggttttgattgtttaacgatttcttcaagtacaggaagtatttcttgaatgtttgtaatcttcttatcagtaatcaagatataaggattgtcaagttctgctaccatcttatcagtatcagttaccatgtagcttgaaacatatcctctgtcaaattgcataccttcaactacttctaatgttgtacccattgacttagattcttctactgttataactccgtcattaccaactttatccatagcatcagctataagtttaccaatttctttatctccagctgagattgaagcaacttgtgctatagcatctgatgattcaactttctttgagtatgatttaatagtttcaacagtcttttcaacagcttttctaataccattttgtagtatcattgggttagcacctgcagctatattcttaagtccttctctgattatagcttgagcaagtaatgttgctgtagtagttccgtcaccagctatatcgtttgtcttagtagcaacttcttttaataattgtgcacccatattttcaaatctgtcttctaattcgatttcttttgctatagtaacaccatcattagtaataagtggtgaaccaaatgtcttatcaagaacaacgtttcttcccttaggtcctagtgttacttttacagtgtttgcaagtatattaatacctgcttccattttatgtcttgcttctgcattgaatttaatatcttttgccatagtaatacctcctagtcttctacaactgcaacaatgtcagcaaattttaatacagtatattctactccatcgatctttgcgttagttcctgcatatgttgagaatataactttatctccaactttaatttcttttgctttcttttcatcattagtgatatcagcacctattgctataacttctgccataacaggagcttcctttgaagcacttggtagtacaatgcctgatttagttttttcttctgcttctaattttttaataactatcctatcggataatggtcttaatttcataatctattcctccttacaattttatataaattcgtttgttagcactcgtcactattgagtgctaacaattattatattgtagtcaatatattaaatatacaagataacataatttgaattaaatagaaatattgaataattttatttattatctgttctattctcttctttttcatcttttaaaattttctctcatataatagaatagatattgttgtgcgtatcctgaaagctcaccgaatcttctttgtccatcctcttgtataagcttcttatttttcacttctcctccgtagtaaagttcctccatgactctcttaacccaaacgtcgaccggaaacgagtcagttctgcctaagccaaatagtaatatgcattgaaagactttctcgcctatgcctggaacttctagtaatgtttttctaatatcatctacactcttctctttaagttcatcaaagttaattaagccttcctgaaccatccttgatgcaataactatcctttcagatctaaaccctgctcttgcatactcttttatatcttctgcttttgcatttgacagagccgctggacttggaaaagcataatactcctcatcatcaaatggattattaagtctttctccatacatatgagaaattttctttatagtgttcttgatgttctttatctgattgttagcacttataataaatgatatgtatgtttcaaacggatcttgcttaagtatcctcataccgccaccaaagccaatagccttgcttattacttcgtcgttaagagaaagtttttcttttatcgcatcgtaatcagtatttaagtcaaaatagttcaaaatttcattttcatctgaaaatcacccactatctctatagcaccatctatagagcgtgcttctaaaaccatatctctaaatataaatctatatgcttcttcgtctagcttttccatctgaatgcttgaccgcactcaaatatatgagaagggacaaagctagtctgtccctttaatattatcttattcattattttattcttcttatcctctcttaatactttaaacgcttgctttagtgtcattctgtttccgtattgaagtgtacctaatctgtatatgtcacaagctaatttataaattaaatatgctgatattacaagtattgcaaatgatatagctacctcagcgattgatatatttaacatacctgcccttataaacatgacaaatggagatgttaatgggaagtatgataagaatgtaacaaaactagattcccatccagtagttaatgcaaatatagctccaaaataagcaagtactatcaaaatagttgctgacgatattgactgacttacttcttctatcttgtttactaaagctccaagtgtagcaaatataaataaatataagaagaaacccgctatcataaacaatataaatataactaaaatttgtattggtgcgcttgtcatgctaaataatcctgaccaaaattctttattgaatatatatcctactccaaaacctataaatatggcagaaacttgtagaaccgcactaaatactgttgctaatactttgcttaatatcaagtactttggtttagttgatgtgattaaaagctccatagttctgtcgttcttttctttagcaacagatgttgcagttatttgaccatatgttagtataatcatatataacaagaataacaagatatagatgataaaatagttttgctttgagtcttttcctaagatgacttcatttatttgatattgatttgcttctaaggattttattttagaatagtcaataccttctgcttcaataagctttttgtatctgtattcatttaagactctgtctaagctatcgcccatatcagtaagtttagagtttaatacaaatttttgaattgagtcagcatcgataattgcacctctatcaagttctttacttagtacatcatctttaagcttttcttcgtcagtatatatatgaacttcataattgcttaaaaatgattttaattcactttcgtcgacgctctcatcatttataattattcctagcttttgtgtcttactcatttcatttgtgattgatttaaataaattgccttgaataagtcttggtgcaaaggctgcaagcaaggctaaaacaaagaatatcgcagtagttatcttatacgatttattttttattagctgcttgaactcaaatgaagtaattaattttatcttatttagcatcgttatcacctaccgcttctataaatatctcttcaagacttggctcatacttggctatagctctaaaattatctttacttatagcataattagctagttcactagctttatcagatgttcttacaattatctcattgtcactaatcttaacattatcttgtccgaccatatcaaaatatcttgtaaataatttacagcatcattgtaaaacttagtcttaatcttccctcgcccatatttttcttaatttctttaagatctccagtcaaaacattgctgccatctttaataagagcgatattgtcgcagaagttttcaacatggctcatttgatgtgatgagaatattaataaagtaccactagcaacagcttctttgattaaatcaataagtatttgtgagttaactgggtcaagaccagagaatggctcatcaaggatgatgatatctggcttatttataaaggtttgtatgatttgtatcttttgttgattaccctttgataaagtatcaagattttttgatttgtattcacttagcttaactttttcaagcagctcaagtgcattatcatgactttcttttttagaaagtccttttattcttccaaagtaaataagctgatcaagtatggcagtttttgcgtacatacccctctcttcaggtaaatatccaagttttatctcttttctatcaattggtgcaccgtcaatcagtatctctccgctatcagctttaaaaacgtccataagtatccttatggtagtcgtcttaccagcaccgttccttcctaaaaaagcagttgaactaccggagcttgtctctaagttaattccgtgtaaaacttcttttccagcgaaggattttttaatgtcaattaattctagtttcattaattactctcctttctaggtctgcccctcttctttgactctctatatagtcctaattttttatcatatacaatatcttttgctctattaacatagtcatcacttgtgaaagtgccatcgtttttgcatttaagtaaatagtttagtgtgaataagctctccgataatggcacattctcaactatgatgtccttatctaaatcaagtacagtcggagcaaagttccaaatcgcctttataccaattttttcataagtcctagcaacatctctcgcactattactagtaacagctatgacacctatatcaataatattattcttagcaaaattctcaagttcagatatgtttcttaccttgatgccgttaaagctaagacctatcatatttggattgctatcaaatagaccaatgaatttaaagccactactttcaaactcacgcgactgtattattgcttggccaatattgccaacaccagtcaagattaaattctttttataatcaagaccaagaacaccttttaagtccatgtatatggtctcaacgtgataaccataaccttgtctgccctcagcaccaaaagtgtttaagtcagctctgatttgagatgcggtaaacttagtgtacgctgatagctcactcgaagagaccctatgtacgccccttgcgtataggtcttcaaaaatcacatagtatattggtaatctttttattgcgtttattgtaatatcacgagccatatgtccacacctttcattattagaacaaatatagtataacatatagagtttttcttagcaatatttttttcttttatgttataatagaaccgaggtgtttttatgactgtactggcatgtaataatataaaaaaagtttttattgacaagttaatttttgaaaacgtttctattaatataaatgaaggcgaaaaggttgccatagttggtatgaatggtactggtaagtcaactctacttaacatactatctggcatgcttaattatgatgaaggtaatatatttatttctaaggacactaagattgcctaccttgaacaaaacacaactataagaagcaatttaagtgtttatgatgagatgaaaaagtcgatgaagcacctaattgaccttgaagatgaactaagaaattttgaagatatcatagctaaagatccaagcgaggagaatatggatagatactcttttcttcttgaagattttgaaaagaaaggcggatatacatatgacgctgagataaaaaaggttttaactggtcttggcttttctgaagaacagtttgatcaagcatttaactctctaagcggcggacaaaaatctaaactaatgcttgcgaaggctcttatacaagagtctgacatacttttcttagacgagccaactaaccatcttgatatcgactctatggagttccttcaagactacatcaactcatttacaaggacagtagttatggttagccacgatagatattttctaaatgcgacttgtaataaggttatacttataaaggatcacactactcatgagtacaatatgggctatgaagaatatatcaagcaaagaaagataaatgaagcaattcaagagaaagcttatattaatcagcaaaaagaaattgaaagacaaaaagagattatcagaaggtataggtcctacgctactgaaaaaagcattataaaagcaaagtctcgtgagaagatgcttgctaagattgagctattaagcgacgttaatgatgatagtgagattaatttcaagtttaggatgaaggtagagtctggtaatgatgtcttagctgttgaacatatcaataaaagttttggcgattttaagcttttaaacgatataaactttaatatataagcgtgaacatgttggtatcatcggtgctaatggcattggtaagtctactttatttaaaattatccttggcgaagaaagtcatgactctggtgaaatacgctttggaactaacgttaatgttggctactttgatcaagagttagaaaagctggacgtaaacaaatctattgccgaagaaatatgggacagcttccctcgccttacttactttgaactgagaaaagcgcttgcgaagtttttgtttattgacgatgatatttacaagatgattgatgaactatcaggcggcgaaaagcaagagtctctttgcaaaataatgctttctgatgtaaacttcctcgtacttgatgagcctacaaaccacttagatattgaatcaaaagaagttttggaagaagctcttaattcttacgaaggcactttacttgtaattagccacgatagatattttctaaataaagtagtaaataaaatacttgagcttaaagctgatggtatacacgaatacttaggtgattacgaatactatattgagaagaaaaagcgtatgcgtgaagaaaaagcctttttagaagagcctgaagagataactaagactcaagccaagcttaataaaaagcgtgagagagaagaaaaagagagattaaagaaagaaaaacaagcgaaagatgcacttgaaaagagatttctgaacttgaaaagcacacaaacgatattcataatgagcttgctaatccagatatatgatgatatagatagagttaacgatttaaactttaaacttaacgagatagaagagaaacttaatgaattatatgaagaacttatctatatggaggaataaaatgtttgaattaataggcataaaatttaaagatatattaaacatagaccacttacttattgatgatagtggtcttactatgattataggacctagtggaagcggtaagtctacactcatcaaaatgcttgacaatattatcagtccagacagtggcgaaatcttatataaatcagatgacataaatacttataagccacatgaactaagaagaaaagttattatgcagtcacaattccctgctatatttgaaggtaatgtaagagataatttaaatgtagcaagaaaattcagtaaattagctgatcttgatgacgaaaaacttcatgaacttcttggtattgtcttgttagataaaaacttgacgataatccaaaagaattctctggcggcgaaaaaacaaggctttctatagctagagtcttagcaatggattctgaagtttatcttttgatgaacctacatcatcgcttgatgatgatactgaatgcaatcttattgagaatgtaattaagtatcttaaagagaaaataagaagataatcatggtgtcgcactcagaaaaattattctcccttgctaatcaaattattaaagttgagaataaaacagcgcgtattaaggaggcctagtatgttaacagaaatatcaacattacagttacttctatccttcgcctttatattagtacttctactaaatatccaagataaaaggactgtcaaatcaaattttaatcatagtagcttcgctaagaatgacaattcagctaatcataactggctacttacttaagtacatactaaagagcgatagcccatggataactcttttgatacttcttattatgcaagcctttgcaatatttaatgtatataagagaagcaaagtcaagtccgctaaactaaaacagattatagccctatgttttatcggctccactttagtatcaattttctattatataattgttgttgtgggagttagaccttggtatgatccaagatatttcataacaatatgcggtatgcttataggtaacaccatgactggcatgagtcttgcaataaattcgtataagaattcatttaaagaccaaagagatactatagaggctgctcttatgctaggagctaagccaaaggatgcagtaacaaaaatatcgagtgaagcatttaactcttcaatcttgcctactcttaactcaatgctcggtatgggtatagtactcttgcctggtatgatgacaggtcagatactatctggaactgatccaatgtctgcaatactctatcaagtaacgataatgatagctatagtaggaactgttggtataacaacaagtatattcacttcacttgcatacaaagccttctttaataaaagagagcaaatattattctaagttaataagcaaaataaactctactaaaatctagtagagtttatttatatacgaatctattaccgactctttcttcttttcactaaaaacgttcttctctttcaatatatccataagccacaaagcttttgaatggaagatggcttccttatagtcacttaggactatctcataaagctttccatttaagaactttgaatttgttttaacgtagtacgcatcaacattctcaaagtcaacaagccttagtatgcttatagttgttaaatctttttgatgatacaagctaagtccagtgttcttgtactcaacaaagtactttctgtgcttgtttgtattcttaatttcatttgcaagcatcagataatacttcgcaagtgagttgtaatactgatagttaaacatgcccttttcaaatgaatctatcttgataaaaggcttgatgtttaggctagtaatgaaattaaaattctctttaagaaattccttcttagtcaagtcgccattgttgaactgtatgatcaaagaatgcctcttctcaaaaaacacctcaaaaagattcttcctctttacataaagcattaaataccactttctaattatttaacttcttctatatagctccttaagtcactatctacttcgtcagctaagtagttaacatttataagtatgtctacatcgtgcttttcagaaatttcttccaaattcttaactaagcattttaaatcatctttcttaatatcgattatcttataaacactgtctatatagattttctaagtcaaagtccattgataacataccaagcaagaagccgtagaattttcaatagtatttatactaaagtcacttaagttaataagtctaacattagtatctaaagaaaatatgtgctcgtcctcaacatctaagaacgtaatgttgccgttacctgacttaatgtcatcgttagcaccattgattaaccacttagtctttcctgcgccctttgctcctaagattaatttaaccataaaatcatcctccttataatatttaccttggtaatttgattttctcttcatctgttccaatatggaatcttttattctccaccaagactcgccccagttacaatgaatagtaccctcttcatctgacctgccgaccaatctttgtattataatatcatcttttatatgagtcaagaatatctctactctgtctacataatctctctgttaagaagtttaaactcatgagctttatacatcttggcaatcttagtgtgctccatgatatagactgtgcagtttaacctcatctgtatctgtcatgttaataaggcgcgcatcattgtagatgtcgtctatactgtcccatggcaaatcaagtatcaagtgagcagcctttctgatgccatacttagataatgtttcgcatgcatctatatagtcctttgtgttatgacacctatttagaactttaagggtttcatcgtttgagctctgaagccctagttcaacagttatctcaagattgtacttatccttaatatcacttaaaaacttcatataatcatcaaaaataaggtctggtcttgtagatatattgatgccaacaacatcttctgcgatggcgttcattatattttctttaaacttgtctaacggcatatatgtattagaaaagttttgaaagtaggctataaacttacttgctttgtggttcttagtaatgtttatcttattttgctctatctggtctttaacagataacttattagataaattctcaaagctaccaccttgtgcagtgcagaatatacatccgccataagccttagatccgtctctattaggacatgttatgttcaggcttataggtagtttataaacctttgtatgaaacttgttccttagatactctgagtagactctgtagagttttttctcatcctcaaagcttataatattactcatctacctcatttttcttgtagaattcctccataagttcgtcaacaattgcatcgtcaacaacttcaagttctacatctacaccgttttcattttcgatgtatttataaggataaacatactcttcttcctcttctacatcaagtgggaataagaatatatagtcgtctcccttaaagttaaatagatcaagtacagcacattctagctctgttccgtcatctagtgttatgatcattgtatcttcgcagtcacaatcatcatgttcgtgattatgtccacagccgcatccttcatcgtggcagcagcagtcatgttcttcattaataagatctttatctttactcatctttatctcctctttctaaaatttgttcggaaaagtcctcaaaattagatatattaactaattcaaggcttatatttttattaatttcgtttatgttttcatcagtaataaaagaaagttcaggctttttcttaaagtcataactaatttgatcaaggtagtagttgattaaaaagtccttttcttcctttgacatatctttatttctaacacttaaggcaactgattcatagaacttgtacctcaagaatattataaagccctcaaagtcttcaacatttgttcctttctcaatcaagaagataatcttgaagaataggttccatttgaagtctgtatttattagtgataatatttcatcgcctaggctttgtgtgaatgtgtcattaaacagtggctttctctcaaactctatataattagtgatagatccaagattttcctgtatctctgataatctgccaattaaatcgacaaactcttgtgagatatcctttgcagacttccttcttgccttcatgaataagtactcactaatcatatcgcaagagtctttgtagtcaatgatgtagccgagttcactcttaacctttgacttgaatatatcatgtatcgtcttagatactaatttgataagctgtttcttcttgttaacttgcaccgatgaatctgacctgttaaggtgattatatacactcattagctgcctatcaaccatagtcaagttatctttaatagttgccatgatgtctataaagaagtcttctgtaagtacatagttgtagttcttatataagactttgtggtctatatctccccagaatacattaacaagtgatttaatttgaagctcaaagtgtatcttcttgccatcatcatcaacatatttaccgtctatcttataaatttcgaaaccgttcttttgaatttgtggctgctcttcagatagctttaaatatatctttttattgatatgacttgaataataacctctgtcctctttataattgaataaatttagtaaatctctgtatatcttcttttcatcatctatgaacctacactcaatcctaacgccaatgatgtctgagatgttttccataaggttctcgggtgtcttgtaggcaatgtataggttgtttctaagtatcttctctctaagagacatcgcttcctttaccctgcctcttgcagctaaaaaatgatctttagcacagaaagtgttagtgaagaaattctctaatatctctaaaatttcctctaatttatcgttattctgttctagtaaatctatagtgtcatctataaaatcaaataattcaagcctcatcagctctcatatcctttcattaaaccaaaatttctggtttgtatttatcttttaagccgtcaattaccttcttgaatgcgttcatttgcttaatttgcataacatgagcgcgtacttcatccttaacttcttcaaatggtctaatttttgcttcattaatcttgtttaacttaattatatgatagccaaattgagtttttactggttcagatacttcaccaagacacattgagaatactttgtcatcgaattcttttaccatctgtcctctttggaaggtacctaagtctccaccattagcctttgatggacaggatgaatgatctttagcaaggcttgcaaagtcttctccagcatcaatcttagctttaagttccttcgccttagcttcatctttaactaagatgtggctagctgatcttgattctgcttccgagaattcgtctttaaactcttcataatagttttaagctcttcgtcagtaggctcgtcacatttaagagcgttcttaaatgccatgttagttaggatgttttcctttgctttagccatctctagtttgtactcgtcactctcatcaagcttttcatcaagagcttgattatataacatagcttgattaaccatctcttcaacaagtttctttaccccgtctttagattgaaattgcattgttaattgtggtccaagcatatttgcaaaattaactacatcttctttttaatttctttgccgcaaacttttgcgactatttctttattaatttccaaaatatcctcctcaaaatataatcgtctacatcattatattaccatatatacttattttgcaagactattttattcttgaaaatgtgctataataattgtaagaggtgattttatgaaatatttttaggtggagaaaatgaaaagtttacctatactctaagatgttaaatagacacggaattattgctggagcaactggtacaggtaagactgttacactaaaagtaattagtgagatgcttaataatgacggcatcaataccttcattactgatgttaagggtgacattatgagtcttgctgagaatggcgagagaaacgataagatagacgaaagaattgaaaagcttggcattgatgactaccaagttgacagcttccctgttgaaattttcgatatatataaaaaaggtgttccattaagagcctctgttactgatgtaggccccgtacttctttcaaagatgcttggtcttaacgaagtacaaagcggcgtcattgatgttatgtataaaatcgccgatgagaatggacttaagcttattgattttaaagatttgaagattatgcttaagtatatggcagacttctcaagtgatatttcaaataaatatggaaacgttgctaagcaaagtataaacgctatacaaagaactcttataagattcgaaaatgaaggtgctatagacttctttggtgaaccttcttttgatgttgatgatcttttattaaacagtggtgaaaaaggaacagcaaacatacttaactgtactgagctttatttaaactcaaagatgtatcaatctgttgtcatatatctacttagtcaaatatttattagccttgaagaagtcggtgatttggataaaccaaaacttgttttgttcctagatgaagctcacctaatttttaaggacttaaataaaaagatgcttgaaaatatcgtaactatcataaaacttatcaggtctaagggcgttggtatattcttcgttactcaaaatcctaaagatatacctgaagaagttcttagccaattgtctaatagaattgagcacgcactaagagcttacactccaaatgagattaaaaatgtaaagtatgctgcagatagctttagaaagaatcctaactttgacagcgaaaaagccatacttaatcttaaaactggtgaagccttagtctctactcttaatgaagatggagaaccatccattgcagagattacccttataagacctcctatgtcaaagattggtatgatagatgatgctgtgtttaatgacattgtaaataattctgattttaataaaaatataaagaaccgatagacagagagtctgcatatgagatacttagtgaaagatatgttaaaatcaataaagagatggaagaagaaaagccgaaaagaagcgcaaaagaatacagaacaaaacaaaatcaaaagaagagaaatgaagacatggctgataaagtcataaaagagttttcagcgcttttacttatcaaataggtaaaactgttgcaagagacataatgaatacatttaagaaaaattctaaataaaataaagctatagccagagcacaatgatatgtaccctccttagtaatttgtctagtaaggagggtacatataaaactaattcgttcttttatttatctatagataagactaataacattttaaatcttgtaattgcagttacattgtggattacatttgccggaaatactatttgttctccagattcaatctcgatttctttgtctccaacaagaagctttgccttgccctcaagtgccatgacaagagcatctccaggagccttatgaggttttagaccttctcctgcatcaaaagccattaaaataccttaaactcgtctttagatacaaggtcaatatttacgattgctccatctacataatctaaacagttaattaatttgattttctttccttttcaatattttcatttcatcctcctctaagttaattgcgatttctaaaatatactttttatatgtctctatgtcaaaagtttgtttttcaaaagtattaattcattatttataagttttcattattaaagttaatctcgccttttaaaacaaaatatattctttcttcagcatagaattcagggaaatgtccgtgttttggtcaagacccatgagtaagatatgacgatcacataaatctaagagtttcttgcttatagtttgattttcttttatgggtatgacctcttctggtgtcaatattttcccttgataatattttcattttaatctcctacaattctaattggtattacagcctcatattcttttcatgtttttatttttcgagtataacctctaccccaaaggcgtctttcatattttccttacagataatatcagacgttttgcctattttatgtctagcattttccattaacatcaagcatttatccgctatttcaagagcatgtgctgggtaatgagtatttataataacactgatattgtctattttggatagttttttgattaatgaaattatttttagctgatttttaaaatcaaggccactttctggctcatctaatatgattaagcttggatctgaaattaaggctctggctatgagaaccatctgaagttctcctccactcatcactgaacatgacttatctttaagattttctatagctaagcttttcataagattttctgccttttcatattctcttgcacctggttttgcaaatggcccaagtttactagaaagccctaacactaccatatcaattccagaatattcaaaagaaaatgatcttttttgaggaacatatgatatcttagaccataaatctcttctattaaaacttgaaatatcttttccatccataaaactctttcctagtttccatttttcaaaatcacatatacatcttataaggctagtcttgccaactccattgggtcctaaaatagataaaacctcaccttgattcaaacaaaaagataaattcttaaataatacattattttcatcatgataaaatcctgcatcttttatttctaatttaattgaaaccacccccggtttttctaattaaacttataaaaatgggagctccaattattgctgtaagaaccgatatcggcaactctattacagaaaccgttcttgataaagcttctattagtaccataagacttgctcctaaggatatactaaaaggtagggtgtgagtgttgttggctcctaccatcatccttgccatgtgaggaattatcaaaccaatccatccgacctgaccacacattgatatagatgaagctgtaataagtgttgatgcaaatataaaaataagcctagttctttttacattaactcctagactttttgcttcatcttctgataggctcatgatatttagcctaaatatcaatagtcttattatgatgactcccaaaattattaggggcgcagataacatcaaatttttataagatgatcttgcaaaagaacccataagccaataactgatggctggcaacttatctgtcgggtctgctgtatattttagaagagacgctagagcatttgataatgatgaaactacaagacctgcgagtataagcattatcgttgatgacctagttctactcttgccaatataaagggttaaaaccactccaattaatccaaaagctaaagcaaagacttgaatagataaggttgaaagcgataaaagtataccaattacagctccaagacttgcagctgaacttacgcccaatatatcaggagtcgccaaggggttcgaaaaaaccccttggaacgcaagacctgctgtggaaagaccggctcccactattagaccagtaataattcttggtaatctcacatttattattactgattcaagcatagggtcataatccctcccgcttaaataagcattgaaaaaatctacaatctgtctgatgcttagaggcattctcccaatagcaagtgccaaaacgcagatcaatataggtagactaattagtatcacatatgagcttgctgttatcttttatctttgataaagatttctttaatcatatatcaaacatatcctcaatttgttcatttgttaattcataatcataccatgttttataataatctttaatcattgcttttagatcatagtctttaaattcttctgggtaagttgattttgcaagccaagctagtacaagtggtccgtctggatttggtgtaaaccaattccacataccaagcttagtattatatacttttttatccttaacagctttcatgtttgaaaaattgataccttctactgaattttcaaatacatcttttgttgtaatatcaagaagaccaggtccatcaagataaagtatatctggattccattgataaaattgttcaatagaaactttggcgaacccttttgcttcattagctaaatttttaacaccaattctatttagccagaaatccccaaaaacacctttgccagcaaccattggtacaccttgaacatacttccataaaatcacaccagttggttttttactatcatctatttttgaaattctttcttcaacatcttttacaatatcttgacctgcttttataaaatcatctgtctttccgttttcgccaaatacatcttctaaaagctttaaccattgtgtgtacctatctattgggtcagctggtccatttgtaccaactgtagcaaatcctacacacggaatccctgtctttttaagagtttcataatgttctttattcgaagcattgtaaaaaataacatctggtttaagcttcattatttcttcaatatttatatcagattgactttgaactgtattttggctatcaagaagctctggagctatatcttttaaaactgtatttgagattacttgcttaagagaacccgcataaccaacaatatacggagcctttccatggtgataagccatataagtagataaaataggaatctggtctattactattctttcaattttctcaggaacctctatcgtgttacctgcgtggtctgtgattgtcctggtttttttattttcatcattagttttttctgtcttttctgtattttcttcctttttctcagtttgagctacttccttactttctaaattttgtccagtttttttattgccacaagcagtcatgcctgttaaggcaagcactgtcaagcataaaattaatgatatttttaatagctttcatctaatcctcctttttacttgctaaaactatataagaatttttgtatttttagagttctctaacattttacaaatctttccctattttcctctgcataagctttttataaaatttgcagcccctactggtccctcatcttttatgattgtatccctatctaagagaatcatcttgccagtcctttgtgaaaaaggtctaaaagaattttctataaacagtttgttccaattttctacggttagaggatacacattcatgtttgtaaatcttgaaagttgccttcttatatcttcactttcattttccactgccacatcatgagttaataaataaccgcctttttttaaagctctgtgataatttttaagagcctttgctttttcttcatttggaagcatggtaagcattgcttcattaataattaaatcaaatgtttcatcctcgaaatccaactttaaggcatccatattcataacttcaatttctttgtctagacctaaaagctttatattctccaaagcttgatctatgacaacttggtcattgtctatgcctattattttgcatttatatttagtataaactcttattaggttatctcctctattgcaagcaacttccaaaacttgcatatctttatcaatctgtacctgatcagtagccaatcggtcataagaccgccgcctggtctgagccttgttcttccaagcattttaaaaatcgtgtccaaaataattttactttttccatattttctcctttcttataaaaataattatgcatgtataattataataaaatctttattttattaatgaagaatatctatataattttgtcaaaaattttaagggtagaattgttttaagcaaaagaatttgtttgttaacaataaacaataaaaagattatagatgggatttatgagatttccgattattttctataaattcttcttgacaacttttgaaaatagatatagttatcatatgctaactaatgttattatacaactcgagcttttaattgtcaataattttgcataaatatttgttttattgaaaattattaaaatatctttataataatgcccgcatataaaattggccagagcataagccctggcttttacttgcataaaataagactagagcatctgccctagtcttaatatttatatttttcaacaaatatctttatgctcttatcattcaaatcagtatcttctatatcaagttctttatactcaatactatctgctacagtctcttttaatataaagtctttaaacttgttgaaaatttctttcaagtcatcacttgcttcaacagagattttaatcttgtcaagaacgtcaaagtcattttgctttcttagttgttgtacctttgagatgaattctcttaggtaaccttcatctagtagatccttattaagcttagtatcaagtatgatgaagacaccattttccatttcaacattaaagccttctttagactcaattcttacatctacataatctttcttaatctcagttgcttcaccattaagctcaatattttggtcagcgtgatcaagcttatctacaaagtctatgctattaacttttaataaatacttagtgaagtccttgatctttgatccaagtatagaacctgcaaccttgaagtttggttttaagttgaagttcatatacttctttaagtcgtcctcgtaataaacatgcttaacgttaagctcttccttaattaggtcagttaagtccttaaggtcttccttatacttaccatcgataactatctcattaagaggtattctaaccttgatcttagcattctctcttgatgatcttccaagcttaacaagtgtacgaacaagatccatcttgaagataagcttttcatcaattaaatccttgttagcctttggatagtagtctatgtgaactgactctaagtcacctagtctttgatatagttcctcggctgtatatggagcaaatggagctataatcttagaaacgccaagaagtatttcatatgttgtttgtaaaacagccttcttgtcatcatcaagttctgtagcccaaaatcttcttcttgaacgtctgatgtaccagtttgatatatcttcaacaacaaaatcttgtatcattctaacaacatttgttaattcaaacttatccatctcttcttgtattctttcaagaagcttgttgtactttgcaagtatccacttgtctatatcacttctcttttcatatggcacgtctaatgactttggatctatgccatcagtttgcaaatacatgtagaagaagttgtatacatttctaagtgtgttaaagaactttgaacttatatccttaataccgtcaacgtcaactttctttgtagtccaagctggtgatacatataataagtaccatctaacagcatccgcaccatattcttcgaatagttcaaacggatctatagtattgcctctactcttactcatcttcttgccatacttatcaagaactaggttattaacaagaacgttcttatatggagacttattcatcatatatgttgatatagcaagtaagctgtagaaccaacctctagtttggtctataccttcgcagataaaatctgctgggaacttgtgatcaaagtcttctgtgtgttcaaatggatagtgccattggctaaatggcattgcgcctgagtcgaaccaaacgtcaattacatccttttctcttgtcatcttgccgtggcaatgaggacattctaggtgaacatcatcaacaaatggtctgtgtagttcaatgttttcatcaatattttcaatagccttttcctttagttcttttctagaaccaatgctctccatgtgaccgcactcttcgcatctccatataggaagtggtgttccccaatatctagatcttgatagtgcccagtcttttaaattgtctaaccagttaccaaatctcttttcaccaacatagtcagggaaccagttaacagtattgttattagcaacgattttatccttaaacttagtaacttctatataccaagatggctttgcataataaagaagtggtgtatgacacctccagcaatgtggatagttgtgttctatcttttgttttctatataacttgtgttccttcttaagttcttctatgattaatgggtcagcatccattacccacatgcccttccatggtgtatctgtgtacttaccttcttcatcaactggattaagaacaggtaaatcatatcttcttgatgtattatagtcatcttcaccgaaggcaggtgctgtgtgtacaataccagtaccatcttccatagtaacatagtcagcttctgttatgaagaaagcttttttgtcgcaatgtagatatggaagtagttgttcatactcctcaccaactaggtctgaacccttcatctcagcgatgatctcataattttcagcatctttttcaagagcttttttgaatagagcctttgctaaatataaaatttctccagtcgctttgtgttttatcttaatataatcagcatctttattaactgttaagcttacgtttgaaggaagtgtccatggtgtagttgtccaagcaaggtagtattcattgtctgtgccttttttcttgaattttgcataaactgattctgttttaatcatttcataaccttgagcaacttcatgagatgcaagaccagtaccacatcttgggcagtaaggcataatcttgtgaccttcgtatattagtccatccttaaacatcttgtctaatatatgccatactgattcaatgtagtcattgtcaagagttatgtatggatgatcaagatcgattagataagccatcttttcagtcatctttctccaaagtgattcatacttaaatactgactctttacatttttcgttaaactctttaacgccatacttttcaatgtcttgtttattatgaaggcctaattgtttttcagcttctatctcaacaggaagtccatgagtatcccaaccagcttttctgtttacatagtaaccttgcataaccttatatctgcagacagagtcctttaaagttctaccactaacatggtgaataccaggtttaccgttagcagttggtggtccttcaaagaacacatatctattgtccttatctcttttatcatttgttaactttaataaatcgatgctgttccaatattctgatattgcgtgttctctatcagcaactcgatcatttgataaagcttttaagtccataattacctccttgaagcatcgtatttcgcttctatttcttttctaagtttatatacaagcgtctcgctatccagttcaacgctattataatcaatacattcgccttttttaatatctctactaagagtagcaccttcattgataattgaaataggtaccaggttcttatctctagatttttcaaagtctatgcacttaccgtagaaagtatatcctcctatataatctagtttatcgcccttcttcatatccttcttagctaccactacaacatctgagtaaggtaattcagatattggtttaatagcttcaagcttatcaaagtgtgcttttaatactgtgtttatagtttctatactagttagatgatatggcctatataatacatagtttggtccatcacccatctttaagaagcgcatcaagtgatcaatcttttttaaatcacttttcactataacaaaaacgccgggtgctataccgttaacatagtcaactataccgtatgaattaagtataccgccttctgacttaaggcaaagtttcttatcaagcgacttaatgtctgacttaacaccgtgccctccgtcaatatctactctaaagccagtagcattgctcatagtcgccatctcaaccatagtcttagtgccgtcaacaaagcttgcaagcatctctttctttatgcctttctcttttgcggattcgctaacagtatctggattggcctctaagtctacttcattgttctttcccttgcctatagcaagtacatcaaagcccataatctttgcttcattgtaaagctcaagaactgttcctggctcgtcgccgtctatgcctgtatatataagtcctttttctttagcaatctttgatagtatagtgcctacacagacatcgctctctaggttaaatgtaattacgtttttaccattcattagtgcgttatagctaatctcagtgcctactataggctcgcctgttgcatctatcacataatcaatgtgctcagatttatataagagctccttgtcttcgcatatataatacttatttaaatcttttatttcatcagcacttgtaattttaacaatcttttctttatcaatacctgctgctaaataagcctcaattgcatcttcaatgtgtcttgaagatattagcaagggatttaaaacctcgctttgtatatattgactaactagtgccttgcccataaagcctgctcctagcaatgaaatatttatctttttaccttgttctttatattcataaaatttcttttgataatttatcaagctttccacctcaaaactatatcatcatacgcagccatagctgacatccatgcaaagcttagattgtagcctccacacgggccgtctatgtcaatgacttccccgatgaagtataaacctttaagtttctttgactccatagtcttagtatttatctctttggtatttactccaccaaggcttatctgaccaatgccatagcctttattctttataatttttagctcaaattcttttagtatctttactaatgtatgtaattgtgcatcgcttaggtctctagctagaatgtctttacttatatttagcttgtcaataataggtactataagtcttttgtgtaaaaatcctataaagaaatcatcaagttttttatatccgatttctcttcttctatcacttagtaatgtatatagttcagattcacttaaagtataaaaaatatctatgctgaacttataatcactttccttaccctttatatatcttgacaattgaaatactgttggccctgatagaccgtagcttgtgaataaaacatcatcaatattataagtaattattttgttatcttttattaaacttaatttagcttttaatctaagtccatcaagatgttttagatacttgtaatcgcactcatatggaactaaggctggctttgtttcattaattttcataccaagcttttttatctgattaaaaagatttccatctgagccaaatttaggcatagcagaaccgccacacgccacaactaagctcttagccttataaatatttgagttttgatctttaagtacaaataagtccccatctttattaaagctttttacaaagacatctgtttttatagtaacattgtttctttcgttttcatatctaagcacatcaagcacgcttgaggcttgtaatgacattggatatactctatcttcttcaatatatggatatatgcccatagatttgaacttatactctatagatttatatccatatttatttattatatatgatgtaaaatctgcatcattatatgggttctcatcaagcttagtgttagtgtaattgcatctgccattgccagttgttagaagctttttgccaactctatcgtttctctcgagcataagtatatttaatttatccttattaagagctccgaaaaatagtgctgctgcacctgctcctataactatagcgtcatatgtcaattctatccaccacttcttttaatatcttgccaaagccatcattaaagacaagcttagcatatctatcataagatgttttatctttatttataataataagattttctgagttaaagtatctaattagtccagctgctggatatacttttaaagatgttccagcaactagcaataaatctgccttcgacacttcacttatagcatcaagcatgacatcttggtctaaggcttcgccatataatacaacatctggtttaattattgcaccgcactcatcacaagtgcatgtgcccttagagtgcttgatatacattgcatcaaactctttatgacacttagtgcagtaggatctgttgatattaccatgtagctctataactcttttgcttcctgcatcttgatgcaaattatcaatattttgagtaataacagccttaagtatacccatttcttctagtcttgcgagtgccttgtggccttcattaggtttaacattctcatatatgactttatctctacaaaagtcgaagaatatgtctggatgagcatgataaaatttattactcaaaacaacttctggttcgtatccttcataaagcctgtcggtataaatgccccctgctcctctaaagtcaggtataccgctttcagtcgatacgcctgcacctccgaagaaaaccatatgctttgacttttttacctcttctacaagaagatcaatatcaagcatccctctttactccatttagcattgcgtttaataaaataccaacgatagcagctaaactaagaccgttaaggctaatattggaagttattggaagttctatagaaaacccaaatagctctttaaataaaccgcctgagaaacctataaataaaattgatcccataactattatatttttaatattaaatttaacatgattatctctaatatttctaattccgataaagcctatcattgagaataacattatggatataccacccataactgcttgaggtatagttcttaagaatccgccaagcttacctacaaagcctaggataattgcaaatacagctgcaagtcttagtattgatggatcgtaattcttagtaattgctaaaacgcctgtgttttcgccataagttgtattggcaggaccgcctattagtgaagcaaatactgtagccaatccgtctcctaataatgttctatttagaccaggatcttcaatgaagttttgaccaactactgctccgttagtagttatgtctcctaggtgttccataaatactgcgaatattataggaactataattattatcgcttcaatgtcaaatagcggcaaagtaaagtttggcactgcaaaatattgagcgttatttatcgctgtgaagtcaactagtttaaaagcaactgatagtacatagccaaatataactgcaacgagtattgatatttgctttaagaaaccttttactagaaatggccaagctacagcaagagctagagtaagtccagctacaatatatgatgtctttgccatattaaatgctgttggcaatagattgaagcctataactataatcataggaccaattacttgaggtggtagtatcttttgtattttttctatacctatgcctctgatgaagaatgaaaataatacatagactaaaccagcaaccaacatacctccttgagcgtatcttaggtcgccatactttgttgctacttgcactataactggtataaatgcaaaggatgatcctaaaaatactggcacttttttctttgtgcaatagtgaaatataagtgtaccgcagcctgcactgaaaagtgctactgatggatcaagtcctgtaagtattggaactaaaactgtggctccaaacatagcaatcaagtgttgtaaagctaaaatcgatttcttaatactaagagatgctttcatcttatgcctccaattcttttaatttttctgcttgttcgtgagttagtagagcgtctatcatctcatctaaatccccgttcaaaaagtcttccaatctatataaagttaaattgattctatgatcagttacccttccttgtgggaagttatatgtcctaattctttcagacctgtctcctgaacctacttggcccttcttaagcttagctagttcatcgttttgttcttgtagcatcttgtcatacagtcttgatttaagaaccttcattgctttttctttgttctttaattgtgatttttcgtcttggcatgtaactacaagtcctgaaggtacgtgtgtaattctaacagctgagtcagttgtattaacgcattgtccaccgtggccgctcgctctataaacatctatcttaagatcgttttcattaatttcgatttctacgtcatcagcttcaggcataactgcaactgtcgcagctgaagtatgaattcttcctgatgcctcagtctctggtactctttgtactctgtgtaccccagactcatgttttaatcttgagtaagcgccttttcctgttatcataaatataacttctttgtagccaccaataccagtttcgttagtactcataatttctgttctgtagcctctcttatcagcatacatagagtacattctaaataagtcgcctgcaaatagtgcagcttcttccccgcctataccgcctctgatttccatgataacgtttctttcatcattagggtcctttggtataagcataatcttaaggtcttcttcagctttctcgatgttttcttgcaaattctttaaatcttctttagcaagttctctcatttcatcatcaagattttcattaagcatttcttcagtatccttaagttcttttagataagtttgatattctttatatctatcaactattggctttaagtcagcatactccttcattgtcttttgatactctttcatatcttttaaaagatctgggtccataactttttcgccaagttctttgtacttgtcttcaataaaatttaatttttctaacattttctcatctcctaaatgcaggcagaaataaatctatcaaagccttcaagatccttgtagattttaatatttttataattattcttttctaatatatcttttacaatatttccttgatcgtatccaatctcgaaaaataccattcgtttaatcttctctctagcctgtttaatgattttttcatagtattcatatcccaaatcaccgcctactaaggcaagttttggctctttaaataaatccgcttccagattaatatattcttccttagaaatgtacggtgggttcgctataagtatatcataagtgtcagtaatattatcaaataaatccgataaaataaaatttacagataaattgttcagtaaagcattttcccttgataagtctaaggcatcttttgaaatatcagataagcttaattctactgatggattctcatttttaatagcaagagcaatggctccagttccagtgcacatatctaagattttgtcaccagctttgatgtatttattaacaatatctattaattcttcagtgcaaaatcttggtattagtgccctttcatcagtttttagaacaatgtttctaaaatacttcttgcctatgatgtaagccatgggagtgtcattcaacctcttatttagcagtttaaaaaactcttcttcgtttacttcaaagtctttgttcaaagttaaaaatagcttatccttctgagtaagatgctctaaaagcatgtatatctcgcccatagggttgggaattttctttcctgactcttctatatctaacaaagccttaataattaaattcttaactaccaagcgtctaaaccctcttcactaggtattacttctttgactgcagcgattgctacttcaaccatatcatcgtccggttccttaactgtagctatcttttgtagccatagtccaggtttggaagccatcttgcaaactccaacgttatcgtacttgcctatgaatctgttgatttcgtatgatattgcagctatgataggcagtgcgacaattcttgagattattctcataagtggagatggccagccaaagaatgaaagcacaataattgatataagcataaccatgaataagaagcttgttccacatcttggatgatacttactcatcttttgtacgttttcaactgtaagatcaagaccgttctcataagcaaagattgtcttgtgctcagctccgtggtacatgaatactctctttaaatctttttgatttgatattagagttatatatactaaaaatatagatatccttatcaagccttctacaaagtttagtaaaaatatattattgattttatcctttaagaagttagctatgaatgttggaatgacaacaaacattgttatagctataaaaaaagaaaaaacaaaagtaaaaatattaaacaaagtatccttaaatttattagtttcctttttatcctcttcgtcatcatagaaggaagcagaataatagagagctttagtgccttcagacattgagtccactagctttgatatacctcttatgaatggcaatttaaagatgagcttgttgttcttagctgattcatcttttacacttacctctatctcgccatcaggttttctaacggctatagaagtcttttctggccccttcattagtataccttcgattaaagcttgtccacctatacttgttttaaaattcttttcatttttcacctatataatgaaaattagcagaaaagtctgctaattttcgtctttttgtatctcttcttgaatttctctacgcggccaccacgttcagtaaacttttgtttacctgtaaagaatgggtgacattcagagcaaacttctacttttaactcgtctcttgttgaacctgtaacgaatgtgttaccacatgcgcatgtaacagttacttctttaaattctggatgtattcctttttcatttttcacctctcttatcacattaaccactagattatatcatataaaattaataatttcaagtattttatagaatttttaagaattatttaattagttccaaacaataatttgttgttttatacttcagtctttcttgaagcaccttcatcttcttaagattttcttcaagtatctcttttgactcttcaagtgaatgaaatttaagtatattgttgccatctatctccttattttctttcaagtcgtcaaggtcatcttttatttgaaagctcattgcaaatagtcttgagaagattagaacgttttcattgtatcttcatctttatcagctaaaatacatgggactagaaaagctatattaaatagtcttcctgtcttatttagtatcatagtcctatattcatcataagtatactcgcctgactcgtcactctccatgcgaatgtcttctgactgaccaagtatcatgcctttaacacctgatgatctatacatgtaactcattgcttttaatatgtttgtattattactatctttaagcttatgagctagatattccatagacaaatttaaaagtgcatcgccacacaaaattgcgtttgcttcgccatattttttgtgaactgtaaatttaccgcgtctatactcatcattatccatagctggcaaatcatcatgaactaaggagtaattatgaattagctcaagtgcgaccgcaaaggcatttattagcttcttatcgagctctagctctcttccaaggctatatagaataaagggtctaagcctcttacctgcatcgtatgaagcgtattctatggcctctgagatgacgtcatcgttaagatagggcttaagctccataggtagccttttgtcaaagctttccttaaatgtattaatattcatcatcgtcgtagtccaaatcgtcatcgtgtgcttcgtcaaagtctttgaatgagtctatagtctcaaaatcattgtcttctacttcgtaatcgatctctttagatagatttaaatcgtctatctcaatttttttaatcttcatcttagcttcacttaattttttattcagttctttgtaaagttttactgctttttcaaattcatctatgctctcatctaaacttagttcttgactttgtaattttcaagaatgtcatctaagttatctaatgtttttcataatttaatgtcattatttacctccaacacatgagctttaatgctactattgtatgacttaatgaatatatccataccttctttaatattattagcgtctttaattgttttattatctaaatcgcttaataaaaatagcctcttcttaaagtcttataaatatcatttatagtaagtcttagcttgaacttttgtagatcctcagtcattgcacttaatttattattcatagcttgatttatgcttgttattctcttttcgatagtattagtcgattcgtctatccttttactaactgatgaatatataagccttgaagcgagcatatcgacttttctctttagagtagatgtacttatccatctctttttaataagtatcatcagattgtttgtctttgaataaaattatcaattagagttttagtatttaagctgtttatcaaatctcgtttattctttaaattagcttcttcgcttgaaatatagtgattcattaaaagcttatctgaattatgttttgatcaagtatatctggtagttcatagtagtacttggatatgatctcagccgcttctgatggtgttgcgcatctcttatctgctacgaggtctgctataaagctatcgatctggtgaccaacggctgtcattacaggtatctttgatgcgaatattttcctagccatgctctcgtcgttaaaaacggctagctcttcgtagctaccgccgcctcttgcgataagtatgagatctacatcattcttttgattaaagtagtccagtccactattgatattgttaactgccatgtccccttgaacgaaggaatcatatagaattatgtcaatcatattggttctacgtctgagcacctttactatatctctaaagccagcgctcgttgatgatgcaattagtccaagtcttcttgggtactttggtatttcttttttatgttcctcatcaaatagtccttctttttcaagcttttcaagtgtttttctaaactctctcttaagcttgcctatgccaagttcttccacatagtcaacattgatctgataagtactgttttgatcataagtagagattttaccttttataaaaactttcataccattctcaagtgtaatctcttcttcgttcttataacaatagaaggcacacttaatcttggagctttcatctttaatcaaaaagtatagatgccctgagttgtttttcttgtaatcagctacttctccttctacataaatctcttgcaaaagaaagtcttggctcaaaacatcttttatatagtcattaagtcccgataccgtgaatttattcatggtagtagttccttacataatcacctaaaatcgcatttataaacttgtaagagttgtcatcagaataattttttgcaatttctacgatgtcgtttataacaatctgataagcgatatcactttcaaattttatctcaaaaattgctaatcttagcaaagctctatcgatgtatgaaagcctttcaagttttgcatcttttagaacatctttgagctctaaatcaatcttaggcaagttctcaacatatagcttagctctattggctaatttaattttgttctcatcacttatttcaagtgtttcgaagtatgcatctaagtcatctacacttgtatatttatttagatcaagctgatatattaagttcattaagtttaatcttgtcttgtcgtatgacatattatccctcactaaaaaactccagtaaaaattactggagtttaatcttattacttagtagttttggctgcttctttaacgccttttacataaacgttaacttgcaatacatgtatgtcagtcatctcttctacagccgatttaacgctagattgaatttcatatccaaccttgtcaatctttgcgccatattcaatgtcaacatatatgtctataatacagccttcttcactgctttcaattttaattggtttattaaaattctttactcctaataattcagtaatgttagatcctataccggatgataaagagcaaacgtgttcaacttcacaagtagccttgctagctatagttgctataacatcatcagatatagtaatatttccaatattattattttccatagcttactctacttagagtcttcctcctcatcatcttctgggtattcgaaataatcatcgtcgtcatcatagtcataatcatcgtcatcataatcgaaatcgtaatcatcgtcgtcgtagtcttcaccatagaagtcatcttctaaatatgaaagatcttcgtcaacttcaaatatatagtcttctaggtcttcaagtcctgctgcgttatcgcaaacagtgtcagccatttcatcaagaatattgatgatttcagttaaaatcttttcttccttactttcgtccttcaagcctaagccttctgcaagtccctttaaataagaaactttctttgatagttcgtacatttttctacctccttaaactctagataaatattctccacttcttgtgtctatcttaattctatctccaatatttacaaatagtggtacatttaatgtaaatcctgtttctacagttgctggtttagtagctccagtagttgtgtttcctttaacaccaggttcagtttgagtaacttctagttcaacaaagtttggtgcttgaactgaaaatgctttgcccttgtagaatctaattacagctgtatcattttctctcaagaattgaattgcttctttaacttcgtctttgtttaatggaagttgctcatatgtctcattgtccatgaaataataaagttcatcatcgttgtatagatattgcatttcttttgtttccaattgtgcatcattgaacttttctgttgggttgaaagttaattcctttgtagccccactaagtacgcttctgatagttgctcttacaaaagcagctcctttacctggctttacatgttgaaagtctaagacttgataaacgtctccatcccattcaaatgtagcgccatttctaaaatcacttgccgataacatatatttcctcctaaattcaaatatctacaactattatatcagtaattgtataatttaacaagtatttttacaatattgaaatttttgcaaagaaaagtcgaggcattctagctcgacttacttatctttattattcctttatattctttgcactcagtatatacagttttaaagatttaagataacttatattggactttccttttatatctaaaacatagccaaatatatccttgttttcttctacacttaaagttccattgatgataataagaccattgaagtgaattgaacccctaacatttatattgccatctatgattagtatgccacttccatctatatttgcgttaatgtcattattaagctcatcttgacttatcttaactatggccttgctaaaattgaaagttctatcttcttcatgttctatatctgaaaataattattaatctcttctgctttaaactcttgaacattattctccaagatattgttataaaattttctttctcataatctcttaaatgctctataaagaagattttgttcataagagtatagtatgtctctttaatcttttccttattgtttgataattttctgagcaaaaattttaaaagcacttttattggcaacgtcgtatgttgctaaaacaacttttgattttcatacagactataatcttttgattttaaatcatatatctcgccaccgttctgatatgtaccttctatatctttaacaatgacattttctacagattcacagttgtaataaaactgtttcattctagatctgttaagatacatcattctttctatgcttacatattcaaatagatatattaatagagctgttattaaaatattactgataaaacaactaagcttgcactagctttttcattctatcacctctacatatcttgtgcttaatatcttcttatattctttatctttaaattttagattttataataatattatcatcagggttatatgtgaacgatagatctttaactccctttaaaaatatgttttacctgtcagctctccacctgcttctcttttgatcttgtcattatcaattatatactcacaagttttaaatttacttctgcttctcttttcaaaatatagaattttattaacactaacggtattgtaaaggtcaaaatcattttctataaatgaaaagaatagattgatatcatcttcatcctctaagttctcttcatatcttttgtaaagctggtaaaattcttaagcacagagcttgctccaaacaaaacaagcgataagagaaacaatgcgacaataagctcaagtaaggtctctgctttttatttgatgatctgaaattcttcatatatcttaccctcgttatcttgtattgaaagtttaaatgtgtataagtcagctgtgtatgactctttcacaagattaaatttaatatcatcgcctaagttttctttaatcttatctgtcattttgtaaacatcttcactctcatctgaccttattatttccattgcattgcttgcaaaattgtcaaactttcttatcttcttcgtatctctttctaacgccataaaatttttcaaaaaaacagacagaaaaagtacaaagattgaaaatatagcaaaagaaattacaacatccatcattgtaagtgcttttttatacttcttcatacctaacctgtcctccaactgcagctattattacattatattctttgttatttttattagacttaagatgaaaattaaaattgccgctagcgctttttgttccaccttcagatgtaaaagagtaagtttcattatttaaaaactttagctgctttaatttatacacaatttttgcattattaaggttagaaacaactatctcgtcatcttttacactaagttcgacagttattgattgcataattgcactaacccttgccttcttaactatttgcaccacatttttaacttcttctctttcactaaaattagtaaagtgtgcataagcaagtataaacatagatatgattatagctgctatgcttatagaaataactgtttcaatatatgtgaatgcttttttactcataccttatctcacctatagataaataaaaatcattttcattatcgttaataaattcaattgctactaccttagaatgtttatagtcatcacctaagtagaaatattttaaatttgatattctgcttaaagctatccttttttcaatgccttgcgtctttatcactaaatttgcatttgtacatccttcaaagtttacattaattatattcttacaaacacttatatcatttttagctctaagtgtaatatcaccactttttttatataatacaaggctgtctttgctttcatgaaaaacactcgcatcatttatttgccatgtatctagtaatgaattgtcatcgttatcaagtactatcgcatctaaatctgcttcttcatcttcaaaatcttcattatttatctcgtctatattattaataagatcatacgtattgccttgcgagttatctagattagcaatatctatgttattaattaaaatattatttataatctcattcttatttctttcttcaccgttaatatctgccttagcaatactaatcttctttgctttttttagtttttcttcatctttgccgccagcaaagttaaatttttctttaatttttgtattctcatacttaggtaattcttttttcataggtaataatatattagcaaaaattaatactaatattatgagtcctttatttatatagcttctcatcttatcaccctcaaaagaagtatagctaacaagagaacaataattatatctaaagctatatctataaactttgaataattaaaagtcttttatatttttatttaatatatcaaatagatctttaaaataaattgcgttacttatctcttcaagctcttttatcttaagcaaaactaaaaccttgccgtctgtattattcgcttgattgactatgtagttatatagctgctctttatctaaactatacaaattaatgtcaaagcttcttctcaaaagacatatttagcttatcaaacttatatatcgccttgtcagtaataatcttttcaatatcgtgttcttttaaatttaagctgagtatatctatcttctttaatgtagataaatatttctcaaaacactcatcatagtcatctaatttagcaataaagctgtctttatttaaatatttattatctttaaacttttgaataaatactttgtgctagcctctttatcactatcgtcataaaacaattttctgctactctacttgttttattgttcaaaaatatatgatgagtcaatataaataagattttcactatatatgctccttaaataagtcaaaagctttaaagcaaaaagcaaagcttacatacggcactagtctaactgacttgtccttactcttctttataaaattattaattagtttaaatagtattgctagtaacgttgaaatgataataagaaataaatattcctcaaaaggaaatatcataaaagtaaaaatataaatccacatctccatcaccaatctgagaaatgtatttattttaaaatatgcgaaaagattaaagctatatattgccaatatctttatgtatggcacatgattaaatatagctattagtgatacaataaatattaaaaataaaataaaactattatactgggcttcttttacatccttgtatgatatataaaagaactagagataagattatataaagctactagcatttcatttctttattatttgaaagtgccaccgccagtattagctgggcttgttttagttcctgtagtaatcttatctgggctaacagtaattacaccattggcgtcaattttaacggtatatatagtagatctattttgagctatggatgaagggactttaacgtcattctttaagtagccctctttaaacaatgtctcagaagtcacatcatgtttgtctggaaactcattgaaatatagtagtgcaactgaacttatttggtcaacatttgcattatgagcagttctttccgcactcatctttatagctttataagctggtatagcaacagcaataagtattgctactatagctatagatataatgatttctacaaaagtaaatccttttttgcttttacacttcttattcataatctttcctccttctaagaaataatgcttgtcatcgagtcatacattggtttaaataccataagtaagattagcatgattactaagcccataattatagtcataagcggctctatagagtttacaaacttatcaagtcttctctttaagtctcgtttatatagtgacaaaacattctctataatttcaacgagatgctctgactcatatccagttatcaatatggtctttacatcttctaagaaaatatgacttgaattaacaacgttttgaaatgtttctccctcgtttaaactcttagtcatcctttcaaattccgtccttaggtaaattaaatcgaagtttttagagaagaaatcgaaaatttcattaactttactaccagacttaagcatgcttagcatataatataaaattctgtaatttattctagacttatataaaccgtttttgattcaagcaaatattttgcttaaaatataaaatttatcattttgattaagtataatgctcaaaattacaataataattattccaagaatataataaatatagttatactttatagaattgcttactataagcaaaagttttaaactatctggcattagattagtatcattgtcaaataaatatgaaaattgtggaactaaaagactataatcatgattataaacgcaatcaaggctagcattaaaaacttaggtttaatcatgatattgctgatcgtactcttgtactcttcttgttcgtaaaggttctcgcttatctctaatatttgctctgaaaggtcttttgagtttttgcttgtttttatatgttctgacttctcggctatccttaagcttaataaagataaattatcaagtatgtctagctttgatagtatatccgacaatgtgaatccatgctcaataagatctttgatgagtaaataataattctttcaaaggatcgctaagcgctgaagaactttgatacatttgttcaagaatttgtggcaggttgttatttatcttcaaattaaatgcgataattctgaaaagtttgctatgtcctttcttcttacgctgttaattttaagtattctataaatcttagcaggtctaaaatacttaacactcataaaatcaatattagaatctttagtcttaagaaaggcttcgtagatgttctttgcgctcacgcttttcgctgctgcatcttcaaatattatttcatatttcatttatgtcgccttctttaaagtccatgtatgtttttcatctataaaattattttcaagcaaataatttatagagtcttcaaagcttacataatcagatagcttcttcatctcattgtaaatttcacttgttagttttgtattgttctttagtaacaagtctcttatcttatcattaataagtagtatttcaaatactgcaattctgccaaagtatttatcattaccatcttgagctattaggtcttgcttatcataagaagacctcaagcgcttaacaagtctttggttaattattgcatttagagaagtaaatagataagacgcttctacatccatttctaaaagtctgttgatacttgttactgggctcatactgtgcaaggtagtaataatcttatgaccagttaacgaagctctaacagcaatttgtgcagaatcttcatctcttatctcgcctatggcaataacatctgggtcctgtcttagtatggctctaagtgtgtttgcaaatgttatgtccttataatcatgtatttcaatttgatcaatatcattaaccctatactctactggatcttcaacgctaactatactaaggcgctctttgtctagattattaagcatggtatacatagttgagttcttgcctgaacctgttggtcctgtaataatagtcatttgatacttatacttaacaatcttttcgaataattcttttgctttgtcggacaagccaatgttatcaacagtaaacatctctttattgtttagaatcctaatacaaattttctctccatatattgcttcgataaaggatactctaaggtcaacttcgccatgactaaatcttccatcttgtggtgcgaatttaatcgcagtatcgcactcagccttaatcttgataatgttaacaatattttgataagcatttttattaatcttttaaaaacacaagttcgccatcaatcctgagcctaattaatatatacttatcatacggttcaaagtgtatatcactagctctattatcaatggcgtaatcaataatattttaataaattcttcagcttttgttgtttgaatttctaaaattcctttatcatcatataaagaagatagtttattcatttgccttccttctaatcatataattatattgaactttcttatcatatggtagataagcttccttcataggtgtgtttatattgtcaacctcttgcatgttttcatcataaatcttctcaatagtaaatttatcataaaacttaggtccaaatatttctacttcgtctcctatagagaatttgtttctcttgaagcttcataagctttttgtcttcgtcgtaatcaattactttagcaacaaagtcatataatcttatatgatgagttgtcatatgttaaagaagcattttaacatctccaaagaaaatgcagtagtaaagtctctgtgactaactttttatttcgtcaagataaacattgttatctctattgtagatgtacctatctaaatcttcgtaataatcatcaattgcttttctatattgattaataacagttgcaacatagtactcagacttaactctaccttcaattttgaatgaatcaactcccgcttcaattaactcaggaatgtaatttatcatacatagatccttagagttcattatatatgtgcctttttcatcctctgttattggataatattcacctggtctagtctcttccattagataatatttatatctgcatggatgagcgcaatcgcccatgttagcatttctacctgtcataaagtttgataaaaggcatctacctgagtagctcatacacatagctccgtgcacaaaggcttcaatcataattttatcttttacttcatcttttatctcttttatctcttttaaacttagttctctagcaagtataactctatctgctccaagactgtgccaaaattcaacagtagcagtatttgtaatattagcttgtgtgcttatatgaatttctttgcttggtgctagcgttttaaccttttggaatataccagggtctgatacaataaacgcatctacacccgcatcgtccatgctttgtatatattcatcaacaccttctagatctttattgtgagatatgacatttaatgttaaatatacttttttatctaaactatgagcgagctttgttgcttcttttatatcatctaaacttaaattcttagaagcagttcttaatccaagcttgtctccagctagatatacagcatcagctccatattgtatagcagttttaaattttctaaatctcctgctggtgctaataattcaacttttttcatcttactccttccttaaaagcaataagccatcgtgaacagtaagtaaacttgctgtaaacctcttatcgcttttagtatcttcaataaatttttaaattctttattatggttctatatcgtttattgtcttcatctttagctacataacctctaaataaaatgttatctataattatgagagcattatcacttgttaaatcatatactaagtttaggtactcttcatactgtgatttatttgcgtcgataaagcaaaatcatatttctcattattgtccatgcttttcaaaacgcttatcgcatcatcattaaaagcttttattttatttgacgagtcataatttttaagattttcttctaatatcttaaaagtctcttcatccttttctatggttaatatattagctcccgaagcttttgccataattaaagatgaatatcctatagccgagcctatctctaaaatgtttttaggcttaatagttttcagtattaactctaaaaatcttgccacgtcttgagagacaataggaaccctatttgacttagcatactcgactagttcagtaaaagattctcttttagaggaaaaatcttctacgtagttaaaaacgtcctcatctataaattgactaatcattgttgctcttgtattcctttttatcatctaagaacttattgtaatcagatgagaagttatgagctccatctgaacccggcttaactacgaagtataagtagtcaacatcagctggatgaaggctcgcaacgatggatgcctcgccaggattgcagattggtgcaggtggcaagccatcatgtgtatatgtgttaaatggtgagtcaacttttaaatcttcatttgaaagttttggctttctctcgccaagcgcgtattgaattgttgcgcaagattgaagtcttatattcttctcgattctatttaagaaaactttagctattataggtctctcctcatcaagtttagcttctctttcaacgatagatgctaaagtgataagcttattcaaatcgtcaacttcactactaatcttgctataaatattattaaaagcattgagcatcatagtgacaatctcttcactactcgagcctatcgcaatatcgtaggttgcaggaaataaaaatccttccaaagtatcgttattaatacttgataaaaattcatatttttctttgtatttatcaagattcttgcattcatttaaaaagtcttcacttgaaacaagacccttttcttctaatctttgagcaatacgtgttaattcgaagccctctggtatagttactttaacagtttctccttttttaccctcacccttgcctgcaattatatttgcaatttctagtaaagtcatagattttttcaatttaaaagtaccgctttttatatgtttttcaagatcgttctcctttagtacatctttaaaagcagttccattcctaataattttattttcataaagctctctcgctacgtcagaagcaccgcttccttcagcgatttcgatagtatattcagtatcgtcatttacatcgtaaggtttatacatgctcgatacgcatgagtttaccttccatataattgcaataactataagtattaagacagttattgtaattatccttctttttcattaaatcaccttttaattctgttatcatagatataatatattattgatccaaatactgcaacgcttatagcttctccgcccatgatacctaatactgttgtaaaatatggaatatttgagaaatatgatacccatattgacactaaaatccatttaatattataggtggaagcatagctaaatacttagattttgattttcttgttaaatatgcagctactagtgtaactaagctaccgcaaataatatctatcatgccatagcctgacataaaagataaaaatatgtttgatattaaacatcctatgaataatccaggaactgctgcagcttccattagtggaagtactgttaatccttcagcaagtctaagctgtatcggtccaaatgttaattgttggaacggtaatattgtttgcaatagtataagtattgtgtaaagtgtagcaattaaagccgcttttgtaattgtgtttgtttttgtcttcatttttagtctccctcgttgaaatttatgtaaatgagtaaacctataagccgtgttctgtattagatggttatctatctagttttaatgttaccattaaaatcaagcaacttaccttacaggaggttacgagcaataaccttttatccttctttgttttgctccgaatggggtttacatgtcacctttagtcgcctaaaagtaggtagtctcttacactgcctttccacccttaccaaaatggcggtctatttctgttgcactatccttgaagtcgccttcactggacgttatccagcattctgctctgtggagcacggactttcctcatgcctaagcacgcaaccatctggtttactcattacaaagtttattatactacaaaatgcataaaattctatattatttctacattatcagtgaaagaagagaaattttaactatctcaatgccatttgtatgtttctttaatatatcctctatgatattaacaaaagcactctcactactgttgtggtcttgcataattaaattaatctttgcatttcttagtgcttgtatgtcatgatatcctaaatcagatgttataacagtgtcaggcctttcttcgatagcattttctacaaaatctctgccactaccatttaatatcataagcctgctgttacgattattatttttatatacttgtatatatttcgcattattaatatctttaatgatatatcccaaatcttttaatgatacatcctttatgtctccaacaactccatagcccatatcatcatttaccttgatagcaaaatctgtattagaaagctttagattgtctttgtaaaatttataaaaaccagagctttgaacatcgaatgatgtgtgcgcgctatagtatatgatgtcatttttaatcatatgcttaattagctttgagcttgcattcatatcaatctcttttatgcctttaaaaattaaaggatgatgcgttatcaccatatccacatcatccagttctttaatatcatcatataagagatcaacgcttaaataaatcttttttatatcttctttatctagatctattatcaatccagaattatcccaaggctctctatactcctttgggaagatactttcaattatctttataatttcattctttttcattgatcttctccatatattttttaattttatttaaatctttacttaactcttcaaacttgcttaaattcttctctttgttaatcctattaagtatatcttttatactcttaatttcattttcataatacactttaaggtattcaatgtcttgcatgtcaaagttaactggcaaagtgtagtcctcaacattagttttcttattaatcacttcatagagcctatagtatttttctttctcaataaacaaacgttctttctttatgaaaaaatcattctccttaaaatactttctaatgttcgagccttcacccatagcttgtattattatactactaaagcatcttaccttgtctaagctctttgatagtatgcttactatagtctcttcgcccataccggcaattaaaagtgtatcgtatcccttgctatctatattaacaagaccatcgcttacaataaatttaattttatctttatacttaacgccagaaagtaatagctcagctttttctaatgatttttcacttatatcgctttcaataaccttatctatagtgccattatccaaaagcatctttgctatatagccgtgatcgcaaccaacatctataagcgaggaaccttttttaatggacttagatatctcaataagtctctttgaataattcattatagttcaaggaagtctctaagctttttagatctacttggatgttttagctttcttaatgcttttgcttctatctgtctaattctttctctagtaacgtcaaaggcttgtccaacctcttcaagtgttcttgttctgccatcatcaaggccgaatcttaaagctaaaacttttctttctctatctgttaacgtgtcaagaacagaaattaattgttctctaagcatagtgtttgtcgctgcatctgatggggacagtatttcttcatcaggtataaagtctcctaagtgcgagtcttcttcttcaccaataggtgtctctaatgatactggttcttgagcaatcttttgtacttctctaaccttttctacatccatattcattaattcagcaacttcttctggaagagggtctctacctaattcttgtactaattgtctttgtgctctaactaacttatttatagtctcaaccatgtgtacaggtattcttatagttctggcttggtctgctatggctcttgtgattgcttgtctaatccaccatgttgcataggtactaaacttaaatcccttcttgtgctcaaacttatcaaccgcttttattaagcccatattgccttcttggatcaagtctaaaaattgcatacctctacctacgtatctcttagcaatactaactacaagtctcaaatttgcttctgcaagcttatctttagctgactcatcgccttcttctatcttttttgcaagtttaacttcttcttcaaaagtaagcaaaggaattctacctatttccttaagatacatcctcacagggtcgtcagttataactattttgttcttgcccttttctttagctaattcaagtttatcatccttgcttaattcttcctcaaaagatcttagctcctctaagtcaatgtcttcttcgtcatcgtcatcatcatctttatcaacatcaaagttttcatctaagtcgatttcttcatcttcatctttagtgtcaatgatactaacttgagctgcatctagtgcatcgtagaaagatataacttcgtcttcagttacttcaaatttatccaaaccatcctcaatctctttatagttgatgtaaccttttgttcttccttcgtttagtagctcatacatggcttgtcttttatcttcgctaacgttttcatctattatctttattgcttcatccgttactttttcttttttaattttctttgtgctagcattcttttcttttttcataagaacactccccttcatcattcgttatctctgtgctttttaattagttttaaaagctccattgcatcacctttgccatcattaatttgttccaataaatcactcacatagtcttttgattttagcttcattcttttttcaattaattcttttagattgatgtatgtagattcttcagatttcttcctaatatcatcaatctctaaaagcgcattatctttatccgctatatcaaaatcactaagttctatctcattattgccttcgtacttcgactttagtagtggcatgtttatcttaaatactttactataattatctatagaaatttcatttattatatatttaaaatatttaatatccgctaatgcatatattaaaagattctcatctataatttctatatctaattttttaatttttggtacttctggtacagtatatttttctctgtatttgttaacataatttgtttttgaaacttgattgattagcaaactcttgtcaatagagtagactctcgaaatgtagtctatataaatttctctctcaattttgtcatttatttttgacaatagtctcgacaactcgttaattagttctaataagttttccggattgtttacatcataaagctgcattagctcagaaacttcatattcaacagagttttttgcttcattaagcttggcagtaaaaccagaaagtccatattttttaataaaatcatctggatctaagccttcttcaagcaccacaacattagctttagcatttataaatctaagtatctctatagccttatgtgttgcatttttgcctgctttgtctccatcataacaaatataaattttctttgcgtttctattcaataagtttgcttgatttatagtaaaagctgtacccaaattagcaacagcataatttacacctgcttgatataaactcataacatcaatattgccttcaacaagaagtattttatctctatcagcttcttttttataaatattgtagccgaatagcaactctctcttcttaaagacaatattttcacttgtatttaagtacttaggcatactgttatccaagcttcttgcgctaaagccaagcacatgattatgcacatcaaatataggaaagactaatctgtttctaaatacatcatatgaactatctttttcttcttttatcttggctaaacctgctttaactatgaaatcttcactgtatcctttgcctattaagtaatctttaagtgctgtccattcatttggcgcataacctagttgatactttaaaacagtttccttgcttaatttcctcttaagtagatagtcaatagctatctttgactttaatatttgactttggaagaaatcaagagctgttttattaatatcataaaatttttctatgagatcaatttcagtttttttttacttgttgcttcttgtagagttatattcgctctgtcagctaaatactcaactgcttcttggaaacttaagttcctatacttctctataaaagtaatgacatccccagactctccgcagccaaaacatttgtagtatccatctttactattaacatgaaatgacggcgtcttctccttgtgaaatgggcacagtccagtatatgatgcgcctttcttatctagttttatattctcgccaatcacatcttcgatgttattgtactctttaattttatcaatgactgctgcattaattactttcatatcataacctcattcttccaagtttgtggtacatatatctttttaaattcatttattgcatatatgtctgacatacccgcgatgtaatcacaaatttcttgattctttgttccttgaatctctttaatattgtcaggaagtttttctggatgctcatcataataatcatataacattgatattatgttcttggccttgtcatgttccttagttgtaattggattaaaataaacttctttaaacatgaaagcccttaaggcaagcattgcttcaccaacttcatcagacattttatatagttttgtccataactttctttaagtatatctgtaatcatagtattgattctctttgagtgagaatcgcctaaaatttcaataagatcttttggtatatctttctcgtgcaaaacaccagctctgattgcatcatcaatatcatgattgatatatgcaattcgatctgcaaacttaactactctaccttctaaagtatatgcttcgttcgctccgctatggtttacaattccatctctaacttcgtcgcataagttaagtccaaactttccatttcttttctcaagcacgtcaacaactcttaagctttgttcatagtgcctaaatccgcctaaatccttacatttctcattaagtgcgctctctccagcatgtccaaatggtgtatgccctaagtcatgtcccaaagatatcgcttcaactaaatcttcattaagtcttaaagctctagcaatggttctggctatttggctaacttcaagtgtatgtgtaagccttgtcctaaagtgatctcctttaggcgctagaaacacttgagtcttgtgcttaagccttctaaatgcttttgagtgtagaatcctgtctctgtctctttggaagtcggttcttatatcacacttttcctccgaaacttttcttcctctactgtccgaacatttgcatgcatattccgaaaggtaagaatcttgaaattttcatattttctctaaaattaatcattcatctcaccaaaattttactcaaactatctattataattgaagctgtctcttctatagctttatttgtaacgtcaataacctggcatccaagttttcccataatttccttagaatatctaagctcttcgttaattctatctgtgcaagcatagttgcatatatcttctatacctaaagacttcattctttctattctgatttcattaatctttctatcagaagcaatgagaccaaatatccttcttttgtccttttcaaataaaaactcactaggttctatctctggaagtaacggtacgtttgctaccttgtaattcttattagctaaatacatagaaagaggtgtcttcgaagtccttgatatacctagaagaacaacgtcagcaaggataatgcctctaggatcctttccatcgtcatacttaactgcaaactcgatagcagaaaccttatcaaagtactcttggtcaagtcttctaataagtcctgcctctctaataggtgcttgatgtaaaactgattcaatagagtccaaaactttactcataacgttaacagttggaatattatattttcttcctaagctttcaatataatgtgcatgatcttccaatacagttgtaaatataacaactgaaggaactagttttgccttttcaaagatattaaatatcttgtccttgctgtcaacataagggaacctcttaatctcgtaagcgtctggtgaaaattgcttgatacatgatctagcaatctttccagctgtttcacctatagagtctgaaattacaaatatagttatttcgttcaattaaatctcctctatttctttaaaatctaaaatggagttaaattcatttagtattaatgatattaatgaaagtctgttgttctttattattttattatcaactaaaaccatagttgagtccaagaatttatcaatgctttctttgtaagtagcaagtatcttaattgcttctgttatatctatatcggaaatattttcttcctttgccttcaaatcttggtatagaacgaataattctttttcactctcttccattatgtcttggttaggatcaactttttcaaattcttttccttttgatatctgatatattctcctaaacgcagctaaagcatctttaaattcatcactgtctttaattccatctaactttgttaggacttgttttatagttaataaatttaagtctttatgtttattcataacagcgtttattaaatttgcatcatagttactatcttgcaatatacctatgaaccttgtcttaatataatctaaaacattcttcttaacctcgtcgtaatcaaactttaattcatttatattgacatagttgtacaatgtttcttcaagtaaggaatctatagatacatccaaagacttttctaatactatatttataatacccaaagtagcccttcttataccaaatgggtcttgtgatccacttggttttgtgccgattgagaataaacctgatattgtatcaagtttatctgctacagcaagtattactcctgcagtagtgcttggaagtgaatcttgggcatatcttggtagatagtgttcatatattgcttcttgcacacctacagtttctcctgatagcttagcatatatctttcccataacgccttgaagttcagtaaactctacaactagcttagttgcaaggtcagcttttgataaatatgcagctctcttagtagtctctactgtctcttctccaacatttaggtcttcacaaatcttttcagatagtttaatgtttcttaatgttttatcgtataatgttccaagcttatcttggaagacaattgttcttaaatcattaacatagtcttctaagtttttcttcctatcttcattaaagaagaatttagcatcttccagcctagcagcaagaactttttcattcccttttctaactatgtcaagatatttatcgtcaccatttctaactgtaatgaagtgattcataagtctgttctttgaatctacaactgggaagtatcttaagtgatccttcattggtgtgataaccacttcatcaggaagctcaagatattgatccttaatagttccaagtagtggtgttggatattcaactaagtttgttacttgatcaatgatagcttcatcattttgtatcgatccaccaacagatttagcaagtctttctgactctagtctaattcttgcttttctttcgctgttatcaacaataacaaagttatcttccataatcttcatatagtcatgagcatcagatatctctatatccttcttagataaaatctgtgaccatttgttaaatttgatactcttatattctctaagttaaatttaacaactatgtcattataaaagagacaatccatctaataggtctagcaaattttaagtctcttccgccccatttcatagattttggaaagactatctttctaataatactttctgcgtttcgttcaataagctctgtaaatgttaagctcttgtgctctacattagcaaaaacatattcagtgccacccatatctttaaagaaaatatcttttacatctaagccctttgactttaaaagccttgaagtgcctttgttgggttgccagcatcatcaaaactaattgacttagaaggacccttgatttcttcttttctatgctttcattttctatgatattgtcaattatagtagtaattcttcttggtgttgtatatacgtttacttcataatctttgtatgagttttcatttaataatttcaaaagcacttttaaattgttctatagctaattttgaataactagcaggtagctcttccatacctacttctaataaatatctatttgccatcattaaaacctactttcttagtaaatggaaagcccatctcttttctttgttctacgtatttacttgctattagcttagccaaacttctaacctttagtatatagtttgctctttgcgatactgatatagctccaagtgcatcaagcacgttgaatgtatgtgagcactttagtacatagtcatacgctggtaatataagtcctttttcaataattctcttgcattcggcttcatatctttcaaacatctcttgtagtaagtccttgtctgctaattcaaaactgtaaacagagtgctcatactcagctttcttgaatatatcaccatatgtgaaattttcattccattgtatatcgtaaacattgtcaacatcttgtaagtacatagcaattctctcaagaccatatgttagctctgaggattcaatgtctagattaagtccaccgacttgttggaagtatgtgaattgagttatctccataccgtcaagccaaacttcccagcctagtccccacgcaccaagtgtaggtgactcccagttatcttctacgaatcttatatcgtgttttaacgggtctatgccaatcgccttcaagctatccaagtacaaatcttgaacatcatatggcgatggttttagtattacttgcaattgatggtgttggtaaactctgtttggattttcaccatatcttgcatccgctggccttcttgatggttctacatatacaactctccaaggctcaggtcctagtgatctaagaaaagtgtggattcattgttcctgcacccttctcgacatcataaggctccattactaagcagcctttatccttccaataatttagtaaattcatcattaaatcttgaaaatacattttgtcctcctcaatatttgactttaagagtcttaaattcgtctttatcaaaatataaaatataatttataaacaaagttttaaatttttatatttatcattgtattcaacattaattaagtctttaaatttgctgtcaagcaaaaattgataaagcttagttcttcttttataagtaagttcttttatagttactaagttcagctattattgttccatgttcaaattcaaatctataagtatctactttatctcttaattgtattctaggaaagtatcctaataaatatatgagctttagtataaatgccaagataaataattctgctctttctggataaatatccataatatttactagtgtgattatcatcgagtaaatatactcatctgactcctgagtattcaaaagcgttgataatagctctgataaaaagcaaaattgtgaatcttttaatatctgcgttcattagctgagctgaatataatacctttgaatcatttactaagaataattctttatacttagatagcatgaacactgactctgtaaatacaaatgaacttcttgaaacattgcttctcaaatcataagcgcttcgtacataagcttttatacgcccagcattaaccgtgtatatttcaagtattttgccgttcttttcatcgctcttgctagcaataactatgcctctgtactcttcggacttacttgtatccaaaaaacttcacctggtcttcgttctttctccaattcttggcaaccttaacatttaatttaagattaacttctgtatcaagcatggcttttatatctttctttgcagcaagtctaatctttttaatcatagaggcttctttacctatgaccatgcccttgtggctttctctctcacaataaatgattgcatctatgtttacagcatcttctttttcttcatacttaagtatttcaatgtttatcccatgtggtatctcatctgataaaaagtttaggcacttttgtctaataatctctgaaacgataaacttcattggtttatcagttaaatattcaccatcataatacataggacctggtttcaatactttttttatttcatctagaagcttatccaagttatcatcattagccgcacttattggaacagtaattgaattaagttttctagaatttatctcgcctataatttcttctatatgagattcgtctttgtcaattttattgatagcaataactacattcttgtttgcacttgtaactatgtccataagttctttttcgccagctttaataggtacagatccatcaattatgtatagtatcatatctgcatcctctaaagcggctctcatcaccttatccatgtagtcgcctaacttgtttttcgcaatttgatagccaggagtatccatgaatataatttgtgcatcatcatctgtatataaaattaattatatctctagtagtttgtggtttatctgagatgatagatatgttaaacttaacaagtttattaagtagtgttgatttaccagcattgggtctacctacaaccgctacatagcctgatttaaattccattgtttcacctcttttactcatctaatgaaaagattctgggagcagatcttttatattataaattttataatcatttacatcctttgcaactataatctcgcagtctttagtgaactcgcttatgaactgtctacacgcaccgcatggcataggatatacatccacatttacaattgctatacgtttaatggacctagagtcagagcttactattgcatttgctattgcgcttctttctgcacatattgttagaccataagatgcattttcgatattgactccagtataaacattgccatcatccatctctactgctgcagcaaccttaaatttagagtatttactgtatgatctatctaaaactttaagtgccgattcaataagccctttagtatccattagcgtccctccaagcttttattatataatattttacgcttaatttcaatactaacgtgtaatattaagctcgtctaatatatctctttgtctctgttccataataactctatcatcgtcttcaatatgatcatatcccaaaaggtgaagtatgctatgtgtgaataaaaacataatctctctttcaagactatgcccatactcttttgcttgctccacagcaacatcatatgagatgactacatcgcctagcaaggtttcatctgaagagaagtcttcgataagtggaaatgataaaacatctgtaactttatcaatgtccctgtactctctgttcaaatcttgtatctcttcctttgacacgtaagtaaggcccacttcataatcgtcattaagcccttctttttttaatgctagagatgctatctttttcattgtgtcttcataacctgcttctataggatagttgttttcgttattaattactatatccatcttttcttctctttcttcactttctttattaagcttcttactttcataaagattataagcttcaatgattctttgaaccagtatatttcttacaacgtcagtttgagtaagctctatgaagcttatgccattgatatttctaagtatatgactggccgctataagtccagacttcttaccctttggtaagtctctttgagtaatatcacctgtaacaatcaccttagagttgaagcccatccttgttaggaacatcttcatttgctcttctgtagtattttgtgcttcatcaagtattatgaaggctttatctagtgtccttcctctcatataagcaagtggcgctacttctataagtcctctttcagcatttttttcatattgctccttgcccataatctcatatagagcatcatagaccggccttagatatggatcaaccttttctttaaggtcacccggtaagaatcctaggttctcacctgcttctacagctggtcttgttaatataatcttagatacttctttatttttaaaagcattaaccgccatagctatagccaaatatgttttgccagtacctgctggtcctataccgaaggttattccagactttctaatcatatcgacatatcttttttgaccaatagtcttaggtcttatagtctttccttcactagttatagctataacatcttttgtatatcgtataagaggttctctttcgcttttttaactaagttaattgaataatatatgtcctccttactaagtgatttttgagtgtctataaggctcgataaggcttttatcaatctttcagccatagcttcattctcttcattgttagaagctatcaatatcttatctgagcgcatatcaatcttaatatcaagttccttctcaattatcttgatgttagaatctaaatttccggctaacgcctcttgtttgttgctatcaaaattaagttctctactcattaatcctccttagtgctagtggtttatctagtatctctttcatgattatggcctttgccacattggtttgtgaaaattgtatgctttcgtgttcataatcaaagtcttcataaacattctcttctacttttaccatttcctcatgctcactctcatgctcttctgtcttctttgccttaaattcgcgaagtctgtctttaatgtcccttgacaaatactcatcaagttctcttgacctatcagaaaaataatcatcagccttagctttgtaatcatcactgatggcttcatcatagtgcttttccaagttgcctatctttttaaccttttcatctgtcttgatattcttaggcttcttactgttcttattttcctgcattgctcttttataaatttcatcaagttttttagtaagatcactgtttttctttttcttattggcttccgacaaaactgtagcaagagaagatattagcataaagcaaaacgctaatacaaataatatatccatacttttctacttatctaattttgtgtatcggatatggattttctcatatcggtatctgaattgatattattcatcttgtaataatccataactcctaggtttccattctttaatgcttcggcgattgctagtggaacttctctttcagcttcgacaacttttgatttcatcttttgaacctcagccttcatttcttgttcgcttgcaacagccatagcacgtctttcttcagcctttgcttgagctatcttcttatcagcatcagcttgatccataagtaatttagctcctatgtttctacctacgtctatgtctgctatgtctatagaaagtatttcaaaagctgttccagagtcaagacccttctttagaactgtctttgagatactgtcaggattttcaagaacatccttgtggctttgtgcactacctactgtagttacaataccttcaccaactcttgcgatgatagtttcttctcctgcaccgccgactaatctctcgatattagctctaacagttactcttgcttttacaacaacttctataccattcatagcaactgcagatatatttggtgtttctataaccttagggttaacgctaacttgtacagcttctaagacattacgtcctgcaaggtcgatagcagctgctcttgtaaagtctagcggtatatcagctctttgtgcagctataagtgcatctacgagtgtatctacgttaccaccagctaagtagtgagcttctagttcattaactttaatgtctagtccagcctttgtagccttaatcattgggtttatgatcttgcttggtgcaactcttctaagtctcataccagtaagtgttgccatgctaaccttaactcctgagaagaaagctgttatccacaagccaattggtacaaatgaaaagaatatacttaagactattaatccaagtataacaattataaatcctcctgatgctaaaacattaataatgtttcctaataaaaacatactacttaacctccttgtcaactattaaatatcttcctttaactgctataaccttcaatgccaaaccattatctaggtagccatcgtagcttacagcgttgtatttaatgccattaactaatacaaagcccgttggtccaagtgaacttatagactctgcatcctttcctacgagtttatttaactcattaaactcttctttattcccttttaaatttgcttgtgtgcttaatacaaaatgacttagtcccttaagagtgtagcctttcttaaacataaatttaatgaaagatatatttaagtttaaagatactactatagctaatagaccatatctataattactaaatgttaaagctatggatgtaatatagccaagtatacctataactcctgttactgtgaagcctggaatgaatatctctaaaactacaaaaatgcatgaaaatataaatattgctattggataaaaattgtttatctgacatagcaccctgcttgcaaataaaacaaagtgtgtgataaaaaataatgtgatgtataaattttgcttcttgttgatcaatgcaaggcttaagaaaaacgtgcctactaatactaataaaaatgcggctatatctgttgtgataaacagattagcatctgctaccaaaaataaattttgcattcaatcaccacctaagtatatttacccattatgtatatatttaatcaaaaatcaaggctgaccattgtgaccagcctctcttgctcttataactcttctgatttttctacgttttaatctcttttcttgttgctctatctctgaaagcccacttagctatctccatattgcatccttggtttatttcgattacatacatgtcttctttaatttgaacaatcttacctaagatgccgccgatagttacgatttgatctcctactttaagtgagtctcttagctcttgtaacttttgcgcttgtttcttttgtggtcttactaaaaagaagtacgcgaatgctccaaatagaacaaatggtagtatcatgcttagtaatgatccactagcatttgcttgtgcttgtaaaaatgttaatgtcattatataacctccctctcgtgttaatactattatacactatattactttaaatatccatatttttataaaattcgtgcttatactctaagaaataatcacctagtatcgactcacgtatattcttcatcatcttaagtaagaatgttaagttgtgtatagtcgcaagtctatatgcaagtatctcatcaacattaaataagtgtcttaggtatgctctagagtagtttctacaagtgtagcagtcgcactctgggtctggtttagtaaagtcctctttatacattgcattctttataacaagccttcctctagatgtcattagcgttccatttctagatattctagttggtaaaacgcagtcagccatgtctatacctctttcaactgattcaaatagatataaaggtgtacctactcccatgttgtacctaggtttatcttctggcatgtagtcagtgacatagtccaagacctcattcataagatcaaccggctctccaactgatagtccaccaactgcatagccaggtaagtctatggagcaaatttcttttgcatgctctttacgcaagtccttgtataaaccgccttgtattataccaaataaattttgattctctctatcggtccatgagttcttgcatctttcaagccacctagtagttctgtgcatagagttaataatatagtctctacttgctgggtatggcgcgcactcatcaaaagccatcattatatcgctacctagcttagtttgtatttcgattgacttctcaggtgatataaatagttttgagccgtctatgtgtgagcggaactcaacgccttcttcagtgatctttctaatctttccaaggctaaaaacttggaatccgccactatctgttagtattggcttgtcccagttcataaacttatgaagtccaccggctttggctactatgtcctcgccaggtcttaggtacaagtgatatgtgttagaaagtataatttgagcacctagactctctaattcatctggtgtcatagtctttactgttgctcttgtgccaacaggcataaagataggcgtttcaaccacgccatgttttaatttcattaaacctgctcttgctttagttttactatcttttttaattaattcaaattccatattacctatccaatataaacatcgcatcgccaaagctaaagaatctatatctctcttttacagcttctgcgtatgcattaagtatcatttcttttgatgcaaaggcgctaacaagcataataagtgttgactctggcaagtggaagtttgtaattagtgcgtcaactgctttatattcaaagccaggatatatgaaaatatctgtccatccgtggcttgctttgatctctccctttgcagctatcgtttcaagtgttctaactgttgttgtaccaacagctataacccttctgccttctttttttgctttgtttatggtctcgcttgcttcctgtgaaagattgtagaactcactatgcatcttgtgcttttctacgtctgttaccttgactggtctaaatgtaccaagaccaacatgaagtgttagataaactatcttcactcctttgtcttctagctctttaagtagctcctttgtaaagtgcaagcctgcggtaggtgcagctgctgatccaaggttctttgcataaactgtttggtacctatctttatcttcaagtctttccttgatatatggtggaagtggcatctcgccaagctcgtttagtatctctaagaaaattccatcatatttaaatttgatatatctaacgccatcatcatctatatcaacaacctcagctctaagaagtccgtgaccaaattcgatctcagaaccaatcttcatcttcttgcctggcttaacaagcgtcttccaagtgtcttcttcagtttgtgaaataagtagaacttctatcttttcttctttaccaggtctgttgccaaatagtcttgcaggtataaccttgctatcgttagcaactagaacgtctccttcgtgaagaagatttatgatatcatgaaatatcatatgctcaactttgccagtctttctatctaagaccataagtcttgattcgtctcttttgtctatggggtgctgagctatcagctcctcaggtaaatcataataaaaatctttagtttccattaaatatttcagctccatcgtagtaaaattttagtatctcgtcatactttagtccagccttcgccatgttgtttgctccccattggcttagtccaacaccgtgtccccaaccatgcccagaaatttttatcttatcagtcatattaagtgttggtctcgaactaacttcttctgattcaaaattatctaaaaatataactacattatctttaataattacagatacttcttcatcagaagccttgtctttattagcagtttcattagtagcttttccaacatattccactgtgtataaactactcttaaatttgtttgcaccaatggcgtttttgaacttatagttatctacaagtacctctttagctccatcttttatcacaagagtttttactctcttgcttgaattgttttctttaacatatatctgatctatggaattaatatttataccttgctttctaagtccactaatcaaatcattaatattaatttcaaagctccaattgtagtttggctcatttatagagtacttatcttctttgctgatcaaatacttaaactttgtgccccaaacatcattagcatctgcagtatatccgccattagatgaggaatatgttgcattaacaactttaccatctgataaaagtatttgtcccctagtttcatcaacagcttttctaacattatctctttctgcatcaaatccaccatagacctggcttgaaacactatcatataaatcaaatgacttgtccttgtttctagtaacgctacaaaccgcataagatcttgcagctactgcttgagctttaagcgcctcataagagaaagtgctaggcatctctcttggaacaacgccataaaggtactcttcaagatctacattgtttatagcagataattgattatcaatgtggttaaaacacaagtagcctctatatctcttattgttaatcttaatggctcttgaacctaatgataatatcttcatagacttattagtagctatgctagttaaatagtttccagctgcgtcaaaagcatcataattttgaccattgagtcttaaaacaatattcttttcaaatgtttggaacaaacttaagtttgaatagatatctctaacttcaaagccgtcgtcactatacagctttaattcgcccatattttgtgcactaatgcctaattttacatctacgcttgtaatatgttcgtatccgttttcagcttttgcgctgtttatcgataatgcaagtaagaatattgtaagtataattaatattttattcttcatcattgtctcctttgtcatacttgtaacccatatgttcatatgcaagctttgtagcaattctacctcttggcgttctagcaatgaatccaagttgtattaaatatggctcgtaaacatcttctaccgtagtcctctcctcgtttgacgatgctgcaagtgtatcaagcccgacaggattgccaccatacgtatttatcattacatcaagtatctttctatcagttttatcaagaccatagtggtcgatttctaatatatccaagccctttttagcaattttgcctgttatagtcccatcttcaagaactaaagagtagtctctaaccctctttaaaagcctgtttgcaattcttggagtgcctcttgatcttctagctatctctttagcgccactttcgtcaatatctacttctaatatgccagcagatcttctaactatttcgcaaagtgatgcctcatcatataaatcaaggtttagtataaccccaaatctgtctcttaatggtgaggatagtagtcctgctctagttgttgcgcctattaatgtaaatcttgataggtcaatccttacagatcttgctgatggtcccttaccaatgattaagtcaagtgaataatcttccatggctggatataagatttcttctacagagcgtgatatcctatgtatctcgtctatgaataatacatcatcatcttttaaatttgttaaaactgacgccaagtctcctggtctctctatggcaggtccagatgttatcttgatatttacacccatctcattagcgatgatatttgcaagagttgtcttaccaagtcctggtggtccatatagaagcacgtggtctagtggctcgcctctcatcttggcagcgttgacaaagattttaagcttttctttaacgctgtcttgaccaatgtagtcattaaaccactttggcctcaaagaattatcaaaattttcttcacccgaccttaagtcagtcgttattaatctatcttcttccacttaaacacctactttgaaagcctttttaatagctcttttattaaatcttctacttccatagtctcgtccaaacccttagcaatgctagtaatttcatatttgttgtagccaagtgaacttagtgcttctatagcctcattaaggttactgcctacacttacaacatttgcaaggtcttcaaattcactgcccttgctaactttgtccttaagttcaagaattattctttgagcagtttttttaccaataccaggcgccttcatcaaggctttttcgtcatttgtcacgattgccttttgcaaatcaactaccttttgttcagacaaaatacctatggcagtcttaggtcctactccattgactgttgtaattaggttaaaaaagtcgagttcatatctattaacaaaaccatatagactcatgtcatcttctctaactactaaattcatataaatttttacttcgccatcgtagatatcgctctctatagtttcttttgatgtaaacactttgtaagcaatgttatttactaataaaactatataatctttttcttatctacaacctggcctatcatatactcaaacataactacctcaataaaaactgatctttaaaattaatacttgcgctatgagttagagcaaccgctaaagcgtccgcaacatcatcaggcctcggaaccttctccaaatgaagaaaagtttttaccatctcttgcatttgctttttctcggccctaccatagccagtaacagcttgcttaatttgaagtggagtgtattcatatgttgctaaacccttgtgttttaagcaaagaagagttacacctcttgcctcggcaacttgtataactgtcttttgattcttaaagtagaacagctcttctattgccgcctcatcaggatcatacttatctatgatagcgccaagctcaaagtaaatcttctcaagtcttttgtctaagctaaggtccttgtgtgttgtaatcgcatcgtagaacacatcgcgtgccttattgccgtcgtaatcaatgatgcccacaccaactatagcgatgcctgggtctatacctaaaattctcatttttcctcctacttctccattctaaagactattatactacaaaatatgcataagttcaagcatgcatgcgtattttttgtgtatagtgacgcatgtatgtatatctttgtcaagtgaacataaaaagctatctaattagatagctttcattcatataattaaatttattttaccactcgccaactcttaggccggcatcagataatactttagttatgtttgtatcatcatcaacttcaagtcttaagatgactttaagtaggcccataaccttagcgcttgttacaaccatacttatgatattaaccttttgatcccttataattcctgcaagtcttgaaatttgtccaggcatatcgaagatatgtacaacaattctcttacctttgttgataccaaatacttcgctgaacgcatcaaatatagctttgtgtgtaagtatgcctgcaaattgatcttgttcatcaaatacagctaagaacggtattgataactttccaagtgcatatgatgctacttcaatgttttctacaatagaaatcttttcgtatctttgttcattgaactcagaaactaattttttagcgaacttatccttgtctgtgcaagataattcataataagttctgtagattgtttctttgtgcaaaataccaattaacttgtcaccatcgacaactggtaaacttaaaaagtcaccatcttcgaatttcttgatagcttctgctacagtttcactcgattttactgttgtaagtttttccttaggaatcatatagttccttacatacataatactacccctatctgtatcttttaaaaccctttcatttaaaccgttccaataagcatcaaaatacaaattagaacatgtatttaatataaatctaaatgtttctttataaataatgtttaaatcttctctcgttatcatagagcttgcagattttataccatttccatcaagctctaattgcctgtccacatatttatttaaagaataagttttatccttgattactttgtttgaaaattcacaaacattagataatattcttccacttttcttctcttcttattaattcacttcttaatcttttcttgaatgttcttattttctatttaagttcttaaactggaacaagtatttttatttaccaagtctttgctcttataatacttaagcgcctctttctctaatgcgtttgcttgattagtactgttgaagccttgtatataaccatctaagtatatagttcgagtctatttatatcttcgtgtatttgtaaagataatgacctggatatgcagtgagcatctgatctgtaggctatggcttttgcaatttttttcctaagtatgcccatcgatacatactttggaaatatgttttgcacgcccatgttaatatcataaaagctcatcagcgactttagcgaatcaatgtctcctctataaagaaaattatgttttaatccaacacagatatgagattttgaaatctcaacttgcattttcttacctccgtcaattgttatttcaattatactacatattcaggcgaaaatatattaagaaaaataattaagttgtgtcaaaacttaacaattaatataggcttgatgtggacttgattaaaattttattatcttttactaaaataatatttttatattcctcataaaatttataattattaagacatataaattcctctatagtggattcattgttttgaagatatgtttttatagcgttaacggcaatcttacttgcctcttttatatccattgcaaaggctccgcatgatattgcaggtattgcgatagatttaatcttgtgctcatctgctaagtgcaaaagattgaagtaggttttctctaaaagcttaaacttgtttttattagagtccatcggcccaacaacgtgtatgatgtagtcgttctttaatttatgtgcctttgtaatcttagcgccaccagtatatactcctgcgagtttcactgtatcatctaaaagatcatctccatctttttcgtgtataaggccatctaaaccgccacctccaagtaaagaattgtttgcagggttcactatagactctacttctaaatcaaatatatctgcgtaaatcgcttctactttgcaagaattgattatcatacaagcttaactagttctactacagtttcaaatgcctttaccattgattgtattgaagcgtactcatatcttccgtggtagttcataccgcctgtgaagatgtttggacaaggaagacccataaacgatagtcttgcaccatcagttccacctctaacttgtgttacttttggctctactccagcatttttcattgctttctttgctaattcaactatctctagtcttggttctatcttttcatacatattgtaatatgaatcttttatatcaagctccattgcatcattatatttataattaatgtagtcttgagcatctttcataaggcacttctttgatgcaaatccttctttagtgaagtctcttatgatgtagtgcatttgtgtttcttctacagaacccttcatatttgttaatagtataaagccttcatagccttctgtatactctggtctttcattgactggtagcatagcgttgtattccatagctactaattgtgagttaatcatcttattcttagctgaacctggatgtacgtttctacctcttatagtgattttagcagaagctgcattgaagttttcgtattctatctctccaagtggaccaccgtcaatagtaaaagcataatcagctccaaatttcttaacatcgaataggtctgcacctctaccaatttcctcatctggtgtaaaggcaattctgatcttaccgtgctttacatctggatttttgataaagtattccatagctgtaactatttcagcaacgcccgccttatcatctgcgcctaatagtgttgtgccgtcagtaactataaggtcatctcccacatagtcattaagctcagggaaatcatttgggcttaagataatgttttctttctcatttaaaacaatgtctttgccatcatacttttcaactattctaggcttaacgttctcgccactcatatcaggtgatgtgtccatatgagatataagtcctaaaacatctttcttctcatcagtattagctggaagtgttgcataaaggtatgaatgttcatcaagctcaacatcttctaagcctaattcaataagttcgtctcttaatttctttgcaaactccataatctttggactgcttggacaagtttgagactcctcatcagactttgtgtcaatttttgcgtatttaataaaacgatctactaagatatctttcataatatcactccttttaatttttacccaattaaagaaaaataacaagcataaagcctgttattgcgttgtttactaaaattatttactgtacttctcttctaattccaataaagatttttacatcattaccatcagagtagttatagtagccatcttcttttaacataacaattctgtggcaaggtataattataacaatgctgttgcctctgcaagtagcgcctactccgcgagcatatgtctttttgccaagtttaagtgcaatgtctccatatgtactagtctcaccatagcgaacctttcttatctcttctaaggctttattctgaaactcttttgcttttactctaataggtatgtcaaattcctttctttcgcctctgaagtactcttctagctgctcgacagttctgtctaatatttcattcttttcaagtttacttccatatataccttggtgaccaaaacgtaagtacacaagagcatcatcttctgctgctgcagtcatctcgcctagcggggtgttgaagtagtgaacaaaatatgtcttttgcttatcaaagtagtttgtaatcatttgatcatctcctatgtataattatagtatatcattgttctaaagtcaataaaatattcacaatttaaagtgtgattgtattgttttgagcttcactatataaaacaatattgcataaaaaaagagcgagtattaactcgccctttctatataaatactacttacttatttttcctcttaatgcttgcttgcgcagctgctagtcttgcaattggaactctgtatggtgagcagcttacataatcaagtccgattgcatcacagaactcgattgatctagggtctccaccatgttcgccgcagatacctacgtgaatgtttggtcttgtttgtctaccaagtttagtgcccatatctaatagcttgccaacaccttctgtgtcaagtgagtcgaatggacttctttcgtatataccatggtcaagatatgcattaacaaacttaccatagtcgtctcttgagtagccccaagtcatttgtgtcatatcgtttgtaccaaagctaaagaactctgcttcttttgcgatttcatcagcaagtagtgctgcccttggaacttcaaccatagtaccgatttcatattcaagcttcttattcttttctgcaaagactttattaatttcatcaactaactgttctttaacaaatacaagctctttaagttcgcctattagtggaatcataatcataggtttaatgtctttatggatttcattgcttacgttgattgcagcttccatgatagctctaacttgcatcttataaatttctggccatgtaacgcatagtctacaacctctgtgaccaagcatagggttgaactctttcatatcttcaattctgtctttgataacttgagtagtaatgcccatatcttttgcaagactttctatatcttcctcagtcttaggtaagaactcatgtagaggtggatcaagtaatcttataacaactcccttgtcctccattactttgaatatgccttcgaagtctcctctttgatatggaagaagcttttcaagtgctttttctctctcttctagtgtcttagaaagtatcatcttcctaacttggaatattctcttatcgtcaaagaacatgtgttctgttctacatagaccaattccttgtgctccaaaatcaagtgcttgtttagcatctcttgggttatcagcattagcttttacttcaagtgttctaaactcatcagcccactccataaacttagcaaagttaccacttagttcaggtgtaaccttcttgatctctcctaagtatacacggcctgtagaaccatctatagaaataatgtctccttctttaatttcgccgccgtcatatctaataactttggcatcttcatcaactcttaattcagaacatcctgcaacgcagcacttgcccatacctctagcaactacagctgcatgtgatgtcataccacctcttgctgttagtataccttcagcatgaaccatgccatcaatgtcctctggagatgtttcttctctaactaagatagtcttaacgttgttcttgtgatattcaataaccttatctggtgagaatactacaacgcctgatgcagctcctggtgaagctggtagtccttttgtaatttctgttttgctttgaacatctttttcttcgaatgttggatggagtatttgatctattgacttaggctcaattcttaagattgcttcttctttagtgattagaccttcatttacttggtcaactgctatgtttatagctgcctttgtagttctcttaccatttctacattgaagcatgaaaagctttccattttcaactgtaaactcgatatcttgcatatctttatagtgcttttcaagtttttcaactgtttctttgaactctttataaacgcttggcaattcattttcaagtctagcaataggttctggtgttctaacgcctgcaacaacgtcttcgccttgagcatcgattaagaattcaccgaataaaacgttttcacctgtagctgggtttcttgtgaaagcaacaccagtaccagagttcatgcccatgttaccaaacaccatctcttgaacgttaacagctgtgccaagtgtatcagaaatttcatttagctttctgtatgtcttagctcttggtgtgttccaagacatgaatacggctttaactgcgttaaataattgaacgtttggatcttgcgggaactcttctccaatgtattttttataaattgccttatattcttttacaatttcttttaagtcatcagtatctaaatcgatatctgcttcgatatttcttttttctttttgcttatttaaaactttttcaaattcagctttcgggatacccatggcaacatctgaaaacatttgtataaatcttctgtaactatcatatgcaaatctttcattatttgtcttctttgcaagtccttcaactgtcacatcgtttaaaccaagatttaatatagtatccatcatgcctggcattgatatcttcgcgccacttcttactgagaatagtagcggattttctttgtctgaaaaacccttgttagttatcttttcaacatttgcaataccatttctaatttcttcctttaaatcttgccatagttcttcattttcttcgtaaaacctgttgcacgcttcagttgtaattgtaaatccgttaggtactggtagacctaaattagtcatttcagctaagttagctcccttgcctcctaacaaatctctcatatctttattgccttctttaaagctataaacatacttttccatctgtatcctcctattgcttatttaattttgaagatatctaactatatagttagatacttcctctattgatttcccatacatagatataacaaatattcctagcttgctatacatatcgcgagcatattcattctcatagaatactctctctaatgatgagtaagtagatacgcctgttatacctaagtctttgtctctttccttccttatctttgataaatattcctcgtcttgtatcaagcctatcatctttgatctatcaaagtttttaatcaaatcaaactgatctacttcaggtacaagtggtatatttatagcgtttagtcctaaagaagcaagataataacaaagaggtgtcttgccagaccttgaaggtcctaagataattacatctgcacttgatatattgtcaaatgttttgccgtcatcattatctattgcataagcaaaagatttatttacatccatagaaaatcaccacctaaattataccacattgtatattttattcaatcgtttgcaccatattagtacttaactaatctttttaaagaactcaacacctgctttgaatatattttgtatttcaatacctgatatattcttaaaagtatcagtctctactctttctgagtgtgccatcttaccaagtatcttgccatctggtgataagatagactcgatgtcgtagttagatccattagggttgtctaaatattcaaatgcaagttgagagttatctcttaattgttcatatagttctttattgattaatagtcttccttcgccatgtgatattggcactctatatcttgtccttatcaatatacttaagccatggtgacgatgtagtaagtgctttagtctttactatccttgctatgtgtcttgctatgttattgtatgttaatgttgggtcgtcttcttctatgtccttaaccttaccatatggtagtagtcctgtcttaattaaagcttggaagccgttacatataccaagtatcaaaccatcgttttcattaagtaaatactctacagcatcctttaccttagggtttcttaaaacattggcaataaactttcctgatccatctggttcatcagataatgagaagcctcctggtataaataagatttgactttccttaatcttcttagataaatcatctatagacttatctatgtgttcgttgtctaagttgttgaatacaaagacatcaacctttgcaccttctttttcaaatgcatacttagaatcatattcagagtttgtaccagggaatactggaataataactttaacttcgtctaccggcttagtagattttgctctaaaatctttttcagtaaacttattttcagtcttttcaactcttgcttcttctccgaatatatctaaaagtggtttttcatacgcttctttatactcttcgaggtcaatacgtctgccattgataattatgcttgcgtcagtatttgttgttcctaaatactcaattccttctaagtcttcagtgtattcaacaatgtatgagccatatagctctttgaacatgatgtcagcgtccatattgatgttaaagccaatgtcattaccaaaagccatcttcataagaagtggtagtgttgtatctctattgatagctattgcgcttctaactttctttcttgaaatcaaacttacaagttcaacgctattcttcttaaattcatttaaatcaagtgtattgtcatcgttaatagtagttcttattaaaccaagcttcatattgcccttaagttcaggtgttacaacatcttctatgttcatagttgttacagcaaatgaaatcaatgttggaggcacattaagattgttaaatgttccgctcattgagtcctttccgcctatagatgggatttgtagatcgttacatatcttaaatgctccaagtaatgcctcaaatggttttgaccacttatatggatcatcatttaatttttcaaaatattcttggaatgttagtcttgctttgaatgggcttgctccatgtgatgcaatttttgcaagtgattcaaccactgcataataagctccaaagaatggactcttttctgatagatatggatcgaagccatatgtcataatgcttgctgttgaagactctccttgagtagttggaattcttgcaatcatagcttgctctggtgacaattggttcttgcctcctagtggttgaactatactagctctaccaactgatgagtcaaatctttctataagtgattttttagaagctacattgatatctgatagtctcctctttagttctaatgtgaaatcatcagctaagtcatcattaaataactctgcttcttcaggcttaaatataacatcttgctttcttggtgcgcctgttgagtttaagaatgatctctttaggttacatacttctatatccttatacatcatgattaatctttcagagtctgtaacttctgcaactatagttgcttcaagattttcggcatttgcatactcattaaacttttcatagtcatcttttgcaattacaacagccattctctcttgtgattcagatatagctatctccattggactaagtccttgatactttagtggtaccttgtctaagtgtattagaagtgaatctgctaactctcctatagcaacgctaactccgcctgctccaaagtcgttacacctcttaatcatctttgctaattcaagtatcctaaatagtctttgtatctttctttctgttggtgcattgcccttttgtacttcagcagctgagtcctcaactgatttatctgtttgtattttagagcttcctgttgcgccgccaataccatctctaccagtcttgcctccaagtaagataattatatctccattagcaggtactcctctgtatacattttccataggtgctgctgcgataactgcacctacttccatcctcttagctttgtatcctgggtgatatacttcgtctacataacctgttgcaagtccgatttgatttccgtatgatgagtatcccttagctgcgtctaaaactatctttctttgaggaagtttgccttcaagtgtatcttcaatagcttctcttgggtcagctgctccagttattctcatagcttgatatacatagcttcttcctgatagtgggtctcttatagctccaccaaggcatgtttgagcaccaccaaatggctcaatctctgtagggtggttatgtgtttcgttcttaaacattagtagatagtctctaagtctaccgtctatactaactttaactttaacagagcaagcatttatctcctcacttacttctaagtcatttaacttgcctaagcccctaagtttctttgtaactatagttgctaagtccataagtgtaagatctttcttcgaatattgctttcttacttttaagtactcattaagtgtatttctaataacttctataaaatcattttcaccttcgaagttaatatttgttaattgtgtattgaatgttgtatgtctgcagtggtctgaccaatatgtgtcaattaattttaattctgtttgactaggatctctgtcttcttttataaagtagtcttggaacacttttaaatcttctaatgacatagcaagtgacttactttcaaggaaatcttttaatccatcttcatcaagtttaataaagccatcataaataagtgactcaatgttcttatcaaaattttcttttaaagtcgtaggtattcctattaaaacgccttctgcttggtcaactgtattgattaagtgcttcttaatctttttaatgtcttcttcagatacattgcctctaatgtcatatactttttcacatcttgcaagtacatcatctttaccaagtgtaaccttgatagtgtccttcaaaccttgttctctttggtcaaattgacccttcttgtatctaacaacaaaggcatgctttaaattcttttccatctctaaagcgtcatccaataaataaatattatctactggcttttcgcatagtatggtatttgatatcttattaatttcctcatcagaaagtaattcaatatcatatctgttataaacttttattgaatcaagattaatcttaagaaactctaatctctttagttaaaccgtttgattcagcatcaaattcatctttttacaaacataaactcttaaccactggaccaatatccctcctataatgcattttattaaatgaaatttttgaatttcatcataaactttcttatatgcttcttcaaatgtatcagctttgcaaagtatatttagcactctgccaccattagtaagaagcttatcgccatcagctttaacgcccgcataatttacttttacgtcttttgatagtgtatctaagccttttatttcgcaccctttatcatattttgctgggtagccacctgatgctaatacaacattaacaatctttttatcattaacttctaatttatattcattaagtcttgcttcactagttttgattaacgcatccaacaatgatgagtctagcctttcaagtataacctcagtttctggatcaccaaatctagtgttaaattctaaaacttttattccatctgagtttatcataaggcctgcaaaaagaacacctctgtaatcaatgccttcctctttcaaacctttgataaatggttttacaagttcttcttctatatcctttaagtatggtagtgacattaggttcggtgaatatgaacccatgcctccagtattttctcctgtttcgccttcatagacttttttatgatcctttgcgctaggaaacattatatactcgccatttgatataagcacatgaacagatgtttcgaaaccatctatatattcttcgactattatcttgtcatcgccaaactttttatctagtaataactcattaagtgcctcgtttataccttcttcgcttgatgctattatgactcccttgccttgtgcaagtccatcatactttagtactactttattaacttttgattcatgaagtaaggagtacgcatacttctttgcttcttcgacgctatcagtctcaagatacttcgctgtgtctatattatatttttccatgaacttctttgaaaatgctttgctcttttcaaacatagcagcttccttctttggcccaaatatcttaagtccttctgcttcgaacttatcgactataccaaagcataatggatcttctggacctactatagtgaagtcgatatcattctctttagcataatttgctaagttgtcgaagtccataacagctaagtcgatatttttgaactcactctttgtcttgccattgccaggcgcgaatgtaatatcaaccgaactatcttgttccttaatttttgaagcaatggcatactcacgtccaccgctacctataattaatatcttcatagccaactccttatatttgtacaaagccaacttttttcattacttttcttaaagttttattagcaaggtatctcgctttatctctaccttcagccataagcttttcaaggccttctttatcttgaataacttcattaaaattatattgaaagtcttttaaatcttcgtatataatatctgctaaatcctctttaaactctttatatccaagcgagtcatacttcttaactatatcttctgggctaataccagtgaatgagctatatatatttataaggttatatagaccctctctctttggatcgtaagcaaagtttggctcactatctgtaacggcctttctaatctttgaataaattctgtccttgctatccatgatatagataaaactgttttgatcttcgtcagacttactcatctttctacttggatcttgaagagacatgattctctttcctgtcttagcaatgtatgcttcaggtaccttaaatgtgtctgagtacttactgttgaatctaattgctaaatctcttgcaagctccatgtgctgagtttgatcttcaccaacaggaactaagtctgtttgatataatagtatgtctccggccattaatactggatatgttaataaaccagcattacagttttctggagacttcttggacttgtccttatactgagtcattctattaagctgaccaatatatgctatagtatcgagtatccaacctaacattgcatgttcaggtacgtgcgattgaacaaataatacacttttttctgggtcaacaccacttaccagcatcatggcaaatatttcataagtcttcttccttaattcctttggaatctttggtacggttatgctgtgtaagtctgcaactgcatataaacagttgtagtcatcttgaagtttagctaaattctttaaagctcctaggtaattgcctatggttaagtcacctgagggctgtatagcgctaaatgctgtttttctatccattttatatctcctttatatcattaaatatcgcttttaaatgtattaccatcttgaatgttcccactttcatagcctttcttgaaccactccactctttgttcgcttgttccgtgtgtgaagctatcaggaactactctgccttgatacttttcttgaagtgtatcgtcacctatctttgacgcagcattaattgcttcttcaatatctcctacatcaagtatgcccttgtctttaatgcgattagcaaagactcctgcatagtagtctgcttgtaattcaagtcttacagagtatttattgtattctttttctgatactttgccttgcagtgcgtgaacttggtctaaggtgcctaataacttttgtacgtgatgacctacttcatgtgcaagtacatatgccatagcaaaatcaccctttgctccaaactcattcttaagttgatcaaagaaggaaaggtctatgtagatgttcttatcaaccgagcaataaaaaggtccaacctgttcagatgcaaatccgcaacccgacttgatgcctccattgaaaagagtaagctcaggttcttcatattttagtccgttctccttaaatacttcatgccacacatcttcagtgtcctttaagacaactgaaatgaattctttgtactcttcttctctttcgcttgtgataggtgtaacttgtccactttgtatgccgttgccacttggaccaccaaagataccgtcaccaaagactaagtataaaactagtaaaagtataactccacctgtacccatcttgaagccgccaaagtttggcattgctcctcctgactgacctcttctgtcgttaacattggtagatttctctctacctctccacttcatttcatcatcccctatagattcttaattatatcttcaaccttacttgctactaaatcctcatctatgttcttcatctttttgttttccatgataaccttaccgttgatgatagtcgtatcaacttcacttccattcattgagtaaaccattgcactaattaaattattttgtggctttaaatttgtattatcaagatcaattagtattaaatctgcaagtgatccttcactaatgtttatatcctcatcaaaaatatatttgtatggattaatagttgctagcttaagtacttcatcagcgctcataacttttgggtcaagtgagcgagctttagctgctagtgatactgctctcatctcagtaaacatattttgcatgttatttgagcttgcgccatcagtacctattgcaagttttattccgcgcatagacatatttttaatatctggtataccgcttgctagtttcatatttgaagacacatttaagctaacaagtgcattgttttttgctatgatgtccatatcttcttcagataaatgaacgcagtgagctagtattgtcttttgatcaaacataccaagctccttaaataactttataggactcttcttgtattctttatatgaattattaacttcagtaatagtttcattagcatgtgtgtgaatgattaagtctaattcttttgcaagatctatacagctctttagatattctggccctgttgtgtatatagcatgaggagctattgcaagtcttaataagccatctttttgatgatacttttcatacatgtcacgtatatttgcttctctttcttttttaacagcatcatttgtcatacctcttgcgataagtcctctcatgccaatctcatttgcagcatcaaagactctttcacagaacatatacatgtcgttaaaggcagtggtacctgtctttacaagttctataaaggttaaaaggctcgcccagtaaatatcttcggctgtaagctttgactcgagcggccatattttattttgtagccaatccataagctccatatcgtctgcgtaatttctgaaaacgctcattgctatatggttatgcgtgttaaatagtcccggcattaataatttatcagtcccgtctattatatatgcgccagagtcatctatgttatcagcaatctttttaactctattgccatcaattaaaacatcacaaggaccttttactatcgattcttctacatcaatatacttagtatttttaattagtatcatcttaacctcctatatgtgaaattttctttcgtatatacaacaagtggcactataactaaacaagctgttatgcttaatagtgacgcaactaagttaactttaagcactctatcgatattgtatatgtgcactatatttgataaaataagcgctattatatagcttgacaccttggctatgagtaaagaaacaagtagagagaatatgtaagatataccaaactttacatgactgaggtatcctatagcatagccaaaactaatttctataaatagcataagtgtttttatatcaaggtttaaatttttctatataataaatttagtataaaataagtataacgctaggaaacgagaattttatatctagtgtaaatacagctatatataaataacagtattgctagatatcgttaaagcctttgtccagcttgagtaacgcaaaattcatggctagacttagggctataaggactacacttatcattatatctaaagcattatctttaataaatttcattatgatctttccttaattcattaatattttcgttgtaatattctttctatcgatattaaattcttttattatctcttcaagttttcatcgttctttacttcaatttcaagataaggcctgtcaaaagtttctttgtcaaattcatcaaaatcaaagcgagcacccttatatagatatgagtctctttatagtccacttttcaggaataattccaagcatttcgaaaatttctaagattgcgtccttatctttaatctcactgtaatctcctttgagttacgtagcccaccgctatcctttcctcttatcttatatgtcaagtaaaagtcttcttattatctttatccacttctcttagtcttaatagagattttaataaatttgtcttagaatctatatcgcatttcagtatataattaacttgcttttcttcacctaaatattgtgcacccttagatgaaagttctccttttaaagcatctaagtcaagattaaaaaccttgacttctttttctctttcaatcattattttattactagactcgctagtttttcatctatgattacagtaacgtcttgatgcaagtttagtagtgaaacaggaaccttagatgatatcttttagaatttaaaagataatctatggcaaaactcttttgtgagccgcttgcaatcaaaactatcttcttcgctttgaatatagatccaacacccattgttatggcaaacttaggaacatcatcgatgtcatcaaagaatcttgagtttgcaactcttgttgattctgaaagttcttgcacatatgttacagcgcttaagtcatcacctggctcattgaagccaatgtggccatttttgccaacgcctaaaacttgtaagtcaatctcataatgcgatagcatctcttcgtattctttagctgccttatctaactcatgattttctgcatgaggtatgtgtgtgttctttttatcaatattgatatggttgaaaaggttctcgttcataaagtagtaataactagctgggtgatccttctttagtccaacgtactcatctagattaaaagttattacatctttaaagtcaattgttccttctttatttgcttttataagttctttatacatgccaatagggcttgatcctgttgccaaacctaatacactgtcatgcttttcttgaatttgtttaataaatatttgagcagcttctctactcatttcgtcgtaatctttgcatactataactttcatgctaacacctctctattaatttaagtttaaaatttaagtagtcacttgataccaatgagtagtctatgccctctatcaagccttctcgtctgtacctatggccccccgcatgcaagtggccatatatacatttatatacattgtgttctttcatcaaatcgtgaaactgatttggctttaagtccatgttaaatggcgggtagtgaagcatcactataatcttctttgtcttgtccgccttttcaagtgacaatgataacctaataagctctctatctgttatcttcttatcgttctcttcgtcatacttatagttatcctcttgcatccagcctcttgttgcgcagattgtaaagtctttataagtatacgcatcgttttgtaaaaagtatatggatttaaatccaaaaccattcatcttagatatgcttgtccaccaataatcatgattacccttactgataagcttcttgccaggcaattcatctataaattttaaatcatctatagcctcagtaaatcgcatagcccatgaagtatcacctggcagcaaaactaagtcgtcttctttgacattctcaagccagcttgccttaatcttttgatcatggttttgccagttgccaccgaagatactcataggttttaaatctgttgaatctaaatgtaaatcgcctatagcataaatcattttttcacctctataactgtatataattataacacagattaagctctgagagaacacttttttcgtctttactgcttgtaaataataatacttgcttttcttttgctaaagagacaaatacctttaacgcgttcttcattcttgactcatcaaagaagacaaggttttcatcaaagataagcgctgactttatacctagagcgtcgactaaggcaagtcttaggcttaggtatgacatggataagacttgtctactaaggttttcttcctcataaaccatattcgtatttttgtctttaagcattatcttgaagctctcatctaacataaagaattcatacttatctgatgaaaacagatctaagtatttattcgcttcttttattatctttggcatgtagcttgtattaatctcggatattaaactagaaagtatttcgcttgcacaacttagtgcgctctttcttctatagagctccttcatcctattctctagctcatcacgtcttaggctaagctcgtatgttctttgtaaaagagcgtcattgtagttaagctttgtttctaattcctttagctctaagtctaattttcttatctcttcatcagcctttcttatagagtagcctttaaacttttcatacaaagtgcctttagtttttgctaaataatcaaggaccttctcttcacttagttcatcaaaattcttttcgctatatgttttaaaagttcatcaaaactttgtaaatagttttggctcatctcttgatctttgcttagtatattcactaatgaaatcatcatcactaataatattatatttatctaaaatagctttttatcaataattaattttctctaagcttatcacttttctttgctttatcaaaataaaacttatagcaaaattataagaaatgcagctccaatattaaaagcaattccacttgatttaataaaataatatataaaactaattacacttactaaaagaaatgcatatgataatttttgtgcatttttctagactcaatattatttattgaatcaattttactattaaattcaagaaattcttcatagtcgtcactagcaatgtttttatcatttttaaaaatctttcttttgcttttaagctcttctgcctttaataaattctcttttcgtaataagacttcgcactcttgtattcatttaaaactcttttctcatatcttgcgctgcatctttttcttgttaagatagttctttttatccagcatgtctatagtattttcttgtgacgcatataagtttgctaaatctctatctaggcttgcaatctcatttttcagtctataaagctctttagtctttgcattctctgtaccaatcattgcaatttcattatcaatattgctttttgcctcacttaagttgtactcagcttcatcattagtctttagcttaagcaagagctcccttatatcgtcaaagtcatcaaagtatagatctttcgactgactgatatatgtgctctctgtaaaaacattccttgaaaaacctaataagatctcacctatagacttgttagactttgcactttctcttttaatatcttcagtgatatcaagaccgttcttacttacaaagtatgtgtcattaataaagtctctatatatctcataagttatgccgctttttataaatgtcattttgccactatactcatttttgtttatgggtttatatcttaggtagtctttaatcttaagctttctctttgtatttgccttattgacaccaaagagcataaaggagataaaggcgtgtatagtagactttccactctcatttagcccatagataaggttaaatgattcgtcaaagtctatgtggtaattattaaatttgccaaaattaattatatcaaggctcttaatcttcatagtaattctccgtgctttgcattgctttaagtgctatcttgattgcttcttttctaatatcttccggataagcctctgccttctttactatcttttgatatatctcatctgatatattgcttatctcgcttaagtcattaattacttcaagatagtagaatttacctttaataagacttaatatcctgtttatatttaaatctgattgtatggtgcccttaagattgattctgtaaaaatttttatctttatctgtgattgcttcaaacttccctaatatatcttcaaagtcatcttctttattgataaatatatcttttataataaattctctttgtgcaaatgaaacaaagtttacacttccttggattatatcaacttcataaaaaccatgctctccaagctctttaaagtcaagaggctctagtgatccactgtagtatgccccatccaaaactttacccttcttgtgtatgtgtcctaaggctatgtagttgaagccagagtacacaagtggacttatatcaactttatacttgccatcatttatatctccatgaagggctgctatgttatacttattatgatctagctctactcttttaatcgcaaaagcactctcttgatcacttaaccaagaagctccatatacgcaaacattctcacctatatccacgcgctcaagcgtatccgttttgaatacgtaaaggttctcagtaaaattactaaataagtaatcatcagtgtagtaatcgtggttaccgcaggataaaacaattttcccgtagtagctgtcaatgatcttcattagatgcttagtctctgtatatgtaagtgcatctctttcaaagaagtcgccactaataataattaaatcgattttattgtcattggcataattaataagcctttcaaatgttatgaaaagctcgttttttctctcatcagatcttgctcctagcgtcttatttttgtatttaaaacccaaatgcaaatctgctgtgtgaataaatttattaatatacatagctgtaccttattatatcagtctctgacataatcttttaattacggagaaatcaaagttaagtgtgtcttttttcttaaagatggaaaagctacttgctatcttaaacgaagtctctaagtcatactttctttcaaaagctatggcaagtccaagaagcgccatgttcttgtcaatgtgcacattaatcttcttgtcataatcaaataagtagtagcaatcctttgtaaaaataatcaaattgtcattaaatttaagaagtataattctgtctttgtctatagccataaacttaacaacactaactacgtcatcaagtgtcgtaagtcttaagttaagtatgtcactaaggtccttgtaatccatggacatagcgaagacgttcgagtccatacatagcttcatagtaccctttgaactagaaacaaaaagtttcttcatatatctattcgctacattgattagtccttgatagaagtcagggctaatattgttatcaaagtcttccataagaagtgttactcttgtatcgtagatgatctcatcaaacttatctatgaagttaagttcatcatccctagttatgcgaggagcattttcaataattcttgttgtacgtgctgcttcttttatatcgataagtgaccttgcttcgtccttaatgttaactaagtagtaatcagaaagatacttctccaaatagttcctatacttcatagctgcatatccacctgcgaatgaaagcaccttgtagtcctcttttaaactgtgaaagatttcacttgcaagatagctcgaaccataaaaggagtcactcattacatctgcagtgttcttcgatgcaagataaagcttatctaagctcaaggctttatatttaatcaagtcagtgttaagtaataaaatcatctctctacctcctctgctacttatattatacactatattcataaatatttcttctaaaattataaaaaaagctttatttatgctattatttagtatataatatagccgaggtgattaatttgtcgaagaaattattctcttttttattgctcatttgtataatgcttacaagtgcaaatgtatatgcaagtgataaaacagatgagggtgacgatactaataagaatgcaagcttctcattcaattatgatcttgcaataaaaaatgtcaatatagttaatccagcaagaaacgaaattttatataaatataacatcgctattagtggaggaaaaattaaagtaatcactaagggtgatgtaaaggcaaacagagttatagatggtgaaggtgcaatgctacttagagagtttatagaccttgatagtactaatgcatctcgcgagcttgaccttcttaaaactgctgatggtattggtaagagtgtaagagctaacactgccgacatagatgagtggtctaagtctgtagaaaatcttttaacaactaacgactatctatcaatcactgactctgaaagcattaaaaatgccatacttaaagaaagagagatgaagtatgacgatgcagccatcaaagatatagttagcgctatattaaaagaaaaggaagcaaagtctgcgggagttaaaatatcaatcgaagaagctaacgatcttaaccttcttatcaacactatgaaggctgttaatgatgaaaattttgtcttctacatcaagcttagcaaggttaaacatgacaatataattcaaactataaatcaaattacagaaattataaaaatagtaagaacaattttattttatgcgatatgaatgactttgcaggtcctgataaggtctctgcaatagatagcttaattagtaaatataatcaagagaatgaaaatctctactacacatttaatccatttaagtacattgttttaactaattataaggacaagcttgatatagttaaaaatacaacaacaatatatctaaacttcaacttgcaagttcgaataaattctaccaaattcaccagtacaaagatatacttacgactactgaagacgttattgtacacgacgcacttagcgactctgacatcgctgctatgataaagtcaaagtactcactaattgcaagcaatccaaatcttgctaacacgtcaaacaaaatttatccacctaacattaactcttttcttgagtatatcagacttgcaaaagatttgggccttgatactatcgagatagctaataaactaagctaccttccatacaaggttctaaatttggatagatatatgaacgcttcaactatagaagtaggacaaagtgcatcatttttaacaataaactctaaaaatattagtataaattcaaacttacaaagtgtaaagccaagtttaggcgtaaaatacttagtacacaacggcatcgttacttataaccatggacaacacaatcaaaaggacgctaagtcttttataattaatactatggaaagaaatgacgatgttaagaacttccatataagttacgagagcgatatgtctaagacagctgagctagaaaacgcatacattatcgatggtataaagtatataagcttagaagaaattatcgccccactaaaccttgtttataaaaatgaaggcaacggtaaatatactataggcaacctaataaatgttgagttaggaacaagtgatgctagtttaggtgcagataaggtgcacttagaaaaagaagttattacgtataacaataatctcttaatcgcattgaacgatcttgaaaaattatttcaaaactactacaattgcgatgtaagtgatgatcacatatcaatcaaagcaagcaacaattcaaagatgcttgacacaacagactcagttgagaaaaaagaaagcacaccactaatcattaagacaagctatgtaataatatcatacatattctcagctttaatggtggccttcgtattaaatacattaaagagaaaaaagaggagaagaaatggaaaattataatttaaaatctattcttggaccgataatgataggcccatcaagctctcatacagcgggagctgcaagattgggtaggatagcaatgaaattagcaccaaaggactttactaaagtctctttctacctacacggttcatttagagaaacatataaaggtcacggtacagacaaagcgctacttgctggagtcatggacttctaccctgacagtgaagagattaaaaactcatttgaaatagctaaagaaagaggcttagagtatgaatttatcaagtcagaccttggttacgtccatccaaacactgttaagatggtcttccactatgatgacaaagaagacttctacgtacaaggcagctccattggtggaggcagtatacttataaaggatatcaatggtgcagatgttgagttctcaggtgaaaaacctactctagttgcaaaatacattgacaaaaaaggtatcttatctagaataacagcaacatttgcaatatctggcatgaacattgccgacatgcatgtagacagaactggtaaggtcgcaacacttatatgcgaacttgactcagactttgatgattcaactataaaagacataggcagaattgatgacttcttatttgttaagtatttaaaccctgttaaggaggacaactaatatgtatacaaatgcacaaagcatgatagatgcatgcgaagaacaaaataaaaagctatatgaattacaaatagaacaagaaatggagtctggcgaattaacaaaggatgatatttacgaatacttaagaaaaacatatgagattatgaaaaaatctgccaaggctggtcttgaaacacctatcatgtccatgagtggtatgactggaaaaaacgcttttaaagttaacgagtatgctaatattggtaatccagtatcaggctctttaatcactaaggctatggcaagagcattatctacatcagaagtaaacgcttccatgggtagaatcgttgctgcacctactgcaggagcatcaggaatactaccagctacccttcttactatgcaagaggagtttggatactcagatgaggagatatataatgcgctactaacagcatcagcagttggcgaactaatagctgtaaatgcaactatatcaggtgctgaaggtggatgccaagcagagtgcggcgcagcagctgccatggcggcagcagccatcatagagttaagaggcggaactatagagaatgttttcacagctgcaagctttgctctaaagaacatcatgggacttgtatgcgacccagtatgtggactagttgagtacccatgcaacttaagaaatgcatcaggtgttgttaatgcaatcatatcagctgaccttgcactagcaggtgttgaagcgttaataccattcgacgaaacagttggcgctatgggtaatgttggtaaagaactacctgtttcattaaaagaaactgctataggcggagttgcaggaacagaaacagcacaaaggttgtatgacgaatttttaaacaaataagtagatgaatatagcaaaagagctctcaataatgagggctcttctttcttttaaatcgtatttgtctttaattttttcttgattttttatataaagtatgttaatatatataggtaagccgaagtgatggaattggcagacgtacaggactcaaaatcctgcggtagcaataccgtgcgggttcgacccccgccttcggcaccatgaacaaaaaattctacattttttgtttcctttcttttttgcaagtagcgtaatgctacttgcttttcttttgtctaatatacattaaacatatattcttactattaattacttatcttagcaattaatgtatagtctaccctcttaatgtatgtaaataaataaggctcctatcaaggagcctcacttatattagtcttctaaacctagttttttgaatattaacttataaccgtcagcaccgtagttaagggatctattgattcttgagattgttgctgttgaagcgcctgttgctacttcaatttcgttgtaagtcttattttctttaagttgttttgctacttcaagtctttgagctattgcttgaatttctttgatagtacagatgtcttcaaagaatctgtagcattcttccattgtttctagcgataagattgcttcgaagaagccatcagtttgttcgctttttaattttgaactgtaagccatttctttacctccctatatatttcttttttagaataatcctactatctctcctgatggtaatatatcaatgttgtctgctgctggtacctttggtaagcctggcattgtcattatgctacctgttaatgctatcaagaagccagcgccatttgatactttaacttctctaactactatgtggaagccttcaggtcttgcaagtaagtctgggttatcagataatgaatattgtgtcttagcaacgcagattggcatcttgtctaagcctaatttttctaagctcttgatgttcttcattgctggtacagtaaattctactccgtcagctccatatatttccttagcgatgatttctagtttttctttgattgataggtttacatcatataaaggtttgaagtcagctttgtcttcgtcgcatactttgattactttttctgctagatctaatgctccgtctccaccttttgcgaatacttctgtaagtgagcattcaacacccatcttagcaagtctatcttctatgaatttaatttcattttcagtatcgcttgggaatctatttatagaaactatagctggtagtccaaatttcttaatgttttctatgtgtttttcaagatttgcaaagcctttttcaagtgctactaaatcttctttatcgtaattttcttttgtagctccaccgtgatgttttaaagctctaattgttgcaactataactgctgctgatggctttaatccgccaaatctgcacttgatatctaagaacttttcagctcctaggtctgcgccgaagcctgcttctgttactgtgtaatcagcaagtttcataccaagcttagttgccataattgagttacatccatgagcaatgttagcaaatggtccaccgtggattaatgctggagtgttttcaagagtttgtacaaggtttggcatgatagcgtctttcattaacaatgttactgcgccttgtgcctttatatccttaacataaactggtgatccgtcacgtctatatgctatgattactcttgatactctttccttgaagttttcaagacttgttgatagacatagtatagccatgatttctgaagctactgttatgtcgaaaccatcttctctaggatagccgttaggttttccacctaagccaactataatgtttcttaaagctctatcgtttaagtcaacgcatctcttccaaacaactcttcttatatctatgccttgttcattgccttgatgaatgtggttgtctaacatagctgagattaagttgttagctgatgttattgcgtgaaagtctcctgtgaagtgtaggtttatatcagccataggaactacttgtgcatatccaccgcctgctgctccgcctttaacgccaaatgatggtcctaatgatggttctcttagagctgagatagcttttttacctaatttgtttaaagccattgataaaccgatgttaacagttgtctttccttcacctgctggtgttgggttgatagctgtaactaagataagtttaccatcttttttgtcttttagtttgtcaaaaactcttaggtcaaccttagctttgtagtgaccatattgtattaggtcctcatcttcaatatttaagtgtgctgcgatttctgtaatgtctttcatttttgcttcttgagcaatttgtacgtctgttttcatttgtacctccttttataacatgaaaatatattttatactctacagtattatataccacatttatcgatttaataaactaatttatactataaatatatcttaatacaaataatattgaaagtatccacataagtggagaaacttctttatatctacctgcaattgtctttaatattgtatagctaatcataccgaagaagataccttcagcaatgctgtatgcaaatggcatcatagcaattgttaaaaatgctggtattgcttctgtataatctctaaagttgatgtccatgataggttccatcataaacataccaactgtaattagtgctggtgctgttgctgctgctggtactagtgtaaatattggtgcgataaataatgctagtaagaacataactgctgttgttagtgatgttaaaccagttcttccgccttcagctacacctgctgatgattcaacaaatgttgttactgttgaagtacctagcattgatccaactactgtacctactgagtcagcgaagaaagcttgacttactctaggtagcttaccatctttatcaagcatatttgattttgatgcaacgcccgcaagtgtgcctacagtatcaaacatgtctacgaataagaatgttagtactgccataaacatttgagttgtaaatacttgtgaaaaatcaaatttaaatgctattggttcaactgatggtggtagtgagaatattttaaatccttctgggatttgtgttatacccatagggattccaatgattgttgttaaaataattcctaataatagtgcgcctttaacttttctaattactagtacaaatgtaattagtaaaccgataagtgctagtagtgctgtgccttctgtaatgtttcctaagccgacgattgttccttcaggatgaactattattcctgatcctgatagaccgattaaagagatgaataaacctatacctactgaaactgctttttttagtgtcaatggtatagcgtcaaaaattacttctcttcctttgaacaatgatagagcgataaatataataccttctatcaatactgctgttaacgcaaactcccaagaaagtccttgtcctagtactactgagtaagcaaagtatgcgtttaagcccatacctggtgctaaggcaaatggatatttagcgtataatgccataattaatgttgcaatagctgctgatagagctgttgctgtgaaaattgcgttttgatccatgcctgttgaacctaagataattgggtttactactaaaatgtatgccatagtcataaatgtagtaatgccggcaactatttcggttcttgtgttagttccgtttttctttaattcaaaaaacttctccattttctacctcctaatgtctaaaatgtctcatatgagtaaatatcattgctatgttgtgttcgttacagcacttaataacgtcttcatctgctactgatccgcctggttgtataattgctgtaacgccttgtttagctagtaattcaaccgagtctgtgaatgggaagaacgcatctgatgcaagcactgctccctttgctttgtctcccgccatcttaactgatctttctactgtgaagaatctatttacgctgcctaggcctatacctactgtagctgagtcttttgcaagtagtgttgcatttgacttgcagtttttaacaaccttccagccaaatttaaggtcttctatttctttttctgttggttttctatctgtaacgcattcaaagtcttcgaaaaattctgtatctctgtcttgcaaaatcattcctgatagaactttcttcatatcctttgaaccgtactcgttgtttgtaatattgtctattgttaatattcttctgtttttcttcttatctgttagtatcttaaatgcttcgtctgtatatgatggggccataattacttctaagaatatgtctctcatctcttcagcagtttcagcatctatctctctattagatgcaatgatgcctccaaatattgattgatcatcacagtcgcgagcctttctaaatgcttcagctaaagtgtctgcagatgcaacaccgcaagggttagtgtgcttaacagcaactatagtaggtttttctgtaaacatctttagtgtctcaagtgctccattagcatcgttaatattgttaaatgataattccttgccatgaagctgcttagctgatactaatgaaccttcttctacctttgattctttgtagaatgccgcattttgatgtgggttttctccatatctaagtgagcttatcttcttgtagccctttgtatagtactctgggaactcgataccttgctttctattgaagtaatcagcaattaatgaatcataatatgctgtgtagttaaagactttacctgctaagtactctctagtctttagtgatgtctctttattttcttttaattcttttaatactagatcaaaatcgcttggatccataataacagtcacaaacttatagtttttagcagccgctcttatcatcgatggtccgcctatgtctatcttttcgattatctcgtcgtgtgttttgcttggatcgttaacatattcttcaaatggatatagattattaacgattatgtcaatatctgatatgtccatcttcttaataaattctctgtcttcttcaagatctcttctatatagaatgccgcagtgaatatatggattaagtgtctttactctaccgtctaagcactcaggaaaatttgttacttcagtaacttcttcaacctttaaacctgcgtctatgagctttttatatgttccaccagttgaaattattccatagcctaaattttcaagttctctcgcaaactcaactatgcctgttttgtcataaacactaatcaatgcttttttcatcaattttgccccctattattttatctatcgcttcaatcaaaattttatgttctatctcatttaaaatcttcttctgcaaagattctgccgtttcttcttcagtaagcttgatcttccgctgtatgatgattttacctgtgtcagtaccctcgtcaacgaagtgcactgtcgctcccgagtaatcatcgcctgatttaattacgctctcgtgaaccttcattccccagaaaccatctccacaatgctttggtattaatgaaggatgtatatttataatcctgcctctatacttttgtataaattcgtgtgatagaatctttaggtagcccgcaagcacaattaaattaggctcatatttatcaagcacctcaagtatagcgtgattgaactcttcgctagaagcatattttttaatactaaagtagtaggagtcaatgccattatccttagctctttctagtgcataagctgcttttctatcacttatcaagcaaacaatctcagcgtcaagccttttttctttaacagcatcgattatggcttgaaaattcgtgccagaaccagatgctaaaacggctattttaaatttagacatatcttttccttagtttctttttcttcaacgtgacctaagattacgtagtcttcaccatgcttcttaagaatttcttcagtcttagctaattcgcctttcgatacagcaaagaccatacctatacccatgttgaatgtgccaaacatctcttctatatgaacgtcagcccatgtcattaaatacttaaatattgtaggtatttcataatctttaagatcaataacagctgtgtagccgtctttaatcattctaggaatgttttcgtagaagccgcctcctgttatatgtgagattgccttaacattaacatgctcaatgatatccatcattggatcgtagtaaattcttgttggtgtaagtaaaacatttaaaagtgtgtcatcaagtccctcatactttttgtttacatcaactttatcgttatcaaagataatctttctaactaacgagaaaccgtttgaatgaacgccacttgaccttaaaccaatgattacatctccgtcttcaagctttgagccgtctataattttatcttcatttacgacgcctacagcaaagcctgctatgtcgtactcaccttctgcgtaaaaacctggcatctcagctgtttctccgcctataagcgcagcatggctcatcttgcatccttcggcaacacctgaaactatctttgccatcttctctggaataagtttagatgaagcgatgtagtcaaggaagaaaagtggttcagcaccttgacaaatgatgtcattaacgcacattgccacagcatctataccgatagtatcgtgcttatctaagataaatgcgagctttagcttagttcctacaccatctgtgccacttactagtactggcttatcatattttttaaggtctatcttgaataaaccagaaaagtttcctatatcgtttaaaactccgtctctgtttgtagatttgataaggctctttataagttttacctcttcgtaacctttagtcttatctactccagcgtctttatatgttagtcccatagctttacctacttattaagttctgcatcgattttaacgatgtcttctctcatctttactttatagtcttcaagcttcttagcaagttcatcatattttattgccaagatttgtacagctagtattgctgcgttttcagctccgttaacggcaactgttgcaactggaacgccctttggcatttgaacaattgaaagaagtgaatctagtccatccattaaagagctctttacaggaactcctataactggtaaagtactaagtcctgctatgactcctcctaagtgtgcagccttacctgcaaacgttattattgcctcgataccattcttctttgcgtttttagcaaagtcaaatgctacttctggtgttctgtgagcagagataactcttgtctcatactcaactccaaaatcatcaagtaccttttgtgatttttcaacaacctctttatcagagatgctacccattactaatgcaactttcatgtaattacactcctttaattaaaatattttaaatattcctcatttatataataatttagatcctcacttcttatgaagcatgatccaatattggaacttccaaccttgtccttgtagtaatacaaaattatggaattatctacaatgtaaaatccagtaatattgtttctaatcttgttcttttcttcaatattttttgcaaaattatataaaatcttttctctaacatcttgatcttttttaatcaaatcttcgtatttaatctcttctgcactattataattaaatgtttttgtataaaattcattttcaatcttattgtcagcatatactttattgatatagaagcaaagtgaaacaagcttatcatctgatcttgctatgtcatatgtgaagtataacttctctaggttatcatcattttttgccttttctatgttagtatcaacaaaatattttattttagcatttatattgtttctatacgctcttttaacatcttcattgctaaagaatacaggatatgccaccgaacacttaccatcgttaataatacctgttttgataccatctatcgcatttctgatatatatagtgtcagaaacgatgaatgtatcataatcaagtagatagtataacacatctataggcaaatataattttgattttaccaaaattgcttcgttgctaagttcaatacggtctctgttgtatccgctataaattttagaagcaagtttaacttttatcttcttaatgccttttttgaaatagcaagtcttatcttcattgttccagtatatgtcgtatctaagctttgtaaatacctctcttgcaggtatgtatatagcctttttatcaccttcaacgcgctctaatactttctcttcaaggtcagaattaacaagtccagctaatttatttatatttgagtcatttatttttaacttatcattattctttgcataagaagtaaagctcattaaaaatataagagcagataacaggattaataaaagctttttcatcataccacctctaaataattataccacaaacaagaagctatattcaagtagtactttaacaaatgtaaaaatccctgcacataaaagtacagggactaagatctattgtattaatttttttaattcatcgagacttagagataagctttctttattagcaaggtctcttactgataaaacttttttctcaagctcttcttggcctatgaagataatgtagtcaaagtcattagtctcagcaaagtcgaatatcttcttcatcttcatctttgaatataatacctctgagtgaacgttcaaagcgtgaagttcatttaagatgtctatcgaataagccatgtctatatcaagtggcgctatcaagactgattttttatctttttcaaactttggaagtatattcttctcgcttaattggaagaataatcttgttaaaccgatggatatacctactccaggtaaatttctctttgagtagaactgtgtaaggttttcatagctaccaccgccagcaacacttcctagctctttataatcatcaagagtagtttcaataacagttgatgtgtagtagtcaagacctctttgtaattttaatgtgaacttataattgttttcaccaaccttaaatagtttgatattgcttagtacttccttcatctcagaaaggccttttaagaagatttcgttatcaatattaagtccttctaagtacttgatagtttcgtcatttgtaccttcaaactctattagtgctaaaatcttttttacagcatcagaattaatgccttgatctaaaagtagttcttcaagactctctctaccaatcttgtcatacttatccaaagcgcgcacagccgcaaccgtatcctcaactccaaggcttcttaggaaaccattcattatgtttctattattaatcataatagtaaacttatcaaagccaaacttcttgaatattatgcttataatcttaacaagctctgcatcgtaaaactttgaaagtgtatcatcacctatgatgtctacgtcgcattggtagaactctctgtatctacccttttgatttctctctcctctatataccttgtcgatttgatacctcttaaatggaaatttaagttcatgctcatgcatgctaacatatctagcaagtggtacagttaagtcgaaacgtaaagatgtctcagtcgaagtgttttcaatattgtaaatttgcttttcagtttcaccgccacctttagcaagcagtatctccctcttctccatgcttggagtgtctataggtaaaaaagagaataattcataagtctctctaattatgtccttcatcttattaaaaatcaattgctcttgtggtaaaagttccatagtacctggcaatattgatggttttactatcatactaaacctccattatcatcatagttcctacatcaaatatatcacattccgttaaagaaatcaattctttattgattgctcgcgcaaattcttcgaggtgaagtctatttatctcatccttaatgactcccgttagaaatatcttatcaagcgcatatccacttgctccacctatgaagccatagctatagtccttgatacttacaagacctttgtctaataatagcgttttatatccaagtgaggatataattttttctaggtatatgtcatcagtcacataatacttgtcatctatatcaataacagagcactttacataaccttgcgaagagttaataatctggtcattttcaaagcgagacaataaagcctcagcacaaaaatcttttttgcaaattaagtaatctcccacacgaagcgcgttgaacttcacatcgtatgggtacttatcgagtgaatcctcgcctgcattaattagatttacctttgtacctttaaatatgtccttataatactcataagactcgcggcttgcaattaaagtctcttcattatacttaaagagcgacatatcaggatgcgtcttaaccacacctttcaatatcttgctctcgtaagatggataagctcttatatcgtattttataagctttggacttagaactttgtagtaagccttgtcaactatagctatcatatacatcacctaagatgattataacacaaaaagcattttacacgcaaaaaaagagccagatattaaatctagctctttaatcaaaatcctattttaaaacgtttctctttatagtaacagatttgcttactgcatcccagaagatgtccttgccatctacaaggcctaaagcccttgcaacgtttgcaattggaagcatagttctgttattcttaattataggtttaacatcacttacaaatgtatttccgtttacaattatattgtttgtatcaacaggtatttgtacgatattttccttgtctacaagataaacagtccttgtattttcatcccatgttaccataaatcctaaagcttcagcaacaaaacgtattggaagcatagttcttgattgatagatgaatggagcgatgtccatcctaacttggcttacaacaccatttactgacttctgcattagattgttatttataaatagtattgcttcaagcttgtcataaactttagcttcttcaattttttcttctactggtttagtttctttttcagtatcattttgttttgtttcgtttctattaggtctatatggtctgtatggtctgtatggtctttcttcttctctatgctctggccaatatggtctgttaggtgttggtgtaggtgtaggtgtaggtggaagtactttagcatcattttttgccttagcttcttctactactttatcaactcctggttgatcaacttgttcatctactttgtctttaaattctttcttctcttggtttgttaagttagaaagtttatctatttcttcttttgctttttctttgtattttgttaaatcatcttttttatttactgttaaggcatttgtatctgctgttaaattgccttttgttaatgtaactttcttaccattgtgattagctactgttaatgctgtatcatttgctggttccgcagtgattccattatctacaaagtctgcaaatgctacgtactttgttaagccttgattatctgttaacgttacaactagtcctgctagtgttaggttatcaccttctttgtagattagttttgttggctgtgtttttactaccatagtttctacatgagctggatcaaatactttttttgctttcttaaagactgcttttgctgttgcgttaccttctcctatgattaatgtggtttttaaagcatttatatctgatacaattgctccttctacttcccatttgtcaaattcatagtctggttttggaactgcttttaggtttacttttgttccttttggtcctttggatggatcagctgttgctgttccgtttccatcatcggttactgttaccgtatattctactattgggatgattttttcttcccattttgcttttaaggtcttgttttcttttacttctgtttcgaagttatattcttctgtgcctaggaaccaacctttgaatatataggtcttgccgcttgcgctatccaggatttctgttgtgtcttttcaaatccgttggtgcttttgcttttccgttttcttttacttttggtcttctggttttgtgccgtaggttgtttcaaagcttactttgtattcgactgttgggatgattttttcttcccattttgcttttaaggtcttgttttcttttacttctgtttcgaagttatattcttctgtgcctaggaaccaacctttgaatatataggtcttgccgcttgcgctatccaggatttctgttgtgtctttttcaaatcccgttggtgcttttgcttttccgttttcttttactttttggtcttctggttttgtgccgtaggttgtttcaaagcttactttgtattcgactgttgggatgattttttcttcccattttgcttttaaggtcttgttttcttttacttctgtttcgaagttatattcttctgtgcctaggaaccaacctttgaatatataggtcttgccgcttgcgctatccaggatttctgttgtgtcttttcaaaatccgttggtgcttttgcttttccgttttcttttactttttggtcttctggttttgtgccgtaggttgtttcaaagcttactgtgtattctgctattgggatgattttttcttcccatttcgcttttaggatcttgtttccttttacttctgtttcgaagttatattcttctgtgcctaggaaccaacctttgaatatataggtcttgccgtttgcgctatccaggatttctgttgtgtctttttcaaatcccgttggtgcttttgcttttccgttttcttttactttttggtcttctggttttgtgccgtaggttgtttcaaagcttactttgtattcgactgttgggatgattttttcttcccattttgcttttaaggtcttgttttcttttacttctgtttcgaagttatattcttctgtgcctaggaaccaacctttgaatatataggtcttgccgcttgcgctatccaggatttctgttgtgtctttttcaaatcccgttggtgcttttgctttttcattttcttttattttttggtcttctggttttgttccataggttgtttcaaagcttactgtgtattctgctattgggatgattttttcttcccatttcgcttttaggatcttgtttccttttacttctgtttcgaagttatattcttctgtgcctaggaaccaacctttgaatatataggtcttgccgcttgcgctatccaggatttctgttgtgtctttttcaaatccttgcggttcttttgctttttcgccttcttttattttttgatctgccggttttgttccataggttgtttcaaagcttactgtgtattcgactgttgggatgattttttcttcccattttgcttttaaggtcttgttttcttttacttctgtttcgaagttatattcttctgtgcctaggaaccaacctttgaatatataggtcttgccgcttgcgctatccaggatttctgttgtgtctttttcaaatcccgttggtgcttttgctttttcattttcttttattttttggtcttctggttttgtgccgtaggttgtttcaaagcttactttgtattcgactgttgggatgattttttcttcccattttgcttttaaggtcttgttttcttttacttctgtttcgaagttatattcttctgtgcctaggaaccaacctttgaatatataggtcttgccgcttgcgctatccaggatttctgttgtgtctttttcaaatcccgttggtgcttttgctttttcattttcttttattttttggtcttctggttttgttccataggttgtttcaaagcttactgtgtattctgctattgggatgattttttcttcccatttcgcttttaggatcttgtttccttttacttctgtttcgaagttatattcttctgtgcctaggaaccaacctttgaatatataggtcttgccgcttgcgctatccaggatttctgttgtgtctttttcaaatccttgcggttcttttgctttttcgccttcttttattttttgatctgccggttttgttccataggttgtttcaaagcttactttgtattcttttggtggtatttttttgaaaattgccttcgctgttacatttccttctcctatggttagggttgtttcaagagattttggatcttgtgctgttgctccttctacttcccatttgtcaaattcatagcccgggtttggatctgcttttatggttacctttgttctctttggccccttggaaggatttgctgttgctgtgccatttccatcgttatttacagttaccgtgtattctttaggtttaactgtcacagttcctaggaaaattttgtagaaatcatcaattttttggaaaaaatgttctgtatttttatcattgtacatatatgaagatgcgggcactttttcaactgtaggaaaacttctatatgaaagtcccatagtcttggaatctgtctcgatctttaaggcaaatttgccgctagttattgtataaggctgtattacttctaatgtttgatatcctttttctgtaaaagtgccgctagccaattctacccatttgtcactgtttatatcttttagtgtatccccttttgttccatcagcaaatgtggtcttttcttcttttagtagttctgggtcttcggttatatagattttatatggagcagacccttctgacttattatagtaggttacatacttgatagtttcaggttcagttgtacctctttcataaacatttatggccttgtttagctttccttttatatcgaatttttgattaaaagtagtacctgcaagtttgcaaggattatatacatttttaagacttgctctttcatctggatccatgggtctaacttctcgtggggtaatgattttagtaaaacttggaactatatctccattgcctaaaaatgattcataggaaatccaatgataccctctagcatcgtcatagcgatcatatggcggagcgggcactgaatttttaactaaaaaggctccttttgctgtttctcctaatttatttttaatttccttatcgtcatcccatcctattaatgcaaccgcatgattatacttcagataatttgaatttttaaaatttctcacatagtgataacgaactccatttttcttaacagaccatttatcaatccatctacctccaagaacatctttgctatacccatcttccgctattaaataggtaccttgtaccgatccattttcatatatacatctctttagattttcaagtgttaagtccaattccaaggtccttgtaactaaaaaatctagtttcttattaaaagcatcacccattatcttaaaggtatctctttcaccttcaggaagtgagattgctcttgatgggtcaaaatctttttgttttctgtcttttggatcatcttcattgattgagtatgctgtgagatttttttctagtacgggtcctgaaagcctagcgcagtaagctagcgcatcttcatcaagcccacccgattgaagatttgtttgatcatcaacattatatgccatatgaccttctgataaatcatagtcttctccatatttaatttttaatagtgattctactactgctaaataagcatgagcccaacaagttcctgtgtaaaactgatcttttcgtggagttatgacatttatgccaaagtgatttaattttatatcaccacttctagaatcatattttttgaatctagagaattcacttgatgatctagttctaatatttcttgttttttcttgaggaaagatatactttggcggtatgtagccataagtaaattcctctttgtgatttagataatactcgtactgaggattaggtatgggaccctctatttccttagctcttataggtgcagttttcattgtgcttctattaactgtcgatgtattttcatttacatttacggctgcagaaacaggcaatataagcgtgtgtacaagaaccattaaagaaagtagtattacccaaaactttcttagcagtttctctctaggaatatacattttattatcactcctttatcaatcattagtatagtcaaacataattttatttggctgtataatatctattgaggatttaactccccaatagatattatacagcctttataaaactaaaaaaggacacctgggtgtccttttttagagatgatctattggatcccctttttatagttgatctatttttcgatcattcttataatagtaacttgctttgtagctgcatcccataagatgtccttgccatctacaaggcctaaagcccttgcaacgtttgcaattggaagcatagttctgttattcttaattataggtttaacatcacttacaaatgtatttccgtttacaattatattgtttgtatcaacaggtatttgtacgatatttttcttgtctacaagataaacagtccttgtatttgcatcccatgttaccataaatcctaaagattcagcaacgaagcgtattggaagcatagttcttgattgatagatgaatggagcgatgtccatcctaacttggcttacaacaccatttactgacttctgcattagattgttatttataaatagtattgcttcaagcttgtcataaactttagcttcttcaattttttcttcttcattatcatctctatcatatctgtcgtctctttcattatattttctacgaggtctacgtctttcgtatgggtatgggtagcttggtgtgtatatctcttcaaatctagcataaataaccatatctctttcgataattgttggattgccatatagataaggtgaccatccagcaaactcatatccatagtaaggtatagctgctggtgcaaaacttgctaaatctgcaaatgttttgcctgctcccattggtacataaacagtatttgcttttgctacagtacctttgttttcattttctgattcaaatgttactacatagtatttgcttggatctgctggctttcctccacctggttgtgttggatctactggtcctactactggtggattttgtggtgttggtgcacctgcttgtttgaagtatgcttttactgtcatatctctagcgattgttgtgtttgcatctaaagctggttcccatttttcaaattcatagccttgtactgctgttgtctttggtgctgttacgtcggctaatgtctttgtttctgtctttaatacatatactgtatttttagcatctactgttccctttgttgtatctgctgattcaaatgttactacatagtatttgcttggatctgctggctttcctccacctggttgtgttggatctactggtcctactactggtggattttgtggtgttggtgcacctgcttgtttgaagtatgcttttactgtcatatctctagcgattgttgtgtttgcatctaaagctggttcccatttttcaaattcatagccttgtactgctgttgtctttggtgctgttacgtcggctaatgtctttgtttctgtctttaatacatatactgtatttttagcatctactgttccctttgttgtatctgctgattcaaatgttactacatagtatttgcttggatctgctggctttcctccacctggttgtgttggatctactggtcctactactggtggattttgtggtgttggtgcacctgcttgtttgaagtatgcttttactgtcatatctctagcgattgttgtgtttgcatctaaagctggttcccatttttcaaattcatagccttgtactgctgttgtctttggtgctgttacgtcggctaatgtctttgtttctgtctttaatacatatactgtatttttagcatctactgttccctttgttgtatctgctgattcaaatgttactacatagtatttgcttggatctgctggctttcctccacctggttgtgttggatctactggtcctactactggtggattttgtggtgttggtgcacctgcttgtttgaagtatgcttttactgtcatatctctagcgattgttgtgtttgcatctaaagctggttcccatttttcaaattcatagccttgtactgctgttgtctttggtgctgttacgtcggctaatgtctttgtttctgtctttaatacatatactgtatttttagcatctactgttccctttgttgtatctgctgattcaaatgttactacatagtatttgcttggatctgctggctttcctccacctggttgtgttggatctactggtcctactactggtggattttgtggtgttggtgcacctgcttgtttgaagtatgcttttactgtcatatctctagcgattgttgtgtttgcatctaaagctggttcccatttttcaaattcatagccttgtactgctgttgtctttggtgctgttacgtcggctaatgtctttgtttctgtctttaatacatatactgtatttttagcatctactgttccctttgttgtatctgctgattcaaatgttactacatagtatttgcttggatctgctggctttcctccacctggttgtgttggatctactggtcctactactggtggattttgtggtgttggtgcacctgcttgtttgaagtatgcttttactgtcatatctctagcgattgttgtgtttgcatctaaagctggttcccatttttcaaattcatagccttgtactgctgttgtctttggtgctgttacgtcggctaatgtctttgtttctgtctttaatacatatactgtatttttagcatctactgttccctttgttgtatctgctgattcaaatgttactacatagtatttgcttggatctgctggctttcctccacctggttgtgttggatctactggtcctactactggtggattttgtggtgttggtgcacctgcttgtttgaagtatgcttttactgtcatatctctagcgattgttgtgtttgcatctaaagctggttcccatttttcaaattcatagccttgtactgctgttgtctttggtgctgttacgtcggctaatgtctttgtttctgtctttaatacatatactgtatttttagcatctactgttccctttgttgtatctgctgattcaaatgttactacatagtatttgcttggatctgctggctttcctccacctggttgtgttggatctactggtcctactactggtggattttgtggtgttggtgcacctgcttgtttgaagtatgcttttactgtcatatctctagcgattgttgtgtttgcatctaaagctggttcccatttttcaaattcatagccttgtactgctgttgtctttggtgctgttacgtcggctaatgtctttgtttctgtctttaatacatatactgtatttttagcatctactgttccctttgttgtatctgctgattcaaatgttactacatagtatttgcttggatctgctggctttcctccacctggttgtgttggatctactggtcctactactggtggattttgtggtgttggtgcacctgcttgtttgaagtatgcttttactgtcatatctctagcgattgttgtgtttgcatctaaagctggttcccatttttcaaattcatagccttgtactgctgttgtctttggtgctgttacgtcggctaatgtctttgtttctgtctttaatacatatactgtatttttagcatctactgttccctttgttgtatctgctgattcaaatgttactacatagtatttgcttggatctgctggctttcctccacctggttgtgttggatctactggtcctactactggtggattttgtggtgttggtgcacctgcttgtttgaagtatgcttttactgtcatatctctagcgattgttgtgtttgcatctaaagctggttcccatttttcaaattcatagccttgtactgctgttgtctttggtgctgttacgtcggctaatgtctttgtttctgtctttaatacatatactgtatttttagcatctactgttccctttgttgtatctgctgattcaaatgttactacatagtatttgcttggatctgctggctttcctccacctggttgtgttggatctactggtcctactactggtggattttgtggtgttggtgcacctgcttgtttgaagtatgcttttactgtcatatctctagcgattgttgtgtttgcatctaaagctggttcccatttttcaaattcatagccttgtactgctgttgtctttggtgctgttacgtcggctaatgtctttgtttctgtctttaatacatatactgtatttttagcatctactgttccctttgttgtatctgctgattcaaatgttactacatagtatttgcttggatctgctggctttcctccacctggttgtgttggatctactggtcctactactggtggattttgtggtgttggtgcacctgcttgtttgaagtatgcttttactgtcatatctctagcgattgttgtgtttgcatctaaagctggttcccatttttcaaattcatagccttgtactgctgttgtctttggtgctgttacgtcggctaatgtctttgtttctgtctttaatacatatactgtatttttagcatctactgttccctttgttgtatctgctgattcaaatgttactacatagtatttgcttggatctgctggctttcctccacctggttgtgttggatctactggtcctactactggtgctacatctttgtagattgctatgaatgtttctgttgctacgtttcctgttgctggtacttctggattccatttgttaaattcttgtgttgtgtctgttggaactgctactattgccgcaatcttttcttttagttctgcgtctttgtatgttgttccatctagtacatctattgcttttacttgaacttttccaatcttaccagctgatgttgcgtcgaattttagtctcacatagcctgctggtacttgactgtctggatcggttacttcgctgaattttggttttcttttatatgttgctgtaaatgtttgtgttgttacttttccactttgaggtacttctggaagccaactcaaaaatgccttagtgggatcattggctattggtttaatcgctaatattcgcatccttaatgctggtgatccgaaatccgcggtactaggtacatttaagaccaccttttgctcgccgttgatggttccttcgcctgcatcaaatgttagatttatcttgtagactgctgtaaatgtttttgttgttacgtttcctgatgttggtactgtttcgctccatttgtcaaattcttgttttgtatcttggtttattgctttttctggaatttcatcttttacagctttgttatcccatgctgttcctgttaatacgtctataactttgtatctgtgtgttccgtctactgtatttccttcgcctgcgtcaaattttactcttgtatatccgtttggaactgctgcgttaggatctgttcctgctttcactagttcttttgctttatatgttgctgtaaatgtctttgcttctactgtacctgctgttggtactgtttcgctccatttgtcaaattcttgttttgtatcttggtttattgctttttctggaatttcatcttttacagctttgttatcccatgctgtttctgctagtacgtctataactttgtatctgtgtgttccgtctactgtattgccttcgcctgcatcaaagattactctttcaatatttcctaatgcagggatttccggatcatttccgatagttaccttttcatctacaaattttacatataattttactggaattgtccatcttttattaaaggagtatttataagaacatttgtaatatccttcgtcttcatattcttcagttatattaaaataatcatactcaatttttagaccgtttagatcttttgctctgcccacgtcaaattttcctggtaacacgctatatttgaatttctttgtttttttatcaacagcaatataatacggattcacttcactaaactgtatccctccgataaaaggtactgctgtttcatttggtgagtttaaagtcgtcatattgttgccttttactattacatttttaagatttgtattagtgtctaaatctatggttgataatttattatcggcacaggctatttcttctagagcagaagcgcctgttacattaagatttgttaagttatttctcctacaacctaatttttttaagtttgttttattgcttacatctaatgatcttagttggttatcactgcactcgagatttgtaagggcagtgttttggcttacatctaatgatgttagttggttacccctgcaatcgagatttgtaagggcgctgttattgcttacgcctaatgatgttagtcggttattatagcagctaagtgtcgtaagcgctttgttttggcttacatctaatgttcctagtgggttacttccgcaagagagatttgtaagagcatagttttggcttacatctaatgaacttagttggttatcatagcaggtaagtttcgcaaggactttgttttggcttacatctaatgatgttagttggttacccctgcaatcgagatctgtaagggcgctgttattgcttacgcctaatgatgttagtcggttattatagcagctaagtgtcgtaagcgctttgttttggcttacatctaatgaacttagttggtttcttgaacatttaagacttgtaagggccatatttttacttacctttaatgagcttagttcgttcagttcgcaaataagtgtcttaagatagatgttttggcttaaatctaatgatgttatttgattgtttgagcaatcaagtatttcaaggtctttaaaacatgcaatcccttcaaggcttgtaatttttcctttactacttgtagactttagataaatatttgttacaccacttgtttcccatttctctaaaatgccattgttattcttatcatattgttttacaaatcccttaaatattttatcaggaaagtttgtaccattaattttaacatcccccgccccagcatgtactatgccgcttccaaatggaaggttggtgaaaaagatgataaaggctagaattaagcctaaaatcctcgtttttttgattttcattaatttcatatcctttctatatatattttttactatccttatatatatttataaagtatcgctatgtgcgtcttgataaacaatcctccttcgtgacaaaattcacatacgactaagcttttttaaaatatatacttaaacattataattaaagtctaataatatactctaataaaatgatatattgcttctattaaattatagaatacttttgtctaattgtcaaggatttttatttaaaaaatttctcttctaatgcagttatatgctcatttataacaatacatatcaaaaaaaaaaaaaagacacctagtgtctctttctgctaatattatttttattaaattaaacacgtatatagattcgtggcaaattaatcttcgtgtgaaacgttttttgtatttaatcgtttaaggcgaagcgatatgcaatcgaaatgattttgatctagatgcttcatcagaaatcgttatgcttttaatatgatttaggcataaaaaaagaagcgtgctttaaacacgcttcaagtttgtggaggcggcaaccagatttgaactggtggtcaaggttttgcagacctgtgccttaccacttggctatgccgccatatggagcggaaaacgagattcgaactcgcgaccctcgccttggcaaggcgatgctctaccactgagccatttccgcacatggtgcccagagccgggatcgaaccagccacacgtagattttcagtctactgctctaccgactgagctatctgggcacactagtcatattactgactagtctatgatactataaattgatttaattgtcaaggcttttttatatatatttaatattttaaaaatattatactgctaaattttttatcatgcctagtgacataagtagaggcaatcctgccatgatgatccatactactatgttaaaggctagtggcaggtatgagaactttgctggcgcttctacgtccaaagtgcagtctacatcttctgttacttcttttgtcttcatttttgaaagtactctatataggacgaaaattatcactatggctatgagtaccatgaaaactccttgtaataagcctatatttaagtctgcttcacctagcgtaatcatcttcatatcgtttactgcgccctcggcaatatccttttggaatatgctaagtatgactgagcaagtattgaatgtgaagtggccaagcattgacgagtaaagtgaatttgttttttcgtttaaaactgaaaatacatagcctaatatgaatggtgcaactatgttgaatggattaacatgcattagcataaatagtagtgctgtgtaaaagtatgtgaatttccttccctttgctctcttggctggtgcgcttagtaggcctcttacgaagaactcttcacagatggctggaagcacacctataatcaaaatgctgtatatacttgatagtccgcctgatttgacattgatttgaggcactcttacctcgccaaataggctatagaacttgattaaaagtgtcgagcttataccaactagtggataaactaaaagtgttagaagaactgatacaagcgcttcttttccagtgattttatttagtctaaagtatcttttgaaattaactttcttttgctttacataaacaagaactggtactaacagtatcaatacctctccagcgaatagtcctaggtaaaggtctagctgctgaagcattgagcctatgaagatatatgcaagaaaaagtattgtatatagccatgaggctttgttgatatctatccctgtcctgtttactttgttctctctatacattatgcacctactttaactcttctaatctctttaatgtcttatctaatagctccttgtagttctcaagcttttctttctctttatcaacaacatcctttggtgccttgctaacgaatttttcatttgaaagttttttctcaagtctttcaacttcaaaatctagcttttctttttcttccataagtctttgtttttctttttcaaaatctataagctcgtttaatgggaagaatagttctgcgtttgtcatcattatcgatgtgaaatctttgtttatggcatccttattgtcaagtatagttatcttatctatatgttcaagatctttaaagtaattagcactgtcactatatagtcttcctgcttcttcatcgtttggatatacaagcatagagaaatgttttgatggctcgatattcatatctgtcttcatctttctaattgctttgatagcatttttgattagttctaaatcattaagctctgcatcgtagtacttaatatcctttggccaattgctgatgattaatggagtctttctatttggtaggtagctccagatctcttcagtgataaatggcatgaatggatgaagtatctttaaaatattttctaagatgtataaaataacattttgcgcatttatattgtctctatcgtataatcttgtcttaacaagttctatataccagtcgcagaagtcctcccatataaagtcttgtaccttagcagctgctatacctatctcgtacttgtcaaggttattgttgatctcatctacaacagtttttagtcttgagataatccatttgtcttctctttctaatttatcgtagtcaaggctatagtcatctctatcatcaaggttcataagaacaaatcttgatgcgttccataatttattagcaaaatttctttgtggttcaacttttttaacgctatatttaatgtcattaccaggagcgttattagtaattaatgagtatcttaacgcatctgcgccatattcactgataacttgtagtggatcaataccattgccaagtgacttactcatctttctaccttgtacgtctctgataagtccagtcaataagacgtctttaaatggtacctcaccagtttgttctaatgatgagaatatcattctactaacccagaagaatattatgtcgtagcctgttactagtaaatctgtcgggaagaatctcttgtaatcttctgaatctacatccggccaaccaagtgttgagaatggccataaagctgatgagaaccatgtgtcaagtgtatcttcatcttgtcttaaatgttctgaaccgcacttgtcgcacttttctggtttttccttgctaacaatgtattcgccacaatcatcacaatagtaaacagggattctgtgtccccaccatagttgacgggaaatacaccagtctctgatattttctagccagttttcatatatcttgccgaacctttcagggatgatgtttactttattttctctataagcttcaagagctctcttagccatctcttccatcttaacaaaccattgaagtgaagctagtggctcgatgatagtattacatctttcgcagtgaccaacagagttttcatgtttttctacctttactaataggccttgttcatcaaggtctttaatgattctctctcttgcttcgtatctatctagtcccttgtaagcgtaagcattttcattcatcttagcatcttcatctataacgattagttgaccaagattgtgtctagcacctacttcgaagtcgttagggtcatgtgatggtgtaatcttaacacagccagtaccaaatgatgagtcaacatactcatcagcaataacaggtatttgtctatctgttaatggtaggtcaagcgttttgccaactatctcagtgtatctttcatcttctggattaacagcaacagctaagtcaccaagaagtgtctcaggcctagttgttgctatagttacatagccagtcttatctgagtatggatacttaatgtaccacatcttaccctcttgtggctcatgaacaacttctgtatcggatatagctgtgtgacagtgtggacaccagttaactatcctcatgcctctataaatatagtcttttttgtataatctttcaaaaacttcataaacagcctttgttaagtgctcatcaagtgtaaagctatcgcgtgaccaatcacatgacgagcctaattttttaagctgctctttgatgttgccgccgtacttgtgagtccagtcccaagcttcctccaaaaactcttctcttgtaaggtcgctcttcttaatgccttcttttttaagtttttctacaacctttgcttctgtagaaattgacgcatggtcagttccaggtagccaaagtgcgttgtaaccttgcattctcttgtatcttattacaatatcttgtaaagttccgttaagtgcgtggccaaggtgaagcttacctgttacgtttggtggcggcataacgatggtaaaggactctttactatcatcagtacttggcttgaagtactcattgtccatccaaaatttataaatattgtcttcaaattctgctggattatatgatttttctaaatttttcatagttcctcctagtataaagtttatattatacctccataattacaggaagtatcataggatttctcttcatagtttgatatatatacttcttcaaactgtctctaattgcatttttgatgcttgaccagtctgatatacgtcttttttgacaatcttctatagcaagaacgaccttgttctttgcttcctccatcagatcgtctgcttctctaacatagacaaagcctcttgatatgatgtctggtccagctatagttgagccgtcttccttacttagtgttaacacaactataattaaaccgtcttcagataagtgttttctatctcttaagacgatgttaccaacatcaccaacaccaaggccatcaactaagacattgcctgaagtaacttcatcgactatctcagcctttctcttgtcaagttcaagcacctctccattcttcattataaagatgttcttagggttcatgcccatgctctctgcaagtgaagcatgtatcttaagatgtctttgttcgccatgaactggaataaaatatcttggcttaataagtgaatgtattagcttaagctcttcttgacaagcgtgtcctgaaacatgtatctcaccaagtgattcgtatataacttttgcatcaagctctataagcttgttaattacctttgatattgcgttttcatttcctggtataggatgcgctgaaagtataattaagtcatttggtgtgagctgaatttttctatgctcattataagcaatccttgtaagtgcactcataggctcaccttgagaacctgttgttataatacaaagttctctgtcgtcatacttattcatcttatttatgtcaataatacttgattctttaactcttaagtagcctaaatccttagcaacattgacgttatttatcatggacctgcctgataaaacaatcttccttccgtgcttttcagccgcttctataatctgttgaattctttgtatatttgatgcaaatgttgcaactataattctattctcagtatattcgtggaagatagttctaaatgtctcaccaactactctttcactaagagtgtagccctttctttcaacgttagtactttctgctaataagcaaagtactcctttgtcgccaagctcagcaaatctgtttaagtcattaactccacccatgattggtgtgaagtcaatcttaaagtctcctgtatgaactatgactcctgcaggcgtatggaaggctaaagctgctgaatcaggtatactgtgacattgtctaatgaattcaacaacaattttacctaatcttaccttatcgttaaagttcacaacgtgcatctttggctttaggttgtgctcctttaatttattctccaatagtcccaaagtaagtcttgtaccataaataggcacattaatcttctttaaaacatatggtatagctcctatatggtcctcatgaccgtgtgttaaaactataccttttattctctctttatttttttctaagtatgtgatatcaggaattacgatatccacacccagcatctcgtcctctggaaatgtcataccgcaatcacatataactatatcttcatcacattcaataagagtaatattctttccgatctcattaagaccacccagcgggatgattcttagtttgttactctttaacatcttctcctccttttattaatttgtcttatctaattcttcataggcttcttgagcttccttaagctcctcatcgtccaagccaatgaatactaaattaccttctttatcttcttgatacttcataatatagtagtcatcatccgcttcatcttcatacatgactatatacttatctgtatcaatctcaaatgttgcttccacgataaattctacttctttgccattatcatcaagaagcttaattttattgtccatcttttcccctttgcatatccaaatatgttcttaatatataatttgctgctatagagtctacaaacttctttctgttttctctacgcacattcgtatcaattaatactcttgtagcgctaactgttgttagtctctcatcaacatagacaagttcaatgtcttctatgtttttcttcataaaatccatgtacttctttactttttttgcttgtggtcctaggcttccatccatgttcttaggaagtcctactaccaaagtcttaaccttgtactgatcaataacagcttttaatttgtccctatcttctaattttgatgttctaaagatagtatttaatgttgtgacaatgatttgcatctcatccgaaactgcaagtcccactgtcttatcgccaatgtctaaagcaagtattctctccataatttcacctaaaaataataggggttataagcccctattaatcattttaaataatcaactagtattgcctctaaaagctcatctctttccatttgtatgatcatcgatcttgcatcattgtagctagttatatatgtcggatcgcctgatagaatgtagccaatgatttggttgataggattgtatccttttgcttctagggcttcgcaaaccttattcaatatttcttttggtgattgaattgtttccttttgaacattaaatttcattgtttcatcaaatttgttatccactactatcacctctaactatagtataacacaaaagacctaagtcttcaataaatatttatcttacagcttaagctaagatctcttttaatttttcttctgccttagcctcaaattctttaagcttatcagagttaccgccacctgcttgtgccatgtcgtctcttccgccaccctttgcatcaagaagtggtgcaatgttcttcattaagatatttgctgtaactaccttacttacaacatccttagtaagtgttatgataaacgaagttttgcctccaatatctgcagctaccattactatacctgacttaactttatctttaagcttatcgcctgcttgtcttaattcattcatattgtccgcatctattacactgattatataattaatgccattaagatttttaacttcactatctaagttcttaagctcagcactttgtattttgttctttaactctttaatttctctctctctatctttaagttcattaatagtttgttctgctttgacaagaaggtcttccttctttaccttaaatgcatcacttaacttaacaagctcatcttcattttcatttaagtacttataagtgtttcttccagtcaatgcttcaattcttctaacgcctgcagctatacctgtttcttgaactatcttaaataagcctacttctgaagtgttcttaacgtgagtaccgccgcatagctccactgagaagtctcctacttgtacaactcttactaagtctccgtacttatcttcaaataagcctgttgctcccatcttcttagactcatctaagctaactactgatgtctcaacatctatcgcatcaaatatgctttcattaacaatattttcaacttgtttaatttcatcagctgtcattgcttggaagtgtgtaaagtcgaatctaagtcttgtaggactaactaatgagcctgcttgattaacatgtgagcctaaaaccatcttcaatgctttgtgtagtaagtgagttgcagtatggttcttgcgagtatcttgtcttaacttgtagtcgattacagcatctagcttatcacctatttttaactcgccctcttctacttcaacttcgtgaagcacaagtccagttttagtcttctttgtgtctattactctaagacttactttgtcattcttaagcgtaccaacgtcaccaacttgtccgcctgattgtccatagaatggtgtcttatcaagtattactatcgctttatcgccttttttaatagactctcttaagttcttattaacaactatagcatttactttagcatcttcattctcattatattcgtagcctataaactcattcttgtaattatcgtagatgtctaagttaaggtcgctgttccagccagagtcttcaacatgagcattttcctttgccctaagcttttgctcttgcatgttcttattaaactcttcttcatctacgctaattttattttcttcaagaatttcctttgttatatcaaatgggaagccatatgtgtcatataaaatgaaggctttttcgccagaaagactagtcttaccttcttttttaagctcatcaatatatgagtttagaatgttcataccttggttaatagtctcttcaaattttgcttcttcagcgcttataatcttgattatagtgtctctattttgtgcaagttcagtgtagtgatatgaccagccatctataactttttgaacaagatcagctaagaatggtctatctataccaagaagcttgccatgtctaatcgcacgtctgattatctttctaagtacataacctcttgactcgtttgaaggtatgatgccgtctgagaccataaaagtcatgcttctaacgtggtcagcgattattcttatagatatgtcatctttttcattctctttatattttttattagatagtctttcaatctcttcaataatgcttctgatttcctttatatcgaagatggagtgtactccttgcataacgcacgccattctttcaaggcccataccagtatcaatgttagggtgacttaatggctcgtactcatcctttgattttctatcaaattgtgtaaatactaagttccaaacttcgataagtctttcattttcaacaccatcatcaaagtcttttaatgtgccgtatttttctcctctatcatagaaaatctcagtacatggacccgatggacctgtctcaagttcccagaagttgtcttctttgccaagtcttactaatctctttggatcttgtccctctttaacccatagatcaaaagcttcatcatcgtccttgaagactgtaatccataacttttctggctctatttcaaatttttctgtaagtaaagtccatgcccaatgtattgcttcttttttgaaatagtctccaaaagaaaagtttccaagcatttcaaagaaagttccgtgtctatcagtcttaccaacgttgtcaatgtcgcctgttcttatacacttttgacaagttgtcatcctcttagacggtgcacttaattcgcctgtaaagaattttttaagtggtgccataccagcacctattaataataatgatttatcatccttaggtattagtgaaaaacttttttcagctaagtgaccttggtttttaaagaaatttaaatattcatctcttatttggtctaaagataaatgtttcatatatacacctctaattatttttatttacaatatactcattatacaccgttttgataacaagtgcaataggcacagctagtatcatgcctaagaatccaaatagtgacgcgcctaatactaacaagaacaaaacaactattggatggaagccagtttcgttcgaaagtatcttcggtcccactatattattttctatccattgaataaatagatataaaaccaatatccaaagtgctttgattggactttcaataaaggcaaaaacaaaggctggcactaagcccataagcggtccaacgtatggaacgatgtctgcaaagcaagttatcatacctatgatgaaagaaaactcaacgcctaaaatcgcaagcattataaatgttgcaaaaccgacgaaaattgccatctttatcttgcctatgatgtacttagtcatgtcatcatgaatcttggagaatagtctaagcagaccttccttttttgattctggaagcattgatctaaatttctcttttatatcgtctttgtccttcaagaaataaaatgcaaagattggaatcaaaacaacagaaaaaacaaagctcataacgttttttgccgatgcaagtataagattagcagcatttgctttttgattattatagatttttgataaattgtcaactattagcttattatctaaatttaatcccttaaaaacttcgtattgaccaataaattcattaattgattcaagcgtttgcttgtagtactgagggaatttaattataagattcttaatatctgagatagtctttggaaagactgtaaaacctaagattataaatataagagcaactattagaaaaacagtcaaaatcgcaagagtctctgaaatcttaagcctcttacgcacactctttaccatagggtttaaaaagtacgcgagcatagccgatactagtatggacaagcttagtgtccttaccataagaaaactcttgtatatgtatataaaaaataagactgctaatactgctataagaaattttatgattacagtctttgagaatataagtttttcgccattttccacatgtctgttgcctatatttataagataatatatgcctaaagccaaaattattatttgcaaaccaaggaggataccgtttaaagctcctccttgatttatcaaattaacaatatttttattaatattacttgttaataaattcatctttttaatctaaactcatgtgttcgtgatcgtgtagatcatcctttggtggttcgtagttttcaagaccttttaccttatgtccagatttttgttgatagtcataaagtgcagcctttatagcttcctcagcaagtactgagcagtgcatcttaattggtggtaggccgtctaagttttctgctacttccttgtttgataagtttattgcatcatttattgatttacccttaatcagctcagttgccattgatgatgacgcgatagcagtgccgcagccataagttttaaacttaacatcagtaattatgtcattttcatctattttaagatacattctcatgatgtcgccgcattttgcgttaccaacttcgccaacaccacttggattttccatctctcctacatttcttggatgcataaagtgatccataactttttcagaatataacattatatttctcctttcgcaatcgcctcatcatatagaggtgacatttgtcttaatctttctataatctttacaagactatctacaacatagtctacatcttcttctgtaatttcttctgagaatgttagtctcaaagatccatgtgcaatctcatgtggaagtcctattgcaagaagtacgtgtgatggatcaagtgaacctgatgcgcacgcagaacctgttgatccggctatgcccatagcatcaagcattagtaaaagagcttcgccttctacatacttaaagcagaatgatgcattaccaggtaatcttctgtttacatctttacttccgttatatagtgtatatggaattctctccataacttctttaactaatctgtctcttctgtctcttaaatgtttgttatgtttatcaaagttatcatataataattctatagctttagcaagaccaatgatttcagcagtattttcagttcctgctcttctctttctttcttgtcctccgccgtgaattaagttgtctatgtttacgccattcttaatataaagtgctcctataccttttggtccaaataatttatgaccagataagctcaacatatcaactcctaagtcttttacgtctatcctaacattaccaacagcttgaacagcgtcagtgtggaatagtacgttgtgcttatgagctatagcagccgcttctttgattggctcaatagttcctatctcattattagcaaacattatgcttaccaatatagtatcctctctgatagcattctcaagctctttaaggtcgataaagccttcctcatcaacacttagatacgttatatcaaaaccttccttttcaaggaacttacatgtgttaagtatagctggatgctcaatcttagttgttattatgtgccttcccttgtccatatacttgaaagcacaaccctttaaagcccagttgtctgattctgaaccacagcttgtaaaatatatttcatctgccttacaattaaagtaagaagcaatcttctcccttgctgctacaacatccttcttaacatctgtagctaatgagtatagagatgaagcattataatacttttcaccataataaggtagcatagcatctataacttcttttctaactctagttgttgcagcattatccaaataaataaagcccatcataatccccctttatataaaatcataccaaaacaaatatccctattttattttaatatgtatgtatgtgataataaaattatctatgtaatatgattggcctgtaatatgtataatatatgtatttaattatacatcgattataatatatcccattttgtcaagaaataagcataattttaaattttatgatattgataagatagactaaacattttaacctatactcatctacgcatactctttatacccatttatacattattcattcatatcgatttattatacctgagcttactttatacatatacttaagcttagctctcgcatttgatactcttttgattatatagagagctcctatagtgagcttgtcattattgagtctcttacataaaaaaacagagtgatctctcactctgctttgtataatttgtataatactaataaactattttaatttttctcttagcttttcaagcatgtctttactcattgtgtcaagatcatactcaggcttccagccccattctgctcttgcacagctgtcatctaatgagtttggccatgagtctgcaattgcttgtctaactgggtcaacattgtatgtcatagtaaaatctggcatgaatttttgtattgacttcttaatttgttctggctcaaagctcattgcagcgatgttgaatgcatttctgtgtattagttttgatccgtcagcttctataagttgaattactgcgttcaaagcatctggcatatacatcatgtccatgtatgtaccttctttgatgaagcattcgtaagaaccttttttaattgcatcataataaatatcaacagcgtagtcagttgttcctccgcctggaagtgtgtcgtatgatatgattccagggaatctgactcctcttgtgtcaacgccaaatcttaagtggtagtagtcgcataggttttcgccagcaaccttagttactccgtacatagatgttggtctttgtaatgttgtttgaggtgtcttatcctttggtgtatctggtccaaagcatgcaattgagcttggagtaaatacttggcactcattttctctagcaacttcaagaacgttgaataaaccgcccatgtttatttgccagcacttttgaggtaccttttcaccaactgctgatagtagtgctgctaagtgaactatagtgttaactttatatttgtcagctacttctttaattctcttaccatcagtaacgtcaattaattcaaatggacctgcgtctatgatgtcttttctttcaggtagttctcttacatctgatacaacaacattgctgtcgccgtattcttttctaaatcttttaacaagttcagaacctatttgtcctaaagctccagtaactaatacttttctcatttcttcctcctatttgtatgcaattgcttctatttcaataagcccatcctttggtagagtgcttacctctacacaagatcttgcaggtttatgttttgagaagtatttttcgtatacgccattaacttttgaaaaatctttcatattctttacgaatatagttgtcttaactacgtcttctaatgtgaagccagcttcgtttagaattgcttctacattcttaattgattgttcagtagctttttcaatatcgtcagatattaatactcctgtttcaggatcgataggtagttggcctgatgtgaaacaaaatctttcaaaagctatcgcttgtgaatatggtcctacagcacctggtgcttttttagtgtctacagtatttagactcatagttattcctcactttctgtttctaaattttgccataatctttctagattatagtattctctctcatcgtttaaaaatatgtgaacgattacgtcttcataatccataatgatccatttgctagttgccttgccttcaacgcgtcttggtaaaataccttgtacagcaagtttttcatctacctcgtccatgattgactcggcgtgtgatttattattggctgaacagattacaaaataatcagcaatagaacttttatctcctataaacaaagtatcaatatcaaaacctttctttgcttctattgcattttgtataatttctaacttttctttagtttccaaaataaattactctcctttcaattccaataataaagaatttcttgtctttaatgattgtggatgtacatataagccttcttctagtaaatagcataggttgcagttaacggcttcatatgctgcctttgtaagcccttcatacttaaactctcttaacttttcagccatagagtaagttcttaatggctctgcaaagtctgcataaaacacaatcttctctaaatcactcatgttttctcttccaagtgcgtgattctttattgctaaaagcacttcttcatcctctactccatactcatatctagctatatagtatcctagcaaagcatgcaaaacttttatggtgtgctttaagtcaccatcaattattatatcaaattcttttgctttttgcaatatcttatcagtatctttatattttgcgcagtcgtgcaaaagtcccgcgacccttgccttctcttcgtctacgccatagtattttgcaagctctactgaaaaattcataacagataaagagtgctcataccttgactgttttacttcgctcttaagtttttctttaaacttttctatatcatacatatagtttctcttcctttataaacttttccacttcatcacttactagatacttaatcgatttgccgttctctatcatctcgcgtatcatacttgatgatatctcaagccttttattgtttaaaacttttatgtgggctccatacttttctttgtattcattgatcttcatttcaatagccttgtcttcatcatctcttcttagtactagtattttatactttttaagtatctcatctgccttgtaccaccaatcaagattcataagactatccgagcctataagtatagtgatgtcatcatcactaagctttgaaatcttttcaagcatgaggtaaagcttaccttctaagtcatatctcttttctatgcttgagtaggcaaatttatcattatcctttatcgccatctttaacattttaagtcttatatcaaagtcaagtgtatccttataatatggattcatagtcggaataaagactaccttatcatagccctcttcgtttatacattgctcagctaagattaaatgaccattgtgtatgggattaaaggtgccaccaaaaataagcactttatttttcatcttgcaaaagtcttggtctctttaaagactctctatatataacaaatatagaaccaatttgctgaacaaattcgcagtttagctcttccataagaaaggcttgtgcttcttttacatcttctgatgaattatttaaaactctaatcttaacgatctcattcttttctagataatcatcgatttgatttataaattcagctgaaattccttccttacctatttggaatgtagcttttaaattttgtgcgattgattttaactttgctctttcttttcctgtcataatatcacctatttataataatcaaactcaaatccgcatacatcaactgtgtctgagtcttctaatcctaactctctaagttcatccatgataccttcattctcaaggaatctttggaaatatcttagcgaatctaaattatccacatagacaccttctaaaacattttcaacctttgttccctctacaaagtatataccattggacttatatacatgtacaggtacttcgttatcttccttaatgtagactgtatcatcaaatgtttcgttaacatttttaggcatgtcttttatgatgtcatatagtttatacttaagcagctctacaccttcaagtgttgcgctacttgttataacgctatcgtagcccatctctttaaaatcgttttgaagcttttctaaatcttctttatcataaactaaatcagccttatttaatacgactaattgcttcttatctcttaatttctcattataagaaaataattcttcatttatctttttaaaatcttcaatagggtcttgtctttctgatcttgatgcatcaacgacatgagcaagcacattagttctttctatatgctttaagaaattatgtccaagtccaagtccttcatgtgcgccctctataagtcctggtatgtcagccacaacaaagctgttattatcctttgttgttactactcctaggttcggttcaagtgttgtgaagtgatagtttgcaatctttggtttagctctagatataaccgatagtaatgaagacttaccaacgtttggatatcctataaagccaacgtccgctataagctttaactcaagtattacctttatctcttcaccttttttaccaggctctgcaaatgttggtgcctgtcttacagagtttttgaacttagcattgcctctgccgccacggcctcccttagcaatgatgcattcgtctccatcattctttaagtctataataagccctttcgaattatactccttaacaagtgtaccaacaggaactgtaagaatcaaatcttcaccatctttaccgtattgcaatttgttcttgccgttctcgccattatcagccttgaatattctcttatgtttaaaatctataagcgttctcatatttgagtcagccctcaatatgatggatgctcccttgcctccatctcctccgtaaggtcctcctgcaggttcaaacttttctcttctccaaccaaccatgccgtctccgcctttaccggcttttagttctaatactaccatgtctaacacattatcaccaccttaaaaaaaggaaccgtgtaccggttccttcaaactatgctaaaacttcttttggatatacacttacttgttttcttttcttgtcttttctttcgaatttaacaacaccatcgatcatagcaaaaagtgtatcatcttttcctcttccgacattattaccgggatgaatctttgttcctctttgtcttacaagtatattacctgatagaacgaattggccatctccacgctttgttccaagcattttaggcttactgtctctaccgttttttgaagaaccaagtccctttttagaggagaataattgtaaattaatttttaacatttttttacctccttcacatataaacaaactctatctgagtattccttatatatttttaacgcttagtaataaagacctaagtagtatttgacttatgtagtccttgtcaggattatctgtcttatacttaaattttaatttaacttcgtctttatcctcatcttcataaatttccacgaagtattcttcgttttcatttaatcctgctatttcttctaaagaattgactgttgatattgaaagtgctgaaagacttgcacaaactatgccatcttcatgggcgtaattcgcatgtccatcgaattcaaactctaatatcttgccatccttttcgaaaaaagttacctttgtcataactaagcttcgatcttagttacttctaatcttgtaaatggttgtctgtgaccttttttctttctttcgttctttttaggtttatatttgaatacaataatctttttagatttaccttgtttcaaaactttgcaagtaaccttagcaccttctacgtaaggtttacctactttattatccccatcattagagacgaaaagtacattctctaagctaatttcgtcaccttcgttagcttctaacttttctacgtggattacatcgttttctttaaccatgtattgttttccacctgtttctactattgcgtacaagtctatttacctcctctaacttagtctcgccatcattggtgataaacttaataccaattctgagcggtttacctatctattatatcagaaacgatataaatgtcaagccttttattaaatattattaaatattttaactttttcttatctacaacttcttcgaagccacaattaggacaagtgattatgttttctttgctctttctctttatggtcctatacttgccacacttcggacatggctttgagtacacttcatcaaaagtagcaaagtcacattttggatagttagagcagccgtagaatatccttccactctttgacttcttcttgattatatcatgtccacacttagggcatattgctccagtcttctcaactattgcttcagtgtatttacattcagggaaacctgaacatccaaggaacttaccatacttagacctcttaataagcataggttttccgcatagcttgcacttaatatctgttacttcatccttaagctcatactcttttgcttccttctcagccttgtctacatccttaataaagtctttgtagaagctagctataacatctttccaatcaagtttaccaaatgagatgtcatcaagtttgctttcaagataagcagtgaactttgcatcgactatagacttaaagttttcttctaaaagttttattactgatatgccaagctctgttggtataaacatcttcttttctatctctatatagtttctattaagcagtgttgatatagttggtgagtaagtacttggcctaccaatgcctagctcttcaagtgtttttataagtgttgcctctgtataataactcttaggctgtgtgaatttcttctcaccttcaagcttatctaagtccaccttatccttctgtttaagctttatttcctttttctcatcaaacttttcatacgaagacacctttaagaagccatcaaagtttaagctcttatagttcgatctaaatatatatttacctgaagcaaaatctatggttaaagtatcgaacttagcacttgtcatttgcgtcatcaaaaatctttgccatataagtctataaagctttagttcatcttgtgataagtactttgatatttggctaggtaatatatttatattaaccggtcttattgcctcgtgagcatcttgaacgttcttagatttcttatgtgcataattatttttcttgtgatactctttgccatatttattaagtatatattcttgagcagacttacacgcttcatctgacaatcttgttgagtcggttctcatgtaagttataagaccagtttgtgagccttttccaatgttaataccttcatacaagctctgtgccagcttcatagtcttagaagatgaaaagtttaatatccttgaggcatcctgttgtagggtacttgttgtatacggtgggcttggcatcctatttgatactgatctttttatgctatcgcatatgtggtcagcggcctttatctcctttgctatggcattcttttccttaatattgtgtatatcgactttgcttacattgcctttagcatcgatagttcctacgaactttgcctcatactcttccttgtcatgtttatatagagcctttaagttccaatattcttcaggaacaaaggcgtctatctctctttttctatcaacaataagcttaagcgcactcgactgcactctacctgctgataagccagattttattttcttccatagtatcgggcttatcttataaccaacgattctatcaagaactcttcttgcttgctgagcatcaactaagtccatgttaatcttacgcggctcttttatagcgtttgtaacagcattttttgtaatttcgtgaaactcaactctatctaagtcctttgtatcgatacctaaaatatatgccaagtgatagctaatagcctccccctctctatcggggtcggttgcaagatatactctttcagcttctttagaaagttttttaagctcgttgattacaggtcctttgcctcttatattaatatattctggttcaaaattattttctacatcaattgcaaacctactctttggtaggtctcttaagtgtcccttcgatgcaactatcttatatgtctttggtaaaaacttcgaaatagttttcgccttcgtcggggactcaactataattaaatccatctttcatcaccttctgtttgcatagtatgttctttgtccttgactagtaattactcccttaagctcaagtatagttagtagagccgacaaagaggcgctatctagtcctgcttttgcgagtattatctcataatttacatcgccatttttaattatatcataaacttttctctcatcatcacttaaatctaaatcttcttcttttgtagctactgacctatcaactaaactgcttgtttcgataaggtcttcacagtttgtatatatgcctgctccatctctaataagtgtgttacagccttcactattagcggagaaaatatttcctggcactgcgtacacatcacggccttgttcaagagcgagccttgcagtaataagcgagccacttctcttttgagcttcaacaactataactagctttgaaagtccactaatgattctattccttaccggaaaattatatctaagcggctgctctcctataggaaactcagatacaacagctccatgttcagcaatttcggcatacagtctttcattgcgtcttggatacaccccgtcaatgccgttgccaataacggctatggttctgtttgcgttatcaagtgctgttgtatgtgctatagcatctatacctaatgcaagaccagatataatacatatcttcttcatagataagtctcttgctatctctttgcatgcaagctgaccatagctagtcgactttctcgctccaactatggctaccgaattttcatcttcatctagtatctcgcctttaataaataataaatatggcggatcatctataaaaagaagtctactaggaaactccttatcaagaaaagttatgaagtgagctcctagcttttctaatttctcttttattctatatactatagcttccttgtcgtcttttgtgattttatctattattgcgtctgtaaatatatttagcctctttaatgacgctctatccatgctcataatatcatttaagtcaatatttaagtcaaaaaggctatatacagcagctctttcagcatatatgctgtttaagtacaaaagtatatctctttgttccatcttatctccaatacttcttatctagagttctatattgaattgcttctaatacatgcttttctaatactaagtcgctatcagcaaggtcggctatggttctagcaagctttagtatcttgttgtagcttctagcactgaaattgaactttttgaacgcaaattccataatctcttgagccttttcatcaagtttgatgtactttttaatcattttattcgtaagctcagagttagaaatgattccttcatttttatatctttcaagctgtctttttctagctctattgaccctctcgcgaatagtttctgaagactcgcactcagtcttagagcttaattcatcatacttaacaggttttacttctatgtggatgtcaattctgtcaagtagtggacttgaaattttgcctaagtatctgtcaatttgactttgtgtacatgtgcactgatgagtttcatcaccatagtaaccgcatgggcatggattcatcgatgcaacaaacataaactttgatggatacttaaatgttgcatttacacgggatacagtaacctctccgtcttcaattggctgccttaaaacttccaatacttttctaggaaactctggtaattcatcaagaaacaagacaccgtgatgtgcaagcgaaacttcgcctggctttggtattcttcctccgcctatcaaggcaacatctgacgatgtatggtgaggcgacctaaatggtcttctctttacaagaccctcatcttttaataaacctgatatactgtagatcttcgtaatctctatggcttcttcaaaagttaaatcaggaagtattgtagcaagtctccttgctgccatggtcttacctgagcctggaggtcctataatgagcatattatgtcctcctgctgcagctatctccatcgctcttttaagaccttcttgccccttcatatctgaaaaatcaacactatcatcaacagcgtttataatctcttcttcatcatttttatatggctctatctcaagttgaccgttgagataatcaacaacttctcttaagttcttaacaggaattatctcaatgtcttcaactatggcgcactcttttttgttagcatcaggaactatacacttcttaacgtgaagatcgcgcatcgatataagcatcggaagagcaccttgcaccgagtttactgttccatcaagtgcaagctcacctataataaccatatcatctgtgtcttgattgtcaatatcgccatttgcaagtaagatgccaactgctatagcaaggtccatctgagaaccttccttcttttcatttgcaggtgctaaattgattgttatccttttgattggaaactcaatatccgagtttttaaccgctgttctaactctttccttagactcttttatcgcagtatcagcaagtccaactatgttaaattgtggtaggccacttgataagtcgctctcaacattaattatctttgcgttcaaaccttgcaaaacacaagtatttactttagaatacatcttcaatctcctatccaaaatgcatttttaatatgcttaatcttgttcgtagaaaaatcaacttcaacaacatcaaatcttggctgatagttcaagttttgatgctcgtataagtagtactcagccgtcttgattatcttcttttgcttagactttgttacagcctccatgggccttccgtagtccatcttgtttctagccttaacttcaacaaagatcaaatacttatcatccctagcaatgatgtcaatctcgccatctcttacttgatagttttgatccagtataaagtagccttcattctttaggtagtctttagcttcttcttcgccaaaccttcccttttttctgttgtcttttctattaaaattattttgcatcgctattacctaaaagctttcttaaaaaagtttttctatgtagcggcgtagctccatactttagtattgcctccctatgctttttagtgccatagcccttattattctcaaggtcatactctggatacttactagctaaataacttatctcagcgtctcttaaaaccttcgctacaatacttgccgcagctatagtaaacacagtagcatcgccgtgaacaatacttctttggtctatatctacgttaattttttcagcgtcaattaaaattatgtcaggcttaagcttattattaatatcgtcatgaaagtcttctaccgccctttgcatagctaagtgagttgcctctttgatgttaatctcatcaatttcctcaggacttgccttgccaatccctatgccgatggcgtttttcacaagctctttaaaaattttttctctcttcttttgactgagcttcttcgaatcgtttacctcttccataaagaagtccttatcaaaagctatagcacaggcaagtacatcgccaaagaagggtcctctaccaacttcgtctataccaactataattttatgaccttcgtcaaagagtttatcttcataatccttattcatctagaggctcctcaagtgaaatcctgcctaaaagaccattcctaaactcatcaactaatatatttatagctttgtacacatcaagttcattgcccttaagtataaagcctctgttctttgctatctcttcaagaatttcaagctctgtagcgtcctcgttgaccttgtatctcttattaagtgcgccgctataattattcttaagaaatttgattagtgctagggcaatatcatccttgttaagtatctcatctttgatggaaccaatgaatgctaggtgcatacctatatcttggttttcaaactttggccataaaacaccgggtgtatcaagtagcataaagtcattgtcaactttaatccattggttcttcttagttacacctggtttgttgcctgtcttaaggctctttttattgttcattaagttaataaaagtagacttgccaacatttggtatgccgacaaccatggccttgataggtccgaagtgctctctttgtttgtgctctttgtgatacttgtcgacctctttgcgcgataagtcgataattttcttcacgtttgatttgtctttcgcgttgaactctatacacttcgcatccttgtaatgagctatccacttcttattaactttatcatccgccaagtcagctttgtttagtaatactagctttgctttgttctcagttatgtcttttataattgggttcgtgctcgacatgggtgctcttgcatctattagctcaataactatatcaactagcttagacatctctattaaagactctctagtcttcttcatatgtccagggtaccaatttatgttcatagcatacaccttcctaactatcttctatattatcacaaaaggtcttcaatgtaaatgactaatgcaaagaaaaaagacactctcataacagaatgtctttaccttaattaaaatgattgtttttctctaaccttagcagctttacctactctgtttcttaagtagtatagcttagatcttctaactctaccttttcttacaagaacgatcttatcgattcttggagagtgtagtaagaatgttctttcaacaccaataccatatgacaatcttcttactgtaaatgtttctttagctccgccgttttgtctcttaattacagtaccttcgtacacttggattctttcacgtgtaccttctacaactttatagtgtacttgaacagtatcacctacatgaaattgaggaatgttgtcttttaattgttgtgcttcaagcatctttatatagtccatcttagtcctccttctttagtttatttaaaatttctctcaaatttttcatttccttattatctagcttagcaaagtcaagtaagtctatcctgttttttacagtcgctttgaatgactcaatgagtctaaagtcatcgacatcttgatggtttccactaagcagtacttctggaaccttgtccccatccagatcatatggtctggtatactgaggatactctaaaaaatttgacatgtgagtttcgtcagaatacgaatcttcttttattactgaatcaactaacctcgatatagtatctatgattaccatagcaggtagttcgccaccagttaatacataatcaccgattgatatctcttcatcgacatagttttgtatgattctctcatccaaaccctcgtagtgcccacaaagaattgttatctcatcaagttttgcatactctttagccaagtcttgattgaagagctttccttttggtgaaagatatataagcttctttggcttaatatcttctaagcagtccttaagtacatccgctcttaaaagcataccactgccgccaccatatgggtagtcgtcaacctttttgtgcttgtcctttgagtagtctctaaaattaataagattgatctctataagtttattgtctatagctcttttgattatactaaaatcagtaagcgctgcaaacatctctgggaacagagtcaagacattaaactttatcataagataccttctataagtttgactttgattcttcttttaatcaaatcgacttccttgataaaggccttaacaaaaggaataagtgcttcctttccgtcatgatctactactagcacatggtttgcactcgttgtcataacgtctttaacagtgccaataaattcatcagcttcactatatacttccatatccataagatcgtgtatatagtagtcaccttcatctaataaaggcatgtcagctttatcaataaaaacatccttatcaatgagtcttttgacatcatctatataatcaaagccttttagtttaagtacaataaattttgaagctatcttttgacttagtatctcaagctcttctccatcaagatatattttcttatactctttaaatttgcttaaatcatctgtgtaaggaaagatttttacctctccatttaagccatgtgctgagacaatctttgctatcttaataagctccaagatttattcctttatctctaaattaattcttcttgagtctttaagtgtagctccgacaataagtctgattgctttaacaaccttaccgcctttaccgataactctacctatatcatctggatttacgtatagatcaatgttgatctcatctgatgcttcgttaactgtaactttaacatcgtctttgttttcaacaatagattttgctaaaaattcaactaattctttcatattaacccccacatcctaagcttctacagcttctgtttcttctttagcttcagcttttttagcagtttttgctgttatatcatatccttgagatttgaataatctttgaactgtttcacttgctttagctccgtttgctatccattgttcagccttttcttgatcgaattttattgtctttggctcagttaatgggttatagtaaccaagttgttcaataaatttgccatctctagctcttctagaatcagctacaacaattctgtaaaatggattcttcttagatcccattctctttaaacgaatttttaccacaatctcacctccttaaaattatatattaaatggaaaattgaattttccttttctcttcatagacttttccatgctgccaaagcgcttcatcatcttcttagtatcttcgaattgcttcaatagcttgttgacatcatttgttgtcgttccactgccttgtgcaatccttttctttcttgaagcgttgataatgtttggagtaactctctctttcattgtcatacttctgatgatggcttcaactctgcctatatctttatcacttatgttaatgccctttaaggcttttgaattcattcctggtatcatttgtaataagttttcaattggtcctaagtttctcatttgagctatctgatctaagaagtcatcaagtgtaaatgtttcttctcttaatttcttctcaagctccattgccttcttttggtcgatattgctttgtgctttctctataagagtaagtacgtcacccataccaagtatcttagagactaatctgtctggatgaaactcttcaaggtcatccatcttttcgcccataccaacgtatttgataggtttatcagttacggctctgattgaaagtgccgcaccgcctcttgcatcaccatctaactttgttagtataacacctgttataccaagtgcatcatcgaatgattttgctacatttaccgcatcttgacctgtcattgagtcaagtacaagaagtatctctgatggatctaagttttctttcaaaccttttagctcatccataagcacttcgtctatgtgtaaacggcccgcagtatctatgatgactacgtcattaccattcttctttgcgtgctctaaagcgctctttgctatatcaagcggctttatcttatcacccatggtaaatactggaacgtcaactgactttcctactacttctagctgctttatagctgctggtctgtagacgtcgcaggcaactagtagtggtcttctgcctttctttctaaggtttattgcaagtttaccagttgttgttgtcttacctgcaccttgaagaccgcacatcaagattatgcttggattcttgcttagcgtaagtccttctttagtcttacccataagattaattaattcttcattaactatcttaataacttgttgaccaggagttaagctctccataacctcagaaccgatggctcttgcttttaaattatctataaattttttaactaccttataattaacatcggcttctagaagtgctagctttacttctctaagtgcagcatcgacatctttctcactaagccttcccttgcctcttaggctgtctaatgttttttgtagtttttctgataagctctcgaatatcattcttgctccttttacatctcgtttataatctctttagcttctttaattcttcctttaatttcatttatatcgtcaatttcgattagaccttgaaatataatttctaatttctctttgtcttctttcttcttgtcaaacttttctataagcttaagtgctgcctcgaaagactttaatttgtctatagctcttttaatgttaaggctcactgcttgtcttgatatagaaattagctcagctatctctgttaatgaataatcttcattgtagtagtagtcaatcgacttgtactcgctctctgttaagaggcttccgtagaagtctaagagccttccgatatatatataatcatctaatactttcattttatcatccaatcattatgtagaacacgcatcatacttagtgttctctcacaaaaaactgtcaagctatttgcttgacagttaatataatactatatagattgacgtttgtcaatacctttttatcattttctttgctttttttaaaataatgcttctacgaagtcatcgacattaaaggcttgaaggtcttctatcttttcaccgacacctataatcttaacaggtagatgtagttcgctctcaagtgcaatgataacaccaccctttgcagtgccatcaagtttagtaacgcatacacctgttatgtcgcttgtctctttaaatgcctttgcttgtatgatggcgttttgtccagttgtcgcatcaagtactaataaattttctttaacagcattagggaactctctatctataactctcttaatcttgttaagctcgttcattaggttttgcttgttgtgaagtctgcctgctgtgtcgcagataagtatgtcagtcttccttgccttagccgccatgatggcatcaaaaataacacttgctgggtctgctgactcttcatgagcaatgatgtcaacgttggctctgtttgcccactctttaagctgttcgatggcagcggctctaaaggtatctgctgcagcaatcaaaacactcttaccttcttctctaaattggtagctaagcttgcctatggtagttgtcttaccaacaccattgacaccaacaactaaaagtatggctggagatggttcaagttttaaatctcttgatgaaacgttgtcattcatgattttctttatttcatccttaagtatagggaaggcatcttttctatctaagatattttctctgacaattctttcttttagattgtcaatgatgttcataacagtttctactccgatgtcggatgttactaaaacctcttcaagttcatcatagaagtcatcattgatgtctgtgcctttaaagacagtttgaagtttgtaatttaagttttgtctcgtcttctcaagatcagagaacatcctcttaaagaaagatgatttttcctctttgacctctggcttttcttctacttgtgcttctccgcttgactcaatatcttgcttttcctcagtctcttcgactgcctgttcttctctagtctcatctttaactatatcaatcttttcttctttaatttcaattacttcttcatctttattttcttttaaaccaattaaacatatttcacctcttaagttaatttcatcgaaagtatagagcttatgcccttttctttcatagtaatgccatatatagcgtccgatatctccatagttacctttctatgtgtgataaggataaattgtgtttcctcttttattctatcaaggtaggcagtatacttactgatgtttgcatcgtcaagtgcagcgtctatctcatcaagtatacagaatggcgatggcttagattttaaaactgcgaacaataatgctatagctgttaaagtcttctcaccaccagataaaagacttaaggactgcatgctctttcctggtggacgcgcttctatctcaatacctgagttaagtatatcattttcatcactaatataaatcttagcttctccgccgccaaataggttttggaatatttcagagaagtagccttgtatgatattgaagttgtccttaaactttatcttgatagtctcatcgatatcgtcaattatatttaataggtcctcttttgactcttgcatatcatcaaactgctttcttaagaactcaagtcttgttaatgtatcttcatactctttgattgaagatagagagacttcgccaagtacatctatcttctcttgtagctctcttagatccttagtgcttgctttaacaaggctttccttgtctatggtctcaatgttaataaagtagtcatttgataacttttctttgatgttatccttcattacttcgttacgagcaagtaagacctcatttttatttatctcgtcttttatagatataatattttcttgacaagcttttatttcattttgaagttcaaatatctttgataaaacttttcttttcatctgtttttcatttatcttgtcaatgtatacttgttcaagttcttcgttcttctttaagaaatccattatgctagtgttttcactttcaagcgcttctttgttttgactaagctctttgaagtcactagcaagcgctgcctttatatcttgtgacttagctatatattcttctgaaagagcaatatcttcaactgttctttctagctttgcttctaaggtagacttttcaacacttatttgaagaagcttttcattacgtctatccttttcttcctcaaagcctttgataagttctttttctaattctatcttcttctcgtgctcagcttttttctccttaagagcttctaaatccttattagcttgaacgattttctcatcaaatgcattcaatgaaaccttgatatcctctagttctttctttgcttgactgatatctctttgtgcaaaattgatattgatctctaatgaatttatttctttcttatgcatatcaatcttttcattgatacttaatatctcttcattgcttatcgtaaatagacttttcattcttaatctcttcttcttttttaatcactgaagtctttacttcatctaaagcggctttcttatcattgatctcttccataagcttacttaacatatgtttacgcgaaataaatgatgacttaacttgactaccacccactatagaaccagatggatttatgatttgtccatccaaacttacatatctatattgcttataagtcttcgatattctgagtgctgcatcaaaagtctttgtaacgaccgttctttgaagcagactcttaaataaattctcatacttcttatcaaaggtaattagttcactcgcaaagtctatagcatctttatcattgatgccaaagttttcactcgcatagcttttatatctgttaagtggatagaaagttgctctaccatagttattcttcttcaaaaagtcgatgtattctttagcatcgtcatctttatctatgactatagcttgtaagtttgattgaagtgctgactctatagcaagcgaatacttttcttcgcagttaaatatatcaactaataaacttgagtcagacttgaagaagtttttctttgcagccttagaaatctctctaacacttctgtaataaccatctaggttctcttctaggttcttatgcatctcataactcttttgcaatactttaaggtcattttccaaagcaaagtatgagtctttagacctagttaagtcatctgatcttgaagcgatatcgttctttgctttttcatacaatttgtccttctctacaaaagaattgtttaagtcatccaagccttcactagctttcttaaactcatcattttgcttctttaagtcattttccttttctagaattttcttctcaagttctttagctttttccctctctgtagtcttattgctctcataatttgcaattcctaacttagtagcctctagctctctatcaagttcaagccccttgttcatagcttcatcataacttgtcttatcataggatgctttttcgctcttaagcgcttctaagtctttcgctatatttaaaagattctcttcgctagattttttaacttgcgataaagtttttatcttctcttctgattctaataatttattggcgtgttctttctcttttagtttattgtcaagtatcttgtcttcgatagagtttaacttttctttattgatctcaagcttttgtctattgatatcaaattctctaaggtctttatttctttgctctttaatctcatcaataagcgcttcgtacctcttaagctcactttgtaatggcgcagagctctcttcaacctctttatttttaatctcgcttagctttaattcatcaactagtctgtctttgtcggcagtaaatttaagtaggttcttctcaatcttttcataagcactgtatgaaatagatacatctacctttttgtactcttccataaggcccttaaactctctagccttttcagattcactcttcagtcttgcttcattttgctctatctcataaagtatgtcttttattcttaatagatttgcctcagtcttatcaagttttcttaatgactcttcctttttgtatctatacttactaacaccagatgcctcttcaaatatggctcttctgtcttccggtttattagatagtatctcatcaatcctaccttgaccaatgatggagtagccgtccttaccaacacctgtatctaggaaaagttctctaacgtccttcatcctagcttttttgttattaatcaaaaattcgctctcacctgagcggtacatacgtcttgttacctctacctcttggtactcaacaggtagagaattatcatcatttgaaaatattatgcttacttgagcgtagccaagtgcttttttctcttcagtcccttggaagataacgtcacttgacttgtttgctctaagtgatttattgctttgctctcctagaacccatctaacagcatcagatatgttgctcttgccgctaccattaggtccaacaacagttgtaactccaggggtaaagactatttcagttttatttgcaaaggatttaaaacccttcaatattaatttatttaaacgcaaaatacttgccctttttcgtatttattcttttataagatccttaaatgagtaactttgcgggcttccatcgtaaaacattagcctatcgtcctcatcaaagatccctttatctcgtaatttattttatatttatttatattttctttctattcgttttattcgagccgcttaagaaggaagctactttttagaagaaattattgtgaaatcattagtaattttatttatttcaataaattcttctatgatgtcaaggtagatagcctcataagttaatgagcgtatcgctgggtgaaatggccctgcaactacgtccttacctagctgtatgttatcagtcgtttgcagacctatcctgattatctcaatgttctttgcttcaaatatagtgacaattcttttaagtgtatgaaccgcctcatctacatctaatgatgtatacgaaccatcttcaagtctgtcaagtagttcagtatctttaatgacaagtgtcggatatatcctaacaaaatcaggctccagagctgctatcgcttcagctgtagcaatatccatctcttctgtagacttatataggcccgccatcatttgaaggccaagggtaaatcctttgtccttaataattttagcgctgcgaatggtgtcagccgccttatgacctctctttagtgcatctaaaacctcatcattcattgactgtgcaccaagttcgatggttttcactctatacttttcaagctcgtcaagaatttcttcatttatagcgtccggccttgtcgatatcctaatgctatctatgaggcctttatcgatgtatgtattcgcaagctttaagtagctaagcataagtgggtaatcaagtgcagtaaagctacctccataaaaagcaagctctatatcctgctttccttcatatagcgccaaatacttttctatatcattttttatattttcttctttttgcgcatcgtagtccttagcgatcttcttttgattgcagaagatgcaatcatttgggcagcctagatgcggtataaaaattggtattatatagttttttttcattttatcaatttcatctcaagtgcaagctctttggatgccatttgctgagcggtctttttattcttagctctagcaatggctctatacccatcaagctctacagcgtactcaaaaatcttatcattgtccggaccatattcttttaataaagtatatactaagtctaaaccatgtttttgtgcatattcaatcaagatattcttataattcctaaaatcattattcgcatccaaaaccatgtgtgcattctttaaatatttatctaaaataaatttttcagcttcatcaatgcctgaatctaagtaaatagctgctattagtgcttctaagtgatcagcaagtatagacgttttatcaatattgaacctcaaatttgcctccatataaatgtagtcttctaagtgaagctctttagcaacaatattttggtatgaagccttagcaaacatagctataagcttagataaagtaccttcatccttattaatatacttagcaaataaatattttgccaagacataagataatactttgtcacctaaaaactctaggctctgtgcgttgtatggcgcagttaaggtcttagcttcctgtgaactcttgtgaactaaacttgtgtatagtaaattttcgtcattaaaattatatccgataatcgcctgcaagcttttgagcttttcgcgagcatcggatatatcataaatcttcattattttaacgcttctttagctagtgctattgcttctccaactgttttaacgcttgtaactctatcatcatccaagcttacatttaattcatcttctagattcataattagttcaactatggcgatagagtctgcctttaaatcttccttaaaagtagtttcgtcctttaaatctttaacatctaccttaaattgtttagcaattatctctttaatttttcttccaagatagtccctcctagttttcttttaaataatctataactttagaattaacaaggtcaacagtgtttcttatagctaaataaaatgccttttcgtcactgttgccgtgcgccttaactatagctttgttcactcctaatactggtgatccgccatacttagtaagtcccataagagacattaagtctttcataaatgacatcttcatctcatcagacgagaaatattttttatcttgcataataaaattcttaacattgcctacaaagactttactcataccttcaagttcttttaagattacgttgccaacaaagccatcttgaacaatgatgtccgcttcagttgtaagtatctcattcgcttcgatgttgccaatgaaattaagctcagagtttttaagaatctcatgagccttcttagtaagctcgttacccttcttagcttcagctccgttagatactaaagcaacctttggattttcgatgccaagaagcttttcaacgtactttgagccaagttttgcaaactcataaataaattctggttcgcagtcaacatttgcacctgagtccaaaagtagtgttggtccctttagtcctggtaagaatgttggtatgctagctcttttgaagccatctatcctcttaactataagcatagctgctgctaaaagcgcaccagttgatccagatgatataaaggcatctgcatcatcatgctctactaagtactttgacgctaggactatggatgctttatccttctttcttattgataaagcggcttcgtcttcatttgttattacatcttcagtttgaactatctcataattttttgcgtcagaaccaagagcctcttcaatctctttcctgtcgccaaataaaataaattctaaagagctatcttcagcctttgccttttgtacggcctttaacattgcgacaggtgcgttgtcgccaccttgtgtatcaattaataatttcatacgtgcctccaatctaaatcactaaatattatacattattttgtctattaaatcaagtttttatattatcgctaatgcacatagaaaattagatattaataataattgtctttgccgcttctagtaggatttttatttcttgatctgttagttcttctacattttctataagtctttctaagattgctcctcttgttattagcctatgagttctttcttttcttctttttctatgtcttgttttaacatcttcttttcttgatttttagttgccttagtctttcttctgtatcatcaattttgtctcttattatttcttttgactcttgtcttatttgttctaatttattcatataactcctttcttgtaataaaaagagttaacatttatgctatctctttaaaagtttcattattaaatttcttgtcatctaacaacgcattaaaataaatcttccaaccttttccaattttcattattcatttcttttgtgtagtttgtattgttaatataaagtcttgtatctttatctctaacaaaccccaatttattttacgcctttatgcgtaatccttaaaagcattgaatttattttcgatttgcttatcaatattttccagatgacctttctttaccatatccttaagtttccttgaattggtttttctttttcactaatataatctgcaagttgttgactttttcattggcatcttctataatcttttcatagcttttaaaatagcctttgctgaatactgagccacttttatctcaatatttatagccttattattaacttcatcatttaccatataggcaacctcctttccggggaaaataaaaagcggcccagacttttacatctgaacctctaaaattttaatttatagtttttattattttaattttattactgttgtgacgtactatataaattatttgtcgcaaactatttttgctatttaatgctttattgatggtttcttgaataagaggactacagcatttacccaaaggattgttaatttcgcactttgcattttcattgccctgtaagtctaataatatctttaatattctttgcaccatcatctaaaacagcgtttataatttgttgctctgtaacttggttgcaatagcatatatttgggatttgcatccttttaaaccatataggaacttttacatcttccttataaaaactctttcattgtttaagttataatacacgacatcacaatcttcattcatacataaatagtaagtttcttcatctacaacctttcccataaggttttctgataccatatgctttacagttatattcttaaccttttctcctattttgtgacatttggggcaatttgtttttcttccactgtaccagtggtttttgtattgaacctcagcaagattgatttatcttattttcttgactcactttatttcctcctgtctaaataaatattatttctatagttaatcaggatatctaatacctctttcaatggatctacaggttgcagctcttttaagtcttctttattcattaatctatattatatcataaataggctgataaatcaatttagcctattttatacttgtgcttgcgttagtatttattgagatagtccttgtttttccttgtcccacttggaactgctccaaatcacttggacctagtagaaacatttttgcattttattttctttcttattttgacaaagaaaaacgactaagttttaatcttaatcgttttaaaatattctgaagatattttacatcatttttataataaatttaatcaactgtttattaaagctgttagatatagaaggaataaagatagacatattccagacaaaattgtataatgctaagatctatctccatcacttttaatggcttttataataaacatcggagtcaggtatgctaccacaagagctatgataataattttatttcaattcttctgttttagttaaaggatttataaatttttatttacttctaactcaaattcaatacaattatgtttatttaattcatgaccatgatctttttctgatttttccttccgactttgtagatactatttttttccctaaataattctagaaaagaaaagcatttgatttcatatctttaacgtaaattccatattctccatcattcggaatagtaaattttacatcatcttctgggtttttctcttttttataggagcaccataatcattatagccccaaccagctttaatatcttcggcaggtaaaatacctacttctaaatcttttccttttaaagactttagcttaataactacggtatcacctttttcccatttctctctaccaaaaatagctacacttccttttaacaagcggattttaaaatgcgtagatcctttcgtatctctagattctactaaaaaagtcttacttgaaaaacatttttcattgttactttttttcgcagccattactacattcagactaaaaactaatgcaaaaagcacaagtgctattgaaagtttttttatattcttcatttcttacctcctcatataattttgtttatacttgtctttgatatcactgctttttttaaatctatgttgcgataaacctaaaggtttacggtatttctcgattctattatttattacttcatctttatttgtttaactatagtttagcataattttgttcaaaattcaatactttttcatatttttgattaccttttctagtatattatcatataatatctatggtaatatttttccattttttcttattattctaaatgtttctttaaattctttagtcttttttatgtgtcctactacaaacccttacaaatcatgttaacatagtggaaacactaacaataaaaaaactcaggcgattaacctgagtattttttattcaacatctaaaaccttttcaccattgtagtaaccacagctcatgcatactctgtgtggtcttttcatttcatgacattgaggacattcaacgaatgttgcttttcttaatgtataagatgaagctcttcttttgttacgtctttgttttgatgtacgtcctttaggtactgccattaaaaacacctccttaacttacagtaaatgtatttctatactaattcacatttataacattacaattatactgttttttgtgtcttttgtcaagactttttcttttttattttaaattattttgaaataatttcttttgtgtctcttgctatcattaactcttcatttgttgggcaaatgtagatcttaatcttagctccgtctttagcgatgttaacttcttttcctcttgttccatcgttcttcttgtcatctagttctatgcctaggtgttcaagtccgtgaagaatttctcttctcattgtgtcagagttttctccgataccacctgtcataacgatagcgtcaagctctggcatttgagccatgtaagcaccgatgtatttcttaactctgtttgtgaacatatcaagtgcaagacctgccttttcgttacctttgtctcttgcttcttcaaggtctctgaagtctgagcttaatttagaaactccaagcacacctgacttcttgtttaaccattggttagcttcgtatggtgtgatgtgttcgttttcgcaaaggaatgttactactgttgggtcgatgtcacctgatcttgtacccattacaagtccttctagcggtgtaacacccattgatgtatcatacactttaccattcttaatgcaagctaagcttgagccattgcctaagtggcagttgataatgtttagttctgataaatctttattaagtatttcagccattctatgtgctatatatttatgagaagttccgtggaaaccgtattttctaagtctgtacttttcgtataggtcgtagtcgatagcgtacatgtagttcttagctggcattgtttgatggaaggctgtatccataacaacaacgtttggtttgccctttacaagctcttcgcaagcttctatacccataaggtttgctgggttgtgaagtggtccaaagcagatgaacttttcgatagtcttctttacatcttcagtaactagtgttgagtcagttattatgtctccaccatgtagtactctgtgaccgataccgtcaatctcatcaagtgaagcaacaacgccgtgttctttattaactagtgcatcaaatacatgcttcatagcgtccttgtggttcttcatgtcttcttcaactacaaagttttcttttccttctactttgtgagtaagctttgagccattgataccgattctttctactaaacctttacagattacgctttcatcatccatgttcattagttggtactttaatgatgatgatccgcaattaattactaatattttcatttttacctccctaaatatttaacaaaatacatatatatgatataataaaacatagaaaatttcaagtgttttttaagaaagaagggaaaaagttgaaaatagctgcaattatttgtgaatacaatccatttcataagggtcacctctaccatgtacgtaaaagtaaagaggagctaggtcttgatgccgtggttgctcttatgagtggtaattttgtgcaaagaggtcttcctagtgcctactctaagtatgaaagagccaaaattgcctgcgagtgtggctgtgaccttgtactagagctgccactgttctcttctattgctcctgcagacatatttgcgaaaaacgctgtgactatactaaataaactaaacgtaatagattacctaagctttggaagtgaagatggtatagagactcttagaaaagcagatgaaataatgaaggctaagaagaatgtatttgatgagctaattaaaaagcatttgaatagtggcctctcttactcaagggcatatgctctaagctttaatgagctaacatcaagtgacataatgagtaaatcaaataatatacttgcttataagtatataagtgcacttgacgaaacaaagagcacgataaagccatttgccgtgcaaagacatggccccggctataatgatgagtgcgatgacgatggtatagcaagtgcaagtcacatacgctctcttatatataaaggtgaagatgtaatgggtttagtcccagcacttccccaagaaaaaatacttgacttagaaaaatatttttcttatattaaatccattttcataagagaaaagaatttaacatggtgttttgaatatgatgaagacgctgtaaactatattaaaaaatacatctatgaggcgaagagttataatgaatttatggatatggtctcaataaaaaacttttcaaagagcagaatcaatagatttttattatcaatgctattaaacatttataaagatagtgtttcaagagacaaagaatatgattttataattcctttatgtgcaaatgtaaaaggaaaaaaaattttaaaagagataaaaaaacatagcaagctaaatatcattagcaagtacaaagatcttgataatttaagtcatgagagcaagttagaccttgagatgacggtaaataatgatcaaatttattatctgatgaagggcatgaacgtaaaagatgcttataagattaatttactaagtgtatgaaatatttcttaaaaataagacaatatatgatataattattgtataagaaaaaaataaaggaggacatatacatgaaattactaattatcggtgcaggtcctggtggatacgaagccgcttttagagctgcccaactaggaaatgatgtagttcttgttgaaaagaacttgcttggtggcacttgcctaaacattggctgtataccaactaagactatggttaagattgctgatttttatagcgaagtacaaaattcggaagaatttggcgtaaaaattgatggctatggacttgacactgaaaagatttatcaaagaaagcaagatgttatgactaagcttagagatggtatcgagtacttaatctctacttatgacaacatcaagctaataaagggtactgcttcattcgtaagtgaaaatgaagttaaagtcgctttaaacgatggcggcgaagaaaacgttacttttgataagtgcatcatagcaactggatcaaaggacataaagccacttgaaggctgcgacctaccaaaggttttaaactcaactactctactaagcttaaaagaaatacctaagtcaatgatagttattggtacaggtgttataggtcttgagtttgcgactatatatgcaagcttcggtactgatgtaactgttatcggtaacaatatgttcaaaacagcagatatggaaatacaaaagagacttcaatctatacttaagaatccaaatctaaagtttgcaactaagcaacactctaagaagatagaacaatctggcgatatgcttaaagtaactactcaaatggttggtaaggatactttaaaagagtatgaagctgaatatgtattagttgcactaggaagagcaagcaacactgatggtcttaacactgaagctgctaaagttgaaacaaaggacggtggcgttttagttgatgaaaacttaaagacatcaaatgacaacatctacgctatcggcgacgttatatacaagaacactcaattagctcactttgctacagctcaaggcttccacgttgttgaacagttgtctggccttgaaccaaaaactgatctatccatcgttccagctgttttatatacagttccagaacttgctcaagtaggtaagactgaacaagagcttgaaaaagaaggcgttgagtatgacaaggcaaagtctatgtaccaagcaaacggtaaggcacttgcagttggtggaacaaagggctttataaagatactatctacaaaggatcacaagaagatcttaggctgccacatcattggtaaagacgctgacttattgatccactacgctgttatagctatggctaatggcttaagtgttgaagacttatcaaatatgatatatgctcatccaactattgccgaagtatttaaagacgcaatagaggctcttgaaggtaagtcgactaactcacctatggcaaaataattttataaaaaaacaaaaaaataaatgcgaaggtatatgtactttcgcatttatttttttacttttcttctttttcttgtgctacttggctttcttgactaacactagcagccatctttctaagttctgttctgttttcgttcaaagtagtaatcatttcttttaggttctcttgtgcgttcattagtagcttgtcagaatattcaagcgaagaacgctttaagtttgttgatgctacttgagctttgttcataagatcttttgctctttcgttagcttcttttaatacttcttccttgcttacaagctcttcaagttttaatcttgtctctttgataatttgttctgcatctttatttgcttcgctaataattctttctctttcttctttaatccatgcagcttgttttatttcatctggaagctttattcttaattcgctaatgatgtctagtaactcttctttttgaactaaaaccttacttgttagaggtagagaacctgctgattcaacaatgtcctcaatctcatcgataagacctaatacatccattttttaacccctttcgtatttctttttcaatccattttcaacattttttggcactagtgccgatacatctccatgatagtatgcaatctctttcacaatcgaagaactaaggaagttgaacttgtgtgatgctactaaaaatatagtctctaaatctttattaagcgacttattcgccatcgccatttgaagttcatactcataatctgaaacggctcttaaacctctgataacgaagttcgtcttctcttcttcacaaaatgaagttaagaggccgtcaaatgtctttaccttaatcttcttctcgtctttaaaaatctcctctatcatcttttttctttcttctatagtaaataaatgttttttctgtacattagtagttatgcctataatcaactcgtcaaagatgtcctttgatctattgatgatgtctatgtgaccgttagttataggatcaaaactacctggataaatagctttcatttaattcctctttataaaaaatattttcttgtcacccattgctctgatatcgatatcaaaatcatcgttgctaatggtttcgtttagttcatagttcttgttttcttctataataatctcgccacattcgctaagtaaattcatctctactatagttttaagtacctcatttagaagctcgtgctgcttatatggtggatctagaaagatataatcaaattttatctccttgagtggaccttttagtgcccttaaaccatccaccttcataagatttatctcattagatagccccaagctttctaaattctttttgattacagtaacggcttcaaaagaattatccactaaataaacatccttcgcgcctctactgtaaaattctataccaatctgccctgtcccactaaagagatctaggacagatgcatttatcgcaattggcgatatgatattaaatatcgtttcttttatattatccaaagttggcctcgttttaagaccctttggtgcaagtaactttcttgattttaatttgcctgatataactctcatagctgcctcttaatttaagatgatatcctgtttactgtcgtagaagactgagtccatattgcttagcaaggcttcgtatctatctttttcatagtcaatgtcgcctcttagtatagataagacttctttgttgatgtcattaatcatctctgtatctttatcaaagtcaaagaacttaaaatctatagctccatgctgctttgttccgaagaagtcacctggtcctcttagtatcaagtctttcttcgatatctcaaaaccatctgatgtctcttgcataagttttaatctctcatagctaatgtcattaagcttgtcgtaaacaagtatgcagtatgcttggtcagaacttcttcctaccctgcctcttaattgatgcagtgtcgatagtccaaacctttccgcatttagtattatcataaggttagcgttggcaacgttaactccaacttcaattacagtagttgatacaagtatctgtaccttgttagcttcataagccgacattatcttgttcttctcatcatttgaggtcttgccatgtagaagtgcaacattgtaatccttgaagtgttctttaagttccaagtagacatcatttgcgtttgataagtctagtgactcgctctcttctataagaggtgtgactacatatacctgctttttattcttaagctcttttaatataaagttgaaaattctttctttatagtcatatgacacagcataagtctcaaccttttttcttcctggcggcatagtcttgatagtagatatatcaaggtcgccgtagaatattagtgacatagtccttggtataggcgttgcgctcattacaagagtgtccgcgtatactgatttatttgttaggttagctctctgctttacaccaaatctgtgctgctcatctgttattacaagtccgagattcttaaaattcaccttatcttgaatgatggagtgagttccgacaagcatgtctatatctccactctccagacaatcgtagatatctttcttttcttttgcactgatagatgacgataaaagtgctagctttatgtccttgtccttaaaaatacttttaaggctctcgtagtgctgcttagcaagtatttcagtaggcgccatcatggcggcttggtagccattgaggtaggctttatacatcgcatataccgcaactatagtcttaccgctaccaacgtcaccttgcacgagtctgttcatcctcttatcagcttgcatatcagcattgatctcatctataacagtcttttgatcaagcgttagctcaaagccaaggccattaataaagtcttcttctttatcaaaatgcttgaattttatatagttttcatcttgaacttcttttcttaggactttaaagccatattcaacagtaaatatctctctaaaagctaaagtccttcttgccttatccaaagtctcgttcgaagtcggaaagtgcagttctttaagagcctcgtctatgccatacaaatcataatctctaattaaaatttcaggcactatctcttttactaagccttttgtattaagtagctcagtgacaatcgaaactagctttgagttatataggccctttacaagattatatatgggcccaatgtagccaagcctgtcagtatttaaactagtataaaattccggattagaaaagctatatccatatttatttttacttaatttgccaaaaaagtagtatgttttaccagctttgaagatgtttctatagtagttcataccaaagaagaatacttttgcactatttttagcatcgcaaacgtcaaacatcatcatatttctctgcttcatcataggcgaagttaaaacttttaccttaaataaagcagcctcacttaagctttcatcagagataaacttaagatttttcctgtcctcataccttctaggcctatttaacaatgcatcttctggggtatatagaccaagcttctttaggtactcctcagttttgcttcctactcctttgacctctcttagcttcattattccaatgaaattatatagtaatacaaagcttgcttagactcaattacttcgaagtcgatatcttcatacttttcttcaagctctgcaattagttcatctgctaaaactttttcagcatcttcgcctaagtataaagttactaaagatgtgtcttcatcgataagctcatcaatcatcaccatagtagtttcgtttaaatcttctgagcttgcaagtatctttgatgagctgatagcaaggtagttacctttctttatctctttgccatcaatagtagtatctctaaccgcaaaagtaacttcgccagttttaacgcttgctatagcgtccttcatagcctcaagtatctcatctgcgctcatctcttcatcaaaagtaatcatagcgctgatagcttcaggcatattccttgtttcaacaacatgtatcttcttgtcgctaagatctatagtttgcttagcagccataatgatgtttttgttgttagggaagatgaaaatttcatcagcattgatattgtcgatggctttcatgaagtcttctgtagatgggttcatagtttgaccgccagtaactacttcatcgacctttaaatctttaaatatcttagtaaatccttcacctgagcttacagctataaaaccatacttcttgtgctcttttgctgtattagcttcttctttgctgtttttatattcttcttcactaaataatatctcgtggtgttgaagacgcatattatcaatcttgatatcctttaggtaaccaagctttagagcttcctcaattacttgacctgggttgtttgagtgtatatggcacttaattatatcatcaagagcaactacaaccattgagtcacctatctttgatatagtttccttaaattcatcaaccttgctagtatcaccagtgataataaattctgtacagtaaccatatttaatgttgtctgtagaaatttcttttctgttggcagtttgcttagtcttgtttatatctttaaccttgatttcaagattttcagttctagctccttctatcgcaccctttacgatgtaataaagtcccttaccgcctgcgtcaactacgcctgcttcttttagtacactaagaagctctggtgttctatttaatgactcttctaaagctactagagcatcgtctgcgaacttagaaagttctgtatagttcctgtaatttttcatagcaaaattagctaggtcttttgaaactgtaagtatagttccctcagtaggtctcattacagccttatatgcaacctcgcttgcctttacaaagccttccatcaaaacttcgatgtcaatgtattctttgtcctctatagcttctttaaagcctcttaaaagctgagataaaattaccccagagtttcctcttgctccaagaagtgctcctttgcttaagccatttgctatcgctttaatagttttattttcttctttaactgcatttgtaactgctgacttcattgttaaaagcatattagtacctgtatcaccatctggaacagggaatacatttagtgcgtctactgtttctttattatctccaagagaattaagtgcaccaatcaatgctctctttaaaacaagttcgtcaattctattagtactcacatttacctcctactttttgtcatttattcttagtccttggacaaaaacgttgacattcttaacagacatagctgtttgcttttcaacattatacttaaccttttcaacaatgttgtcgcatacaactgaaatttttactccaaactctaagacaacatatagagatatatctagatttttaccatcagagctaaccttaactcccttagataagttctccatgttaagtaacttataaaaaccgtcctttgcatcaattgcgctcatacctactatgccgtagctttccatagcagaaagacctgctatcttagcgacaacattatcagcaatgttaatagttcctaaatcgttagtatattgacaaggcataaatttccctccattcaattaataaacttttttaatcttttaactaatttattcatactcatatgtacttatattatatcatcaaatagacaatttttaaagaattaaatagaaattttagctttttttgccattttatttaaaatttatctgttttttataaaaaaggcttgatttttatatagaactttgttataattaggtagttaaagcttgagaggaggtaaagacatgggtagagtttgcgatatatgtggtaaaggaatgattgccggtaacaaagtatctcactctttaagacatacaagaagaacttggaagccaaacctaagaagagttagagcaaacgttaacggaacagtaaaaagaataaatgtttgtactagatgcctaagatcaggcaaggtacaaagagccgaataaagaattgcagactttctgcaatttttttcgttacataaaagaggcaggacgattttgtcttgcctctttgcgtatataaagaaaaggtcgaagcagatgcttcgaccttcttatatatgttatctctttatatatatgctctctttataagaacaatgttgaaaacaagaacgctctgttcttatgtgctgttactactgcatagtcaccttctgccttgttgctcataagtaatgagctgcctcttgatacagtcttatgatctagttcccactttgcagactctatcgaaacagtgaagtcttcatctgctggcactaaagagaaggaaacgatatcatatctgtttataactcttatcttgtcaccttcattaagaacttttactatttgatctccaccaaagacagtcatatttaagtctttgctatatgctaagacattgtttaaaactgtcatagtgtggtccactctgttacccatagcgcaatatatgtcaactttctttatttcgcacttgttcttaacatactctagcgcaagttcaaagtcggttttatccttttctctctcatattctaatttaactatgccactagtctctaagtagaacttagcatcatcgttaatactatcttgatcgcctatatatagatcagcatccatatcatacttaactaagtgattcaaaccgccatcaacagctataactaaagcataatcctttacatctccagttaaaaaacagtctatcggtccatttaatactattgctatcctatcttttttcattatcttctcaactcctctaaatttttttctatctctgaatttttaaatgctgctgatcctgcaacaaatagatctacacctaagctttctaagtattttatattgtccttgttcactccaccatcaacttcgagcataatatcttttccgctctcaacaatcatcttcttaactcttttaattttttcatctacagctttgatgtatgattgaccaccaaagcctgggttaactgacatgattagtattagatcaaggtcgtccataacatacttaagagtttcttcgcttgttgatgggtttagtgatactccagctttcatgccaagccttctaatctcattaagcgttctttgcaagtgtattgttgattcttgatgcactgtaagtatatctgctccagcatttttaaaatcttccaaatatctttcaggcttctcaatcattaggtggcagtcaagaataaagtctgtgttctttcttactgacttaataattggcaggccaaatgatatattcggcacaaaatttccatccataacatcaaggtgtaagtacttaataccttcgttttttaatctctctaagtcgtcttttaaattgtaaaagttcgctgatagtagcgatggtgctatctctctcaaattaatacctcctctttgcttttatctcttcatacatcaaaaggtaatttttgtaccttatggatgaaatattttcttcttcgatttgtttttttatctcgcagtcaggctcgttgatgtgtaagcatgacgaaaacctgcacttgcttttatacttattaaactctctgtaataatttttaagttcatcttcgctctctaaaaagtctatctcaagcgaggtaaaaccaggcgtgtctatgatattagtcatatcgtcaatagaatatagctgcactgaccttgttgtttgcttgcctttattaagcttcatagatatctcttgcgtcttgattagcttgttcttattgagatagttcataattgatgactttccaacacctgacggcccagataaaactgatgtctcgttctttattttatctaagaccttgtgtatggactcgtcatcatatatgctcgtctcaaagacatcgtagccaatgttcttatacatattgtatatcatctcatcaagcttgatgtcttttttatttattataattataggcctaatcttattgtactcagccatgactaaaaacttgtcaagcaagagtaaatttatacttggcgtgcttatagtcataactatcaatagattgtcaacgttggcaacattaggccttattaatacgttctttctatctactatgctttctataaggcaagagccgtccttttctacgaagtttgcaatgtcacctacaagaggttttattttttgctttttaaagctgccaaactgctttgcttcataaacacgtccttcgctttcaatgtagaaaacacccgatatagatttaattatcttccccttcattagttagcttgctttgtagttatataagtgtcattcttatagatatcgaaggtatctccttctttagcattgtatttaaaccttacttgtccatcttctctgctaacaagttcatcataaacagtttcttttactccaccagagtttttaactatagtaaagtgtgtttgttcaagttcagtgtcagcttgaaggacgatgtctataacaactgtgcttttgtctttgtgtttcttgtctgcgtcagaagttttttcatttgtttcactgccctcattgttttcttcctcgctaggtctttcgatcttaccttttgaaaccacaaggtctataacttcatccttttgagctgttgaacctgaggcaattgattgctcagttacaatatctttttcgtagtcttcactgtctttgcttgtaatcttatatttaagtcctaaatctgtaatttcttttataacttcatccttatttcttcctacgaactctggaacttgcacttcattttgattacctttgcttacaactacttttaccaatgagtttttctcaacttgtgaaccttcacttggttcttgtttgataatagttccttcgtcgtgctcgctgtcttcctcatagcttggttcagcaagctttaagccatatttgttaagtatactttctgcatcaagtattgtttcgccaactatgtttggaacttcaacactatcttccgactcagatatagtaagtgataccttaaagtcttttttaactttaaagtttgcttctggatcttgctttgtaactatatttgccttgccatcagtcttttctgttgctactacttcataacttagtcctaggctttcaagtttagattttgcagtatctaaatcatcgccaacaaggtttggcactaaaatatcatctgatcccccgccacttaaagctccctttaagtagttgtacccaaagaacagacccgcaactaatattagtgctgttattatacctaagaaaacacctactaagccattttctttttttcttctgcgatgacttctgtttgattgtctcatttcagaaatattttcctccctattcctatttttcttatcaattttttcttctctaattatatcctcttgcttcaaaacaaccgtttcatcattccagttatcattttgtttatcataattaaaatcatcatcatcatctaagtgcaagaagtcagataatatctcattaacattttgatacctttcactttgcttcttccttgtacactttaatattatcttttcaagatttttattcatgcctggaaggtactcagacggtggaactatgtcgtcttgtatttgcttcatcgctactgatatagggttgtccccatcatatggcttcttgcccgttaacatttcatatagaactataccaaaggagtatatatctgttttgttatcagtatatccgccccttgcttgctcaggtgatatataatgcaccgaaccaagtacgtctgacgtagttgttactgttgttgatgttgatgccctcgctataccaaagtcagttacctttacacttccttgcttagtaatcattatgttgtgtggcttgatgtctctatggataacgttatgatcatgtgcatccttcaaggcgccaagtatttgtattgaatattttatagcgtcgtcttctgataacttacctttgctgtcgattatatcctttagagtcgtaccatcgatgtattccataacgatgtagtatatagtttcctcgtctatcacatctgtgccaacatcgtatatgccaacaatgttttggcttgaaagcgatgctgccgcttttgactctctattaaattttcttataaattcctcatcattagcatattcaggccttaatatttttatggcaacatatctatctaaaactctacatctggctttgtaaactgttgccatgccgccatcgccaattttttcaagaatttcatatctatctgataaaagttttcctatcatcttatccatttcatcacctctaagcttttattgttattatagtaacattgtctcttccgcccataagtatagctctatcctttaactcctctgcaactttttgcatcgaaatatttttattcttctcaattattgcaagtatcgagctatcttcgacctctttgttaagtccatcagtacatagtagaactatgtcatcgtttctgtgtataaacttatatgtgtcaatgacaactgtcttctctgtaccaagtgctctcgtcaaagcgtttttgttatctatattttttacattaaaaatcttgcttcctgccctttttattagctcattaccaaaggtatggtcctctgttagctgagctatctcgtgatctctaataagatatgctcttgagtcaccaacatgagctataaggcaagtatttttgtaatatgcacaaactaaaaccgttgtgcccatgccttcgcaatctttattaaactttgaatatttgtaaatggaattgttagcgtttactatgctagttcttatagcatcttcaacatcgtctatacaaactgcatcttttttatttttcaagacatctgcaatggtatcaaccgccatcttactagctagttcgcctgccttgtgtccgcccactccatcagcaattacaaagaaagggaatggataatcatcatagataaaaaagttatcttcattattgctcctcgttttacccttatctgatacataaccaagattcacatagaccacctcctattgttcaagataattgtttcttagttgtccacacgaagcgtttatgtctgctccaagttcacgcctaactgttacgttgaaaccaaagtcttctaagtacttcttaaacttattaatattctcagaagtacttggctcttcatcgtactctttaattttgttaagcggaattaaattgatgtgtgacttaatatcttttagtaaattttttatatctaaagcagatttgtaagaatcattaagaccgtcaatcaaaacatattcgaaagatatcctcttattaatcctggcctgatactccttaagagcaggcacaagatctttgaaaggatacttcctagtaatcggcatgatcttctttctttcttcctcgtctgcattatgtaaagatatcgttagcgttactggatagttatactctgcaagctttagtatcttatctgctaagccgcacgttgatatagtgatgtttctttttgaaagtttcttgccttcctttgcacttattaactcgataaaccttataagctcatcaaagttatcaagtgcctcgccactacccattagtactatgtttgatacatttatattgtttaatctttctatctcgtatatctcatcgagcatctctgacgcataaaggtttcttattaagcctttctttgttgaagcacaaaaggcacatcccatcttacaaccaacctgtgttgatatacagaccgtgtaaccatacttatacttcatcaagacgctttcgataacatttccatcgtgaagctcaaaaagatatttccttgtttcgtcaagttttgattttagctctaaaaccttgtgtacaccatatatctcagagctcatagcaatcttttctttcaaatcctttgaaaatgtagtaagttcatctaagctctttatcttttgcttgtgcaaggcttcaaagagctgcttggctctaaatttcttttcgcccagctctaaaaagtatgactcaagctccgatatatacatattgttaataatgtttctcaagttaatccttccttagatatgaaatgaaaaagccgtcgttaatcttctctgttggcatgtgtttgatatattcttccaaagtaaagtctttgttctcttcaaggaacttcttcagtatatattcgttttccatcttaagtatgctgcatgtactatatacaagtagtccgcccttcttgacataattcttcgcattatttaatatcttccactgcttttgattaagttctttaagctcctttgttcctatttgatattttatctctggctttcttgatattataccacttcctgagcaaggcacatctatcaaaaccttatcaaagacatcaacaaagtctttattaagtttcaatgcatcattaagtttaaattcaatgttatcaagtccaagcctagctgcttctttttcaagaagttttatcttatgctcatatatgtcgcagctagttatagaaccttctaataacttttcagccatgtgcatactctttccaccaggtgctgcgcaaatgtctagtatcctatcgcccttattaagctttatgtgatcttgaagactcgcactcgttgcatcttgaaaggatatatatccttgactaaataaactcttgatgacatcactcaccttgtcatatatgataaggctgtcaatagatatatcgctctcttcatacttgatattaaacttatcaagaagagcttctaggtctttcttattcgttttctttgtgttgatccttatattaagaagtctctcatccattgacctctttaaaaagtttagaagagtttcattatcataatcactcactagaatatccaaaaattctttgcttatggaatattctacagataatctctcaagctcgtcagaaatgtcaactttaactaagtcgtctttatttcttagaaaatttcttaagtttgcattaacaaagcctgctaatcttttatttatagtcttagtaagcttcaccgcttcattaactgcagcactctcaggtaccttatccatgtatatgatttgatacaaagccatctctaagacaatcagtatatcgatgtcaatcttactaagcttagtcgacgacagctttgagatgatgtagtcaagatacagttttctctctacaacaccataaacaagctttgttacgaaagacttactttgttcgctatctaatttattaagttcacttcttaggctaatgtttgagtaagccccacttgcaaatatatctttcaatattaaaaagcttgtatatctatcgctgtttttagtcatttcttctcctcattgataatagtcttagtagttcactaagtgccgcaaatgctgaagctacatatgttaatgctgcagctcttaaaacctttttagatccgtatatagtctcatcatcagcaccttgcatagagctaatttcatttaaagctctccttgatgcatcaaactcaacaggtaatgtaactagcgtaaataatactatgacagcatacagaattatgcctatatctaataagccaccaaagttaaagaacaagcctccaagtattagtagcatagcaagtctacttgatactcctacggctggtgccatatagtttcttaagtttaacatagggtagctttccttatcttgaattgcatgtccaacttcgtgtgctgcaaccgcaacagaggcgatggatatgccgtctgatatgtctcttgataaagataggctcttatctcttgggtcgtagtgatcacttaaggtgccaggcacttcttttatcgagacattccttaggccgttcttgtctaaaatctctcttgctacatccgagccattgcgtcccaatgagctacgtctacccatgtattctttgtatacataagcaatcttatattgtgcataaaagcttagtaacattgccggtataacatagataaagtatgagcttacataactatggtaccttcctacaaatattaaaaagtttagcataatctttctcctaacctttctcctacttctatcttatttcctcttatataatcagctaccttcatcctctttttgttaggcatttgcacctcacttatgattatggcagagtccttacacttaacctttataccatcattattaacagctaatatagtaccttctttagcgtcactactgtctttagtcacgaaagatgtgaatatcttcatattctctcccttataagtagtaaaggcaactggccatggctgcatagatctaactatgtgctcggttttagatgcgctttcagtaaaatcaataaaagcatcttccttcttaatcatcctaacatatgagctcttagtgtcatcttggggagttccctcatcaagatcattaagattgtttaaatactcagttatcatctgagcacctaagtttgatagtttcatagttaatgtctctgctgtgtcgtcatctgatataggaagctctctcatcataagaatgtttcctgtatcaagtcccttcgccatcttcataagtgtgatacctgttattttatcttcattaatgatagctgcttgcactggtgccgcacctctgtactttggcaaaagcgatgcatgtatgtttatcgagtgatactttttcatgtagagtatttcttcttttattatctgaccatatgaagctacaactatgacatcagcatctgtatccttgattttcgctatggactcagggctgtttacatcttctggctgaaagacttctatatcgttatcaagtgcatatgtctttagctctgaataagtgacttgcatctttctaccacgtcttctgtctggctgagtaataagcatagttatgtcaaagccattatccttcaaagcctttagaggcgccagactaaatagcggcgttcccatgtaaatgactttcattattttgcctctgccatcttgtgttctttatctaattttgcctttagttcatcgtttgtatacatcttcttagccttgtcagtgtataaaactcccttcaaatgatctgtctcgtgacatataacccttgtcaagaagccttctgtttcaagctcgtgctccttaccttcaaggtcttggtacttaagcttaagcttttctggtctttctacaactcctgagtagcccggaaccgatagacagccttcgtaatcatcgcagctaccttctgtttcaagtatttctggatttacaaagaccataggtccttcgcctatatctataactatcatttgcttaagtataccaacttgcacagcagcaagaccaacaccttctgcttggtccatagtctctatcatgtcatctgctagctctttaagtctatcatcaaaaactttaactagcttggattgttttctaagtatttcatcttcatcgtgtctaatatttctaattgccatctttacctcctataaaaaatttcttggatttatataaatgttataatttacttttttgttctttgcaaacttgcttctatataaaatgaagcgtatatagtctttgatctctttcgagtatgtgtttgtgtacttaagtatgatttgatatctatagcttgcgttgattctctcaatcgcgcactgcattagctttgatatctcgcacctaatctcattcttagttaagtatctttcaatatcgcttcttaggtactccatctctctttgaacaatatttttgtctaagctcgttccaacgatgtatatcatgttaatgaatggtggatacaaaaactcttttctaagtgcaatttcattcttataaaatgcttcatagcttcccttcattgcatagccaatagtctcattatcttttgagtagctttgcagaagcactctacctttctcatcacgacctgctctacctgcaacttgagtaatcaggttatatgtgtcttcatttgcacagtagctagggaagtttaaatttgcgtctactgatactataatcgctgcatcaacgttcttaaagtcgagacccttactaatcatctgagtgcctataagtatatcgacatcgcctgcattcatttttttgtataagttaatgtagtcgtcttctgttttgattgtatcactatctgctcttaatatcttcgcatctgggaaagtctttctaagcatctcttcaactttttctatgccgtagccggcaaagctcaagttccgagcaccgcagcttgggcatgtcttcggtatgctttttacaagaccacagtagtgacacttaagtttatttatgcccttatgatatgtcatactcacatcacagttgtcacaagtaatcgtatagccgcagctcttgcaaaagatttccttgttgtagcctcgtctgttcaaaaagacgatgctttgcttcttcgccttaaggttctcatcgatgacttcataaaatctggatgaaatctgactaatgttgcccctttgcacttcatctatcatatcaacaagctctatctcagcttccctttgtccctttgcttttttatcaagctctaagagttcatatatgccgtgctttgcattatagtatgacgatacagatggtgttgcactcgctagtagtagcgtcgctttttcatccatgcttctatagtatgccacctcatctgtttgatacttaggattcatatctgagatgtaactttgatcgtgctcttcgtctatgattataagacctaagtttttgcacggggcaaatattgctgaccttgcacctataactatagtaggcgaagaggcctttatatcgttatactcatcaaagcgttcagctatgcttagctttgagtgaagcacgtgaacctttctttgaaaacgtcctataaagcgtctaatagtttgtggtgtaaggcttatttcgggcactagtactatagcatctttacccatttgtatgcatttttcaacaaggtgtaggtaaatttctgtcttaccggagcctgttacccctcttagtaaaaacttctctcctaaattattatcaagagagtactccatcctcttataaaccttttcttgttctttgttaagttttatcttctcataagaatctacatcgtagcctctctttcttgactcttgcacatagtcttctcttaggaagccattcttcacaagagtttttataggcgaagacgatatattaagagcgcttataatgtttttctctgttgcacttccgccgttgtcccttagataatcgagaacagctttttgctttgtgctaagcttctcatcatatcttacaaggctgatatacttttcaaagtgctccttaactttttgctttatcttgtacttctctacaagcactccttcattaatgagagctttgatatcattttcgctaatcatatcaagcaaggcatcctttgtgtacgccttgtcctttattaggccatgcacatcagcatttgcataatatagtaagtcaagctcctttatacctccaggtggaaagacaagtctaagtgcatcgttgtatgttgagatgtatctatttctaagccaatgtgcaagatcaatcatcttcttatctatgatggccttgtcatccaatactttaattatggacttaatctttgcttcatcgatatcaatttcttcacatgtatttaaaaccacagcaatgctaggcttgtttgacctaccaaatggaactaagactctagtacctatctcgatctcttcatcagttttatatgtgaagactctatctaagactcttgattttgtatcaataacaacttgtacgaacattaaattttctttctatcttttaaaagtacagcaaggttgtcaagtatgatatctgcaagctcgctcttcttcataaggtcgaatgatgtagcgttcttcttatcatatacaaagcttactttgttctcgtcacttttaaaacctgagcccttaagcgtgatgtcgttagcgactatcatgtcagcacctttggataataattttttcttcgcattctcaataacgttttgagactccgccgcaaaacctatgatgaccttatcatctttcttatccttaagtgactttatgatgtcatcagtcttttttatctttatatcatgaacttcgcttgcttcttttttaatcttctctgtgctatattctgctggagtgaaatcagctggtgctgcagccattattaaagcatcggctgaagcaaactctttattcactgcttcatacatatcctttgatgaaacgacgttaactatattgaatggatcttttatatcaagatcgttcggtccaatgattagagtaacatctgcacctctattgtatgccttaagagctatttggtagcccatcttgccagtagagcggtttgagatgtacctaacagggtctatcgcttcaacagtatgacctgctgttacaagtatcttatacttcttaagatccttcttcgataagatataatcaatacggtctataatcctgtctgcatgaggcatcttgcccttgcctatgtcaccgcaggcaagcataccatagtccgcttctaatatgtcaatgccccttttcttaagtgtctcaatgttatcttgtgttgcttcattctcaagcatattagtattcattgcaggaactacaagcttctttgctttgctagctaagaaagcaagcgtaagcatattgtcacagatgccacttgcaagctttgctatggtgttcgcagttgcaggcgctacaacaaagatgtctgcccacttagctatgtctatatgcataggcttagcttcatcattaaagacgtctacatatacttcgttctttgagagtatcttaaaggtttcgcatcctacaaattgaagggcatccttagtcataataactcttacattgtgcaccttcgatagcttagatacaaggtctgctgctttgtatgctgcaatacctccactaacgccaactacaatgttctttttcatcttaaatttcgtattctatcttgtcttcaaggtattcatccatagcgatggatacagggttgtgtgactctgtgtcaacctttgcttctgctccatcaactatttgcctagctctctttgaaagaatcattactaaggcatatcttgacattgtttctaaatcttctttatttttaatataaatcatttgttttcccccaatactttatcttttatatatttgaatctcttcgctctatgtttttccgctttgatgatggactctatatctctaactgcgtcctctaagtaatcattaacgacgaagaagtcatattcctcaacgaagcttatctctttaaagccgtttgcaattctgatctctaagtccttttcgctctctgttcctcgtccgaccagtcttctttttaactcttccatcgatggtggtatcaagaagataaagacaacttccttcatcttttgcttgatttgcaaagcaccttgcacgtctatctcaagaagcactatctctccttcttctatcctcttagtgacgaagtcttttggagtgccatagtagtgtccatgaacgcttgcgtattccaaaaactcatcgttctttgctcttttgagaaactcttcttcacttaggaagaaatagtttttgccgtccacttcgcctggacgagcctgtcttgttgttgctgagactgagaagactatgtcgtcgtttcttctaaaaagctcatcagcaacagtgcccttgccgcaacccgacggtccagatagcactatcaaaaagcctcttttcatctaattacctccgttcaatctttcactaatagttgaagtagcaagtgtcgataatactatggactcgttatccataatgataacgctccttgttttcttaccgcatgttgcatctatgagtctaatagtatctctgttttccatgataagtctctttataggtgctgactccggtcctacaacagctatgactctatgtttattgattaagttcccaaatccaacgttaatgtattccataattcacctactctatgttttgtatttgttctctaatcttttcgattaggttcttttgctcaacacctatcttagatatctcgatgttattagtcttgctaagtatagtgttggactctctgttcatctcttgtattaagaagtccatcttcttacctatggcttcgtctgagttaagcatggctttgaattgagatatgtggctatacatcctaactatctcttcatctatagcatacttgtcaagtaatagtgcaagttcaaactctagtctcttctcgtcaattatgctcttgtcatcaataagcgcatcgtacttctttaagaagttttctttatattgatccgagtaagatatatatagctccttaatcttgtcaacgttcttctctattgaattaagattttctagtatatcacgcttaaggttttctccctctctaattctcatatcatcaaagttgtcaagcgccttctcaagtgtctcaagcagtatatcaagaaactcatcgctctcgtagttattcttaacaatgcttaagacttcttgctgacttatgatgtcttcaagtttaatctcgtcatcaagaccaagctcttccttgatagtccttagagccttcatatactttcttaagaaaactaaatccacttcaacatcattagggtcgtcctctaagaatacaactgttaggaagcaatctatctttgctctcgatattctctttttaattgcaaaccttattttgtcctcgtactcgataagcgagcgtggactccttaagtttaaatcaaagtatctgttattaacagacttaagttcaaattttatcttatacttctcacatatatattcgcttgaaccatatgaggtcatactctttaacatagtctcactccttatgcatacattataccatctattaataaaaatatatatagaatatgacaaattcttcatatttataatctttatctttgatataatagatgcaaggagtgattagatgtcatttgatggaattgtaactagagccttgactgatgagttcaacactaagtacatcggtgcaagggtcgataagatatatcaaactgaaaaagatgaaataatgattaatatgaggagcaaagatggtgctttcaaagtgctaattagcgcatcgagtaataacccgcgcttctatgtaagtaaggtcactaaagagaacccaagcgaagcacctttattctctatgatacttagaaagaacctatctggttcaaaactacttcgtgttgagcagttcggcttcgatagagctgtaagctttatcttcaaaggctacaatgattttcatgaagaagctctctactacctcgttgttgagatcatgggtaagtactcgaacatcatactattaaacgaagaccacaagatcatcgatgctataaagagggtctctacccttatgtctagagagcgtgagatagaaccttctcttatatatgaaaggccgcctgtctttgatagactatcgccaatggatgtggatgaagatttgcttaaagatatgataagtaagaagcttgacgaagaggtaaaagactttttaatgaagtcctttcttggactaagtaccgagatagtaaataagatactcttcgatgcagctctagatgagagctacctacttaagaacttagatgataaagccatagataaactagcaaaggctttcaccaatacctttgacaaactaagtgcaaatgattacagcttcaatatatataagcttagtgaaagaaagagcgtctacaacgccatctgtctagatcaatacgcctcggttgataaagaaagctttgatagtataagcgagcttctcgataagtattactatgaaaaggatcaaaaggacagaataactcagcgctcacaaaatatgaggcacactataagcgctaatcttaagagagcaaaaaataaattgcaaaagcaaaaagaagagatgcttgagagtgcaaacagagaagcatacaaggtatacgctgacctcatctcttcaaacatacacaagattactaaaggccttaaagagattactcttgagaacttctacgacaatatgaatgagctagtagtgccacttgatcaaaagttatccagtgtgcaaaacgcacaaaggtactacaagagatatcaaaaaatgaagcaaagagaaatagtcttagagaagcaaatcgaaaacactgaagatgagattaagtatcttgagcttgtaacagatgcgatagagaggactgaggatgtaaagaaccttgatgagatatactttgagcttgttaagaatggctacatcaaaaaagataagaagattaaaaataagccaaaaaaaatcgccatacattcgattgattatgacgatactagtaaagtgtactatggcaagaacaacttgcaaaacgaatacatcaccttcaaggtcgctgacaaaaatgatgtatggatgcacgtcaagggcttccctggctcgcacgtcgtaatcaagtgtgacggctaccctagtgatgatctattagtcttcgcagcaaaaattgccgcaaaaaattcaaaagccaaagactctaacaaggttgatgttgacttcacaacgaggaagaatgttaagaaacaccctagtggtaagacaggcctcgttaactatgtgaacttcaaaaccatcactgtagatctttagctttatataaattcgttttgatgagtgcctctttaaaatatgctggcacatcactctcaacacttattaaattgtttgatattggatggacgaaacttacttttctgcaatgtaagatatgtccgtccatttttattttgccacggtagccataagtcttgtcaccaagcacgggatgattaaggtatgaaaggtgcactctgatctgatgcgttcttcctgtcttgataaggactcttaagtatgagtactcatcattttgtttaagtaaatggatttcggagtgtgcctctttgccttcatcagatacgcacatctttatcttctttatcgggtcacgcataatgcccttatcaactacagtcaactcacccttaaatgtgcccacggctatggtgatgtactctttgtatatctctcttgacttaaagagctccttcatcttttcatgcacttcgttgttctttgcaatgatgatcaggccgctcgtgtccttgtcaagcctgtggactatgcctggccttgtttcgtcaatatcgcttagtgaagcaaatctatatagcaaaaaatttactaaacttatctcgtcatcattagtcggatgaactataagtcccctcggcttatcaattacagctatgtcatcatcctcgtacagaacttttatatccataggggtcttttcaaagcgcctcgactctttctctataagttctatctcgtcacccgcatttaacttataagaagctttcacagactcgccattaagttttacatagccttcttcaataagcttcttatacaatgacctcgtcttagaagcatcatagcttgccaaaaatgcatctagcctttgagatgcatcagaatccattactttaattactcttctttgcatttttatctttaatctttaaataaaagtaatatccgataaataagacaatgattacgcacatgtagctatcagctaagttgaagcatgggtactggtatgaaccaaacttaaaggatataaagtcgataacgtaacctctaaaaactctgtcaatgaaattgccaagtatacctgctaggaaaaacgataagaataccttctcatacatagcaagcgtattaaactctgtaataaatatatataaaattatcgctatggcaatgaaggttactacgtagaagaagatgtgtttaccttgcataatgccaaaggctgcacctctgttctcaacataatcaaacgaaaaaaagtttggaattatttcgtatgcagttctgccttctaagtatagctttgcaaaatactttgttatttgatctagtgcaactgctagtactactattaataaataaatcatgtaacacctactttataattttaatgatcagcttagctttgtccttcttgctaagtccaaggtagtctcctattataaacctgccgcgccttcttaatgagactaggtcgcctacgtttactgcctcgcttatcttgtaagttactttgtagttaagttttacaagacctgcttctatggcactcttcgcatcgcttcttgatagattataaacatttgcaagaactaagtctagtcttaatgaagcacaagtgattagcttctcttcatactcaagttctctactgatttttgattttaagtcaatcacttcaagcgctacaccatagttcttaatcttctcaaggttgagtagtacatagtctaaaatctcgttcttaatgtagaagtatatagcatcatcctttataatgatgtctccaagcttttctcttcttatacctaaggataatatagatccaagcacgtctttgtgcgctatctcgtagtccttcttatctatcttgacaaggcttatatactcagaagcctctggctcgtccatgtaatcaggataaattaaaatagccttactttcagaatcttcattcccaataaggctaaaacttatagtatcatacgtatttattagtgagacaagttctttcacttcaaaagggttgtagaagtccgtgcactcgatagacttatttttcgaaacaatatcacaaatatctataacccttcttgcaatgtctttgttctcactactaatatgatctaaattttttgacttattcattaaaatggaaacatgcctctgcttttaagttcgtcttttaagccatctatagcaacgttctttggtgctaatacaaagatgtctcttgtaactttttgtatgcttccatcgatagcgtagataccgccattgataaagtcaaaaatttgtcttttaacactagcttctagttgttcaaagttaacaacaaccgccttgccttgtcttaagtcatcaataataagtggtgcttcgtcatagccaagtggctcttgcacagtgataatcatagagctagtctttctttgaataggaacaacattttccttttctttctttcttgagaagatagatgcttccttttgtggctcttcttctactgcttcgtcctcatcttcgtaatcgtattcttcatcgtaatcgtcatcgccgaatcctaagaaatactttactttgtccataaaacccataataaacctcctaataatttctttcgccaaatatctttgagccgatcctcaatatatttgatccttcttgtattgcaattttataatcatgtgacatacccatggataggtatttcaagtcaacattgtcatagttattttttgctagtttctcttttagttcataaagacctctaaaagtatctctaacgactttttcatcatcagtgaatggtgccatagtcatgaagcctacaatatgtatgtttttatactcgtgcatcttctctaaggcttcagctacttcatctttgtagaaaccactctttgattcttctttagaaatatttacttgtaaaagtccatctagcttcatatcattgttttttaatctcttgtcaagtgcttcaataaggtcaaggctatcaagcgagtgaattaattttatcttgcctagtagcttattaatcttgttcttttgaagacttcctatcatgtgaaattcgaagtcgtctttcaaggcttcatacttttcttctatctcttgaactttgttctcaccaatctcgttaagattaaattctttaatctctttaatccttgctacatcaacagtctttgttaccgctaataactttacttcatctttctttcttcctgctaagtcaatctctttatcgatagactctaaaagatcaattaaattctcttttacactcatcatagtatgtcaccctcctttacagtcgacggaaataccacaacttcgtcataatattttatgctcttaaaacttaaattcttgtaattcatattgcccttatcgtcagttctcataacataaatgttgtccctatcactgccgactaaaagcacttttttatatcttatagtgttgtcaatgtcttttatgaatacacccttttcgctgcctctgtcaattaaagcactctttggtagtttgaacgtcttatactcgtcaaatatgatttccatctttgaaaatctgtctttatatagctccgatatcctctctctgatattcaaaagcagcttataagtcttagccgccttttctttctttagaacccttgcatatgtctttgttcctgttaagtcccactcgataagcactacatcattcacttcgacattatcaagcttttcattatcagaaaaggctagtatgttcattgaaaaattatctagtatcttaaagttttgattgtttttacctttgtttaagctgtaattcttgctgtcatcaattaagtccttctcttgcaaagcatcgaagttattgctagtatatttatcttccaagccatcaataaagtagcttactatgcctgacatcgataccttgattgaaggagcgtcgctcttcttactttctttaagagcctctctcatctctaaaagcttatcaatggagtaatttttaatactctcgtagtaagcatcttcttcatcatcgtcgctttctaagatttgtgataggtcttcataccttttttgatttatgcttatctgcaaggccttaatctttgccattatgattttttcatcaacattgtcttcgtcgctaacatcataatcaagatcttctaatcttttatttatggcatcaatctttttatcaataatatcgttagcacttcttgttacgcttaagttctcaagacctcttttaaccttttcgccttctttagccttagttagaaagtaagaattcctacctgcttgatacacttcttcagtcttaataagcgctgaattcattgcaactgagttgtagaaaacttcctcaacaggtgtttgcgtaacaatctttttcttaaagaaagatgtgattatggtgttaaatgcaactattatgaatataaaagctaccaaaactcctaaaaatctcgagaagcctttgccgttcttcttatctatcttcatacttttctatctcgtgtttaagcggtctacccataagctcagcaacaacgctgtctagcgggtaatcttcatataaaagtttatacatcatatcaactatcggcatctctacagagtatttttccttaagcatgtaagttgacttagtagtctttataccttcaacaaccatgccaaccttttctatagcaccttctgtagatagtccctcgccaatatatacaccgcaagttttatttcttgagtgcttacttgtacaagttacgactaggtcgcctatgccagctagtccatagaaagtcgatgccttcgctcctagagctatgcctaattttgtaatctcgtgtatacctcttgtgataagtgcggccttagtgttgtcgccatagcccttgccttcgcaaatgccgcttcctaaagcgatgatattcttagtcgcgccagcaagctcaacaccaagtaggtcatcattaacataaacccttaagttgtcattagagaatatgtcttgaataaactcagcatcattaaccgatttagatgcactaacaatagttgtcggtataccaattgcaacttcttctgcatgcgatggtccagatagtgaaacaaatcttgcctttggattaaattcatagaaaacctcgctcatagtcttaagcgaatcaatctctatacccttgctaacattgacaaaaattttatcttcatcaatgtacttatctatagtctttaaaacatttctaagctcttgactaggtactgcaagtacaactacatctgcatctttaacagcttgttctatatcgttaagcaaaattatattctcaggaagttctacccccttcaagtacttattgtttattcgagtttcttttattaaattataagagtccttatttctaatatattgatataagttttctcctctttttgctagatgtatagctaaggctgttccaaagctacctccaccaattactgaaattctcaaaactatgcctcacttttacttttaaatatataaaatttattttcctcgcctttagttaatctcttaatattcttagaatgtcttagtatgccaacgaaagcaacaataaaacttatgattacggctaaattaagctctttgaagcttataagtgtatatatgaaaaagcctaaaaacataagtatcgatgctaaagaaacatactttgtaagcaaaactactaaaaacataagcacaactacaactaatccaagcttgtagtccatcgcaatgattgcgcccacagtagtagaaacgcccttacccgcattgaagtttaagtaaaaaggaaagttatgtcccaatacaacaccaactagtgcgatgtactgtgcataagaaacatcaaaatatctagctacaagcacagctaaaacgccttttaatatatccaaaaacagtgttataagaccaagctttgcaccaaatactctgaacatattagtcgctccagcattcttgcttccgtaatctcttatgtccttcatcctaaatatctttccaaaaatataagaatttgatatagagccaataaggtaagtaagaataaatagtaagatctccttcattactcgctcctgttcttgtaatttatgattatagatgttccttcaaatggataaacatttcttatttgattttccaaaaatcttgtatatgaaaaatgtgttagttctttatcatttacaaatattgtaaactctggcggtctagttccagattgcgttgcgtaaagtatcttaagcctcttgcctttatcagaaggcggttggtttataagagttgcattcgaaattatatcgtttaataaacctgtcgataatctgtagctatatgcttcattaatctccataatcttatctataagctcgtcaactctcttgccagtaagtgctgatatgaaaagtatcggtgcatatgacaagaacggcaagttatttctaagactatctgagaaagtcttcatagtttttgaatctttttcaactatatcccacttgtttacacagatgatgatggccttgccttgattgtgagcgtaaccaactaccttagagtcttgctctgtaaagccttcaagagcgtctatcaaaaatacgcatacatcagctctatcaacactagataaggttcttacttgcgagtaagcttcgacggacgagtcaactctagattttttcctaagtcctgctgtatcaataaacataaactcttgtccttttatgtttatatatgagtctatagcatctcttgttgtgcctgcgatatcagttactatgactctctcctcgccaagtattctattagttaatgatgactttccaacatttggcttaccgataaaggcaaccttgataagtccttccttctctgcgaagtctctatcttgaggaagattttttactatctcatctagtaagtctcctaagccaagtccttgctcagcagatatagacataggttcacctaaagcaagctcatagacatcataaaagttgtcttttcttttgccttcagtcttatttgcgactaatattacttttttatttgattttcttaatatatttgcaatttcaaggtcaagtgctgtggcagggtctctaccatcaacaacaaaaagtatcaagtcagacgcttcgatagcaatgtttgcttgctttctaatgtttgacatgatcttgtcatcatcaaaggggtctagtccaccagtgtcaatgatgtcaaagacgtgttgttgccaacttgcctcggagtatatcctgtctcttgtaacgccaggtgtgtcttcagtgatagatattcttctaccaacaatcttattaaataaagttgatttaccaacatttggtttgcctactatactaacaacagctctattcatatcgacacctccttatcctaattattataacataaagacttttagttttcaacactttaatagctattgcaagatatatttctcatataaaagaaaacgcattatatattactcataacaaacatcattagtgacttatcatatgtagtgaggcgtgtaagacctcactcactgctactcataattcacacgccacccgcttagtaaggataccttttgttcttatgctttgaaagatatacatagctcaataaaaaaaaagaagcgaaagatctctctcgcttcttatatagtctttattcttttgtttagaatataccttcgtacatagggaatctcttgcagatatcagatactctttgtctaattttctttctgtcgatagatgtatcaaatgtatctctaaagatttctgcaacttctctcatttcgtcttctttgaatcctctagttgttaaagctggagtaccaattctgataccgcttgtaacgaatggagattcagtttcgttaggaattgtgttcttgttaacagcaataccgatttcaccaagcatagcttctgcttctttaccagtgaagcctttcttcttaacgtcgattaagattaggtggttatctgtaccgcctgaaattaatctgaagccatatttgtcaagttccttagcaagtacttgtgcgtttgctaagatttgcttgcaatagtctttgaattctggttttaatgcttcgccaaatgcaactgccttagctgctataacgtgcattaatggaccaccttggattcctgggaagatagccttgtctagcttcttagcattttcttccctgcaaaggattgctcctcctcttggtcctcttagtgtcttatgagttgttgttgtaacaaagtctgcataaggtactggtgatggatgtagatcagttgctactagaccagcgatgtgtgccatatctaccataagcatagcgccaacttcatcagcgatttctctgaacttcttgaagtcgataattcttggataagcacttgcacctgctactattagctttggtttttcttttagagctatctctctaagagtatcataatttataacttctgtcttagagtcaacaccgtaagcagcaaagtcaaagaatgatcctgaaatgttaactggcgaaccgtgtgttaagtgaccgccttcgctaaggttcatacctaatactttgtcaccaggctttaagattgagaagtaaacaccgatattagcattagctcctgagtgtggttgaacgtttgcatgttctgccttgaatagcttacatagtctgtctcttgcaatgttttctgcgatgtctacaacttcgcatccgccataatatctttttccaggataaccttcagcgtacttgttagtaagttcgcttcccattgcttccataacagcttttgaaacatagttttcagatgctatcatttcaaagtgatcttgttgtctgtcatgttctttttcgatgacatcaaaaatctctttgtctgtcttttttagattgtcaaaatccatgttaattcctcccttaaaataaaattaatttaatttgtttatgattaataaatcattatcccctttagaatattttttgtcatatgccttaactatgactaaagatattaatagtaggactacacctattattatactataaaagtcttgaactttaaagcttaatttgctaaaaatatagtttgaaacaaaaattcctaataaaaatgcaagtaaaggtactaaatataccatcattacacctctaagcatttttcttgaatcaacttttattgataccaagtcgccaacgttgtagtttgctctcggcttcgctttaattatatgctcctttgactcgcagcctgctgcacatgactcgcaagagccgcatgctgagtctctcttcatagatataagcatctgaccattctcaattttaattactctaccaatgctttcattttcttccatctaataggtctctaacgagcttcgatgcgattaataaaccgccactcgccgttacaaaggatatcgaccctgtcaccaccttaccatcatccttcagttttttctctataggtagttcttttgaataaactacatttatcttcttttgtacgctcttgtcaatcttttgtcttaactttcttgctaatggacacacgcttgtcttgtctaaagttgatatctcaagctttgttggatcaagtttgttaccgcatcccattgcacttatgacttttatcttcttttcaatgcatgtctcgattagctcaattttattttttagcatgtcgatagcatcgactacatagtcgtaatctctatcaaatatctcatcattaatttctttcgaataaattttgtctatgcaccttatgtcaagttcatcgtttatcttcagaagcctctgtctcataacatcgactttcttcttgccgattgtatcatcaagagctaagatttgtctattgatatttgattcactcactgtgtcatagtcaactatggtgatgtgctctataccaaagcgaactaaagactctagtgtgaatgaaccgacgcctcctatgccaactattaaaacatttatatctttaaaactattaaatacttcgtctcctaatacaacgcgtgtcctaatcgttcttttgggcttcatctagatcaacctttatagatacttcgtgtagctgcttgtcatcaacttcgcttggtgcgcctgtcaataggtctgttgctgattgtgtcttagggaaggctataacgtctttgatgttttcgtgctttgtaagtaattgaacgaatctgtcaagtccataagctatacctccatgaggtggagctccgtacttgaaggcctcgatgaagaaaccaaattgttcctcagccctttctttagtaaagccaagtgccttgaacatcttttcttgtagctcggagttattgattcttatactgcctccaccaatctcttcgccattgataactatgtcatatgcttttgccttaacagtatcttttctttcttcgatatatggtatgtcttcaatctttggatgtgtgaatggatggtgcatagccatgtatcttccttcttcttcactatattcaaatagtgggaagtctgttatccaaagtagttcaaacttgtctggatcgtttaaattaagttctctagctacttcatttcttaagttgccaagtgtcttcttaacaacagattttttatctgcaacaaataaaattaagtcattgttcttaatatccatctctttaataagagcttctttttcttcatcagtaaagaattttgctatagggcctgtaaattcattttctacatacttaacccaagcaagtccctttgctccaaatgtctttgcaaagtcttctagcttagtgatatcttttctagtaaacttttcttggtagccattaatattgatagcgttaaccatattaccagcatctacagtatctttgaacaccttaaagccactgtttttaaatatgctgcttacatcgtgaatcaaaaagccaaatcttaagtctggtttatccacaccgtacttatccatagcttcatcaaatggcattcttcttaaaggaagcttgatatctatatccaaaatctctttgaatatatgagcaataagctgttcattgattgacataacatcgtcttcatcaacgaagctcatttcgatatcgacttgtgtaaactctggttgcctattggctctaaggtcttcgtctctgaagcacttagtgatttgatagtatctatccatgcctgataccattagtaattgcttaaataattgtggagattgtggaagtgcaaagaactttccagggttaactctacttggaacgatatagtctcttgctccttctggagttgacttgccaagtataggtgtctctatctcaataaatctgtgatcatttaaaaagtctctaaatgctttgtaaattttcgctcttgtcataagagtcttttgcatgaatggctttcttaagtctaagaatctgtacttaagtctcatttgctcacctacattgtcatcgtcttttacgtagataggtggagtttgagctgtgtcaagtatctttagctcatcagctaacacttcgatatctcctgtagctatgtgagggttcttttgtgatctctctctaaccttacctctaacagcgataacgtactcgcccttaagtcccttcgccttctcaaagacatccttagagattgtctcatcaaaaacgacttgagatataccacttatatctcttatatcaacgaagataagttgtcctaggtttctttgagtttgcacccaacccatcagcacaacttctctttcaatgtctttcattcttagttcgccagagtagtcactcctgcgtaagtttcccattgtttccataaatatcctcccaatattacaatatatctttattataaacactgtttatatacaatgcaatgtccttataattaaatttacgccttagctcagcgacttcaatgtacttcgatacagcacccgcaccgaaggcgtatatgcttgtaaggtcgttcatcgaaattatattatatatagatgccttgtctttaagtgcgaaggcgacattctcaaggttagagtttgtcatcttctgcctgtacatatagtacggctcgtaagagctatcataaagcaaggtgtaaatttcttttgataagtcaatattttctaatctaaactgctccttagtaatgacagagcgtcttttaagtgccagattatgtatagtaatcgactctggcctcatcgctataagcttttttactgagtcaatataatcaagctttccctctccttcaaggcctataataaggtccatgttgatgtcgaagtcatacactcttgcaagctcgtatgtcttataaagctcttcaatatttgctcttctgtgaaccctcttaagcgtttgttcattcatagtctgcgggttaatacatatccttgtaactccatactcatctaaaatatctagcaaagatgcgtccatagtgtcagctctgccacactcaaaggtaagttctttgaacttataattttcttttatgtattttaagagtctttctatgctatcgtgatcaagggcagatggagtccctccgcctatgtatatgctgtcaggctcggatatatctcttctcttactctccatactcatctcatagatcacggcttctacatactttgcatagtcgtagttcttctttgtgatatcgtttgtgtagaacgaacaatatgagcagatgcctttgcaaaatggtatgtgtagatacaagctgtactttggcttaaaagatagagcctgattcttgtaagttctctctaaaagttcaaacttttcatccgagataaaaaacttttctttgaaagcctccttatcatcagacctcgcatatagctttagtggcttaattcctgtaagtatgccccaaggtagacttatgtcttctttcaaaaactccttatatatcagggtcttcatctcgttattactaagtccatcaaatgaagtaaaaattctttcacttccatctatagaaaagcgtatgccgctttctaaaatctcataactaatgccatctctaatgttttgaagctcccaaaagagctcttttattacctttatactagcttctcttagcatttatgtaaggattgtttgccctttcttcttcagaacttgtattcatactatgtcccggatatattatatgattaccttctatcgccaaaactttattaaccgagtcaataagttcagcttcgtcgccgccataaagatcgcttctaccaactgagtggaaaaatatagtatcgcctacgaataaatcatcaccgatttgataagtaaggccgccctttgtatgtccaggagtctttataacattaacaactacgtctccaaattgcataggaccttctttgtcgatagtgtggtctatatttataggctcgtctatatagtttctcatcttatcgttaagcataaagtctgttctttgagtcatctcataatcatcttttgaaaggtagctaggggcgctgcttaattctcttaaggcgtttactcctagaacatgatcaaagtgaccatgtgttaagagtatcgcttttaaatttaatttatgctcttgcatatatgcatataagtcgtctgcattgccgcctacgtcaataattaccgcatcaccactgtcgctgctgacaatgtatgaattagagccataaactccaacatttttcttaaaaatattcatttaaaactccttctttgaatctaataatatagttaccggtccagatagatgtgcgtgtatgtgcatatctgctccaaagactcccgatttaaaatttatcccgcctatctttaatttctctttaaacatttcataatagctttcagccttctctgcctttgcgctcttcataaagttaggtctgttgccttttctagcgtcaccatatagtgtgaactgcgaaacaagaagtatctcaccgtcaatgtcttgcaccgatagattcatcttgtcttcttcgtcagagaaaattctcatattagtaacttttttaaaaatatattcaagatcagcatctgtatcgtcatcttcaacagcaatgtagacaagcaagccgccctgtatttcgcttataagcttgtcatctacttccaggcgagtctcttttactctttgtacaaccgctctcatctctatgccctgtagacatctagaacgccgttgatggtcttaagtttttgcatcatcttatctagttcttcccttcccgaaacttcaaatgttaaatatataaatatatcgcttatagtgttgctctttgcacttaaggattgtataccaatgcctgcttcctttgccatggctgtgatttcagaaagtataccagttctgtcaaccgctctgatggttacattagcaaggaatttttcactcgctgcaacatcccactcagcttccaggcatctgtccgagtcaagtaagttagcaatgtttgtgcagtcctttctgtgtatagaaacaccgtagcctcttgttacgaagccaatgatttcgtcgccaggaactgggttacagcacttagcaaactttatcttcatgccttcaagtccgtctatcctaactcctgttgcatccttctttgatgaagagctctttaagtagtcgtcctcgttcttagttaggccgatattttcaattgcattctttatatttattattttatttataacaagcttttctttaaaattgccatagccaatagacgcaaataaatcactaatcgagtttatcgaaagctcttttgcaagcttatggtaaattttttcgttgtccaatatatttaagtctaagccaagcttcttagcttctctttcaaatagttccttacccttctcgatgctgatgtccttttctttagacttgaaccattgctttatcttctgccttgctcttgggctctttacaaactttagccagtccctacttggtcctgttgatgacttttgtgtgatgatctcgactatattgccattcttaagcttatagttaagtggaactatccttgagtcaaccttagcaccaacgcatgtgttacctacacctgtgtgcactctataagcaaagtcaactggtgtcgagccttctggtaggtcaacaacatcgccgttaggtgtgaatacgaagacctcatcatcaaagaagtcaatcttaagagtatcgataaactcttttggatcctttaagtccttttgccactctaataattgtcttaaccagtcaagcttattgtcaacatctttgccttgtgccttgccgcccttatacttccaatgcgcagcaataccaaactcagcaacttcgtgcatctcatatgttcttatctgaatctcaaatatctctccagtgtcagagattacagttgtatgtaaggactgatacatatttggcttaggcatggctatgtagtctttaaatcttcctggaagcggcttccacatcgagtggactatacctaagacagcgtagcaatccttaaccgtgtctaccaatatcctcacagctataaggtcatatatgctctcaaagctcttgctcttgcccttcatcttcttatatatactgtagaagttcttaggcctgccgcttatgtcgtagtgaagctcttgcttatcaagttcaagggatatcctctttataatctcattaatctctttctcgcgctccgatctcttcttgttaatcttctcaaccaagtcgtagtagccttctgggtcaaggtatctaagagataagtcctcaagctcccacttaatcttgaatattccgagtcttccagcaagtggtgcgtatatctctatagtctccttagccttttgctttctcttctcttcattcatatactcaagcgtacgaaggttgtgaagtctgtcggcaagcttaactatgatgactcttatgtcgttattcatagcaagaatcatctttcttaagttctcagcttggaaagcctccgagctcttataatttaacttgtttaatttagttacaccatcgacaatgtttgcgatgtcttctgtaaataaatttttaacatcatcataagttgcaggcgtatcttcaacaacatcatgaagcaaagccgatatgatggtttcaacgtccatatctaggtcagctagtatgatagctacattgacagggtgaataatataaggctctccagactttctcttttgatccttatgcatctcgcttgcatattcataagccttcataacaaaagcaatctcgtcctttgtcatgtacttttcaataattttaattaaatcttctatcataagctcacctcctaaacctaaagtgctttatatttatatcaaggctcttagtgcccatatattcattaacttgaagattgtagcaaatatccataattatctctttgccatcagctaaatctctgttaatgtcagattcatattgatctaagtagtctttcttaaactcatcttccttgtagaatagtatagctgttatcagattgtcaagctttgttctaaaccttagctttataacgttgcggttctgtccaaatacattaatacttttcaaaacaagatctttatctgcaaataaaacttcaggattcttctcaccgaatggctttagcttctctatgctgtcataagttgaaaatttttgaaaatcaactggataaagtgcatcaatatataccttctcgaccttgtcatcgtcagttagattggaatttttattcatgaaatcaacaaaggcatcataattttcaacttttaactccaagcccgccgctagcttatggcctccaaacttatttaagtactccttggccttgcttagctcatcaaaaaggttgtactcctctatagatcttgcagaaccatacagaataccgtcttcttcatatagggctatcgcaggtctgtagtacctttccttaagccttccagcgacaatacctgcaacacttctctcaagatttttcgattttacaactataagatccttagcatcaaaattttcatccgcttcaatcgcctttatagcctcgtcgtagccaagctctgttaagtcctttctctcctgattaagtgcatatagctccttgcagatatctataatcttgtcgtcatcataagactcaaaagctgcaattgcgtgattggcattgcttagtctgcctatagcgttgaccgatggtcctaagataaagccgatgtgaaaaacatttatatctttatcaatttttagctcgctctttagatgagaaaaaaccttagatggtcttttattcataagctccaagcccctctttaagaggtctcggttctcatcaagaagcggcatgatgtcagttatagttgcaaaggctgcatactgaattatctcatctataaggtctggatcaaattcataatccttgctaatgtatgtgatcagcttaaaggcaacgaatgctccacaaatctctgtgaatggataagtagacttttccaccttaggatcaattatcgcatcagcgtctaccttaatttccttaccatcttctatctttggtaaatggtggtcagtaacaataacttttatgccttgctcctttgcatactctatagcctcaaaagccgatacaccattgtcacaagtaattattagcttaaccttgtcattaagacaattatcaactatacgcttatttataccgtagccatccgcctttctgtccggcacttcaaaacttgcatcagcaccaaagtacttaagagctcttaaaagtattgtgcaggacataatgccatccgagtcatagtcgcctacaatgcgtatcctcttttgattttttatagcgtcccctataagctcacgtgctaagtccatgtcaggcaagccttcagtgcggtaaatctttgtgtagtcatcatttaagtagtcgatgacatcatcagtttcaacgacccctctgttacaaagaactttcgctaataaatcatccttaactacgctcttaacatctgcatatttatctgcatttctattttttataaaccatttttgcatacaataaccccattatctatatttatttattatatcacaaagcgctgtatattaaaagccttttttataaagaatatcaatatagcatagctcaatttcaagtcttaggaggagctctctatatacctttcttactatatagtaagacgcctcgcatatagtagcagccttgctatatagtgggaggctcttgatatgttgaaactaaagtgtcatatagctgcaaaagagcataagaaaaggtctagatgtgatctagacccttcgtaataagactgccgttttaaattttatataaacttttttataattcataaacttcatcagctacttcatttaaaaattctatgtcgtgtgagactataaaaattattttatccatagctttgtattttttaatcagttcagatattttttccatattggtataatccataccgctagttggttcatcatagtaaacaaaagtcgagtctttacacataactgacgctattgcaagtctttgcttttgtcctcccgataaactcatcgggtgcctttcaataaattcgtctaagcctaaatcttttaaaatgatttttgccttttcctcgtcaaaattctttacacctagactaagctctttgaatacttcatctgtgaataattgatggttcacatcttgcataacaagtgaagagtttttgagtctttcttttttagataatttctcgcctttaaaataaatttcttcttttgattttttctcaagaccaattaagcatcttaagagcgttgactttcctcgtccattggatcctattatgccataaattttgccaagcttaaatgagatgtcctttacacttaaacgctcatcatcagtaaatttgtagctaagattttttatctgatactctccaccgccttttagataaggaacttctaatttacttaattctttatctcttaagcttaaagcgttcaaatcatttttgtctagctttaaaaattcacttctagtataagtttttttaattttgcccttatctattaaaaatacacggtcaactatatccatcaaataataaattctatgctcagctacaattatgcttatgcccttttcttttagtatctttagcatctttgtcaaaacacttatgcttttaatgtccaaatttgatgatggctcatccataactatgatctttgtgcctgctatataagaagcagcaatgcaaagtatttgtttttcaccgccagatagattaaatatatttctgttcaatagattttttatcgggaaaatttctagcatctcattcaaacgcctgtccatctcttctcttgcaagaccaatattttctaaataaaacaataattctaatgtcgtatttatattaaagaaatatgtcttaggattttgaaaaacagttgagacaagcattgagatttgataaagctccaaatcttttatatttttaccatcaataattatttcgccctttgtctttgcgttatcatatcttacagctagtccgtttatagaatttattaaagatgacttaccgcttccgctttttcctgtaaatagcacgcactctccctcggctatggatagtgatatatcatctattatatgttctttgccataatcaaggcttaaattttttatttctaccatattaagcctcccacaataagtccagcaaccgccaaaacataaacaaagtcaattagctgtacctttacacgagtatatctagtcttggcaattgggttttctattgcctttgtttccgccgcttttgcaatgtcatctgcaatgtttgaagatataattagtagtggcactgagacatattcaagatatttgattggatttttaaaatttatacctcttaccttcatagccatcttaatgtttttcttctcttctttgaaagatgggaagaacctaaacatgaccgcaacaggtatagaaagattttttgaaattttgagcttatccatagatgaaattattgcacctacatcagaggtctttaccatgaagcttgccgccataaatggcaataaaaacattctaaagataataaatagacttaaaaacatcttaagtattggatttaattcagataacaccataaaatttggtaacgaataaagtattccacataaaactatccatttaaaaagtgtttttttgtatccattcaaataaaataaaataccaataatacaaacaattgctagctcgaaacatatgtttaagctatgcacaacagttaggcctgtaagaaatacgactaataacttacttattgggttgagattaaaggaagaattcgaagaaaagttaggcattatacaatgcctgctttttcaaagtgtttcttcaatagagccttgcctatatatgctccaattattcctcctaggaaagcacctaaggctactaaagccatgtgaggatatgttattagattttccaatgcatcagtataatcttttcccatcatcatcaaagacatctccatatatttttcttttgctaaaagcatttgcattaaagagctacatatccatgtgctgaagattgcataagaaagcatattgtatttaaaggaattgtaattaccaatctttctaattaattctgctattgtcattactataagtgataagactgcaagtacataagtatgtcccatagcaaacatcacaagcggtgatatcatacctagaataaataatgcccatggtttttgaaccttagccataaataacataactacagttcctgcaactatggctaaaactgttgggtaaactaaaaacaatattgggatcattcccatcataccaacaccaaacatcaagacgaaataaattacggcaaaaacaccgatacttactaaatcttttacttttaattttttatcatccattttagtcctcctaataaataaattcttctgccatttttgtttttttctttattttatttttaattttttacattcatatttgaaagagccttggcttgcattgctaaacctaccattatcatagtaaaatctacaactggttctgcccaccaaacagcccctgctccaaatattcttggcaatataagtaaagctggaacaagtagtattaactgtcttagcattacaatcattccagctttttttccatccccaatcgcttgaaaaaaagtgattgtcataatcataattccataaagaataaatactgaatagaacattctgaaattattaactccgcttgaaattatatcctgacttactttaaataaaccaagtaactgttttgaaaatacttgtgctggtaaccaaaaaattgctgcaagtactgttcctcctatagaaaatatattcatagtttcctttactctatcgtattgttttgctccaaagtttgtaccaataatcggctgtaacccctgactcattccccaaattggtataaatgagaatccataaaatctcaaagttgccgacattaatattgcatttggatctcctccatatctaaaagcttgtctataaagcaatgtttgttgaaccatgaaaaatacttgcatgatcatagctgatactcctactccaaacatttcctttgatatatctttttctttttttatttttcctatttttacattttcacttttactcttaaaataataaagagtaataactgcttgaattatttgtgctgttacagttgctatagctgctccctcaatggcataatcgcccattgctttcattagtattggatcaagaactatattgataaaggcaccgagtcccatgatactcattgctcttttcataagcccttcaccacgcataaccatattggctgactgggtaaagtttacaaaaattgagcctagaaatattattcttaaatatcttatacctaatgcctttatttctcctgttgctccaattaaatctaaaaaatatggtcctagaagtattcctcctattgttatgatcgttgaaaaaaatataatccaatagataagatttcccataagcttgtctatagtattattatcaccctttcccatggctcttgataaaattgatgccgaacctatccctataagcgttgcaatcccattattaaaaaaggtaagtggcatagctattgagcaagccgccatagcattctcaccaattatttgtccagcaaatattccatccataagtgggtatagacctataaccaccatgccaattactgctggtatagataattgaaacattaaagacaatggcttcttggtcaataactgttctttcatgttttgtttcatttttaatttcttcaatatataaactcttctgccatttttgttttttctattaaattcttgtaaacttttgatttttgtaaaagctcttcatgcttgccttcactttctaattttccgttttcaagaactacaatcttgtctgcattttctatggatttcattctgtgtgaaatgatgacaacagttttatctttaattaaattatttaaagactcttgaatttttttctcattgtcaacatcaaggcttgctgctatctcgtctaagatcaatatcggtgcatcttttaagaaggctctggctattgataacctctgtctttctccgcctgatagttcagcaccgttttcaccaataactgtatcgaaacccttatccattttttctataaaatctgtgcaatttgcaagttttgctgctcttttaacttcttcgtcacttgcatcttgctttccgatcctaatattttccataatgctttgattaaatagaactacatcttggaaaacaatagacaccttatcaaaaagggattctgttgatatttcttttatatctttgccatcgattaagatttgtccctcgtcgtaatcataaagtcttgatataagtttcaatatagttgttttgccacagccacttgctcctactaaagcagttacctctccctgcttagctttaaagcttacaccatttaaaacttttgtgtctttattgtaggcaaattcaacatcttttagatcaatatcaaattttttcaaattatagtcatcgccttcttgtaaatcttgattttgaatttcttttaatctttcaattttaggcgataaataaaatatctccatcattccctctttagatgcatcaagagcgtcttttatcttcatagccgctagtaaatatcctataaggtagagagcacttatttctttattaataattagatttacgccaacaaatatcacaacagcaagggaaataaagctaaaaattgatgaaagtgacataattaaaataagtcctatctctgtctttaagtgcactttttcacttttatccattttttcatatagcttatctttcatttcctctgataagccataggctttgatctccatttgcatctcgatattttcttgaaagctttctgagttttctcttaagacgtcataatatcttttttgtcccttaacctgatgttttttagatagtggtataaatataaaacttaatatagttggaataattacagctaaacccatctttacattgctaactaacatcatgatggatataagtggaaagaagagtgccataccgcccacttttggtatcgagtggctcattgcatgctctataccttcaatatcagacataattgtttgcgctaagtctgaaatatcatgcttagaaaagtaagatagaggtagttttgataaattctccgctgtccttattcttaagtccgcactttcttgatatgttgtgctatataatttatcgtattcgatagaaagcaaaatatacattgctatcaaggtcaaaactgagaatactatataaaatcccttgcttttaacaatattttccaaaacttcctgagcaaaaatcattagtaatatcgctggaagcatgtttatacaataaacgaaaaatgaagccagtgttgctttacttaaatttcttgctcctttatctgtaagagcaaatctttttttataaaactccttcatttgaaaccctccattcattcgcactgttaaagagctcttgcaatctcttatactttgtatcgcttgacattaattctttgtcagaacctctttctataattttcccgctatccatcacaagtatttcatcaaggtctttaattgttgaaagcctatgagcaatcatgataactgttttatccttcatcagatttttaaaagctttttgcaattcaaactcgttatctgggtcaatagacgccgatgcctcatccataataataattttggaatcctttaaaattgctctagcaattgcaatcctttgtttttctccaccggataaataaactccttttgagcctatgactgtattttctctttctgggaatttgtctaatatcaaatcgcatcctgctaattttaaggctctcataacgtcatctttgcctgcatctttattagctaaagcgacgttatcataaatacttttcttgaataatttcgaatcttgaaatacaaaggaaatggctttaattaaggcttcgtcagaatattcacttattggaatcccgcctatctttatacttccttcattaacattgtaaaaacctgatataagttttgctactgttgatttgcctgatccagatgaaccgactagtgcataggactttccttcttctaatttaaaggataaattttcaatgacagctttgtcgttataagcaaagcttaccttgtcaaattctatattgtagtttttaaaattattgacattgccatggaccaatttatctttttgcatatcattgtaaagtgcctctaaagtatctactgcataattgccttgagtaatatacatagcataccacattatcctcataaatgaaacaaagagaactcctgataagaataaaatcatgataagctcaagtaaaatcaccttggcgctgcctaagctagtcataaaataaactataggaataattaaaattgcaattaaaccaaaaaataaccattgatacaaaacataaggttttttacaagatagcgaataatcataagcatactttgaataatcttttatcgccttgtaaaagcttttaaatgactctacatttgctctaaatatctttactacttgcatacctctaacgtattcaacagtctctgcacttagtttagatagagcttcttggtatatcttcataaattcttgctctcccatcattgcacctaaaagtaagccatcgattatggtaagagcaagcaaagttatgccaactcttatacttactataaagccgagtgcaagtacaagtacgggtgtaactattgcctgagaactatcgggaatcatgtgagctacaacctgatgagtttgcgcggcgttgtcatctatgatctttcttatttgaccagatggatttaagtcaaagaacctaaaacttgctttctctaagccgtctatccccctttttcttaaatttgtttcaagcctaaaacctagtatgtgagaacatgttcctgaaacagaataaaatattgctccacttgttagtgtgatgacagattttaacgctatgctctctgcgccagataaatttgaattaattattaaattatccagaaatttgtagattaaataaaatccatataccgtaagtacagcagatatagcagaaaagactatagctaaaaaaccaagatattttttatcctgtacataagcaaatagttttttgtaaatcttcataatattatctcctttctttgatattccttttagataaaaagttttttgctagcaaacattatccttgcttttttattatacatcaggtataattattaatgcaatagccgcggctaactaaggctattagggatattgtctaaaagggataggtgtattatgacttattatgattttgtaaaagattatatgaaggtggatgaatgcaaatacaataaaaagtattcaagtgcaggacacactttttgttggaataaagaggactcaacttatggagaaggcctgttttggttttatgaaggagacggcttcattattaatatacatgatttttatatcaaagaagaactaattcaaaatagcacatatagtatggcagattatgtatcaatttactcaagctacatagtcagtgcaaacggagaaaaatttagtccttatcaaactttgaccgcaaactctttatgcacttttgattttgataatataagagatgactttctatttttattgcacgagaattcatattatctttctgtttctataggctttaaaagagaacttttggaaaaccacctagcatctattaacatagatacagaatcattttattcatctttacttcaaccgaatcaaataattcttacaaaggccttggaaaaagttgcaatggaaatattgaattgtaaaatggccgcacccgccgctgattttttctttaaagccaaagcaaatgaatggataagcattgtaatagatacctacctaaatagaaaaaattataaaattgaaattgatgatgataaagcgcttgaagatgtcgctagatttttagaagatcatttcgcaacgaatgtaaatcaaagtacgcttgaaaaaatatctaaaatgagcgggaccaaattaaaaaatctattcaaagagaaatatggtcaaagcattacagaatatactcaaagaaaaagaatgaatgtggctgaaacacttctactaaacacagggctgcctataaaagagatagcagagtccgttggatacacatcggcaagtaaattctccatatattacaagagatacaaaggaaaacttcctagtgaagtgcgtaattcagctttcaatcagcaaaacttaaaatgtgatcactgtgaataataaagaattcatgtaaaagaaaaggtctagatataatctagacctttcttgatgaggtttctacgcaaaatttcacgcgcctgacatgaaaaagagcttccacaattggaagctcaatataattatttaattactcttcttgctgcaacgaatcttggtaagtaataacctgagtcgatgtctgaaataacaacgctcataagttgtccgcttgatgcgtgtaccatcttgccatcgccaatgtatatacctgcatgtgatatgcccttgccgtttgtgttaaataaaagtatatctccaggtaataagttttctctctctacagcaactccgcatgatacaagtgctgctgatgatcttgcaatgtttgtaccaagtacagttttgtaacaatagtaaaccaagcctgagcagtcgaagctgtctggtccacttgatccaaatagataaggtttaccgatttgtgcttttgcaaattcaataagtccttgaacatcagaacgtccagagtagcttgatctatcgatatttactacttcggctttcacttctgagaaagaaatgtcgttcttgtgtgctttgaacttgttattgccatcgcttagagtgaagaagtttccatcgtaatcaacaatgcttaccttgtcactcttctttagtactaatgaatttgctccagactttagtgtcttgttaaccttagaataagcgtcagtgctgttttccactttaacgttctctaaatcattaatgttaacaaagccgattctctttcttgaatctacaaagattgaaccatcagcattagtacttagtagttcaactgtctctccaggtaataaatagtcaaatgggtctacaccctttgatgtagatatgcctgtgaaagaaactactttgtacatcttagtatctttttgagttacgattaaagaatctttgctaagtctcatatctttgccagcttttctaactatgtatgagttactatcttcatttattatgtttacaatttctttttctgctagttttacattgtcaatgccaacgaaaggtttaagcataacaccatagtctttaaatccaatcactgagatcagaaataaagataataataagacataaggtctatgtttaatattcttcatcgtattacctcccttaggtactagttattttataataaattgcaaaaaaaatcaagagaaatgtcgaatttcccttgattataaaataaattatttaattttatcttaattttcatactttagtagtatgttatttttcttccttcttaactatttctttagtatcaatttcttttttaattcttgatataaagtcatctagtgacacttttccttgatcacctaagtctctgtgtctaatagttactgtcttagtattaacttcttcctcacctattattaacatgtattcaactttttctacttgtgcttctcttatcttcttgccaatcttttcatttctatcgtcaagtactactctgtagcctttagattttagttcatcgtaaacggattttgcatagtcgttaaacttttctgatattgataaaatcttaacttgtactggcgcaagccataatgggaacttgccgataaattgttcgataagtatgcctaagaatctctctaatgagccaaataaagctctgtgaagcataactggtctcttcttttcgccgttttcagcaatgtaagttaagtcaaagttaattggcatttggaagtcaagttgaatagtaccgcattgccatgttctgcctatagcgtcttctaagtggaagtcaatctttggtccgtagaaagcaccatcgccttcgtttatagtgtatttaatacctctcttctcaagtgatgactttagtgccgcctcagccatgttccaagtttctatctcgcccataaagtcgtcaggtcttgtagatagttcaactgtgtatttaaaaccgaatgtgctgtataggtagtcagcaaggtctatcattttaaatacttcatcttcaacttgtgatggcaagcagtatacatgcgcgtcgtcttgagtaaatgttcttactctgaatagtccgtgtaaagtaccagaaagttcgtgtctgtgtacttgaccaaactcagaaagtcttattggaagctctttgtatgagtgttgactgtttgcataaactatagttgagcctgggcagttcatcggtttgatagcgtagtccttgtcatctatctttgtgaagtacatattttctttgtagtgatcccagtggccacttctgtgccataggtcttcgtttaagatgataggtgttaatatttcaccataaccattcttagataaaacagctctccaccaagaaagaagttcgtttctaactaccataccgtttggatggaagaatgggaagcctggtccttcatcatgcatgctgaatagatccatttccttaccaatctttctgtggtctctaagctttgcttcttcaagtcttgctaagtgctcatcaagcatcttcttcttagggaaagatactgcgtagattctttgaagcatttcgttgtgctcgtcacctctccaatatgcacctgcgattgataatagtttaaatgctttaatctttgagatgtcataaaggtgtggtcccttacataagtcaacgaagtcacctaatctatagaatgaaatgtgtgcatcttctggaaggtcttcgattagttcaaccttgtacttttctccaagcttcttaaagtgctcaattgcttcgtctctaggcatttcatatctttcaagaactccgccctctttaactatagcagtcatttctttttctatcttttcaaaatcttcaggaacaaatctatgttctgtatcgaagtcgtagtagaaaccatcatcaatagatggtcctatagcgaacttaacgtccttgtataatctttgtattgcgtaagccataaggtgggcagatgtatgccaaaatatagccttgccttccttatcttcaaacttaacaaattttactttactgtcttcttctagcgtttcttgtaaacccattgttgtgccattaacaacagcccctaatacatctcttaataaaacttcagatatgtccttgcacacatcataaagcttaacacccttatcatactctctactagagccatcaggtagtgttacaataatctttgacatttttacctcctataaatatcattgatggtgaaataaaaaaagcccaccatcccccaagggacgatgagaccgtggttccaccctaattacttctttttaaagctataacgtgcttaactccgtgattcctttcggatccgattcaaggttagtcttcatataagtgcttatagggaaatcacagccagcatcccctctctgaataagcttaagtatactactcttcctctcattatctttgattattaaactgaatatatagtatcacaaagacttagctttgtcaagaattttttggcgcatctaaaaggaatcgaaccttcgacctgccgatccggagtcggctgctctatccactgagctatagatgccgatagtttcttaatcatgtttatggtattgacactaacatgattattcaatggactagtaagcaagtgattttatgtataaaaaaaagaagtgcgaacacttcttttggtgcgggaaagaggacttgaacccccacgtcgttgacactagatcctaagtctagcgcgtctgccaattccgccactcccgcatattggtgatccatccgcgactcgaacgcgggacaccctgattaaaagtcaggtgctctggccggctgagctaatggaccaaattaaaagaattatggggtggataatgagattcgaactcatgacctccagagccacaatctggcgccctaaccaactaggctatacccaccatatctctggaattaagattgcttaccttcggccaaagtacctaagctatctcaataactaccttgccattataacaaatataagacgcaatgtcaagacctttttcaaaaattctcaactttttttatttaatttcttatacttgctaataagtaagcctctatctcatcaagcacttgttaattataactctattatgtgcatttgtcaagtgcttttttaaaaattctttatattttttattctcgtttaaattaattttgataaaacaataaaataccctctaagcaattttagagggcatatcaacatattaacttttctttttaagtcttccaaggttcttttgattgtataagaacagtatcactgctgaaagcagtattaggaagatacctatatactctataggttctatcttgtctttaaaaattatgaagcctagtatcgctgagaatataactgaagtgtagttatatatacttacctctcctgctggtgcatgtaggtaggctagtgttaataggtattgacctaatccaccgaagactcctataagtaatagccatagccaatctataggaagcggtcttttatatgttaagacaagtggaacgaataagcagatgcatgtgacgaaaccaaaggctagcataattctatatgggttctcagtttttccaagcgaaccgattatggtataggcacctgctgcaaagactgcagagaatatacctgacaaggctggtattaggttgtagttacctgacgggtttgttacgaagtacgcacctaagaaggcaacgactaatgacataagatgaaatcttgttagcttttcatttaagaatattgcagcaaagatcattacaaagaagggtgagctcttttgtaagatcgctgcgttggctgtcggcaagttctttgttgcgtagaaatacataactgctccgaacaagcctaaaaagcctctaaaaaataaagctactctgtgttctttaataggaactagcttttctttatgctttttaagcattataatgctgaatattgataacaagaagtttctaaaaactacttgtaagaatatacttacaccttctgatgtaagcttgacagctatctgcattagcgaaaatgctagtgcagacgctatcatacacaatataccttttgttttatcactcattacttatatataacctccactacttctttagaaaggtccaagctgccgtcgtcttttaattttatactaaagtcgatagctttgtcaccattctttacagtgaatgtaaacttatcaagatctgcgtctgatatagcaagcttaagtccaaatttcttgcctaagttgaatgattcaccatcagattctgagtctttcgccttaactataaactcagttttgtcttctttagggaagattagatactcttttgcgtcatcgttttcgctaagtaataattcctttacgttgtacgctgcaaacaaatcttctttgtcgttattgtttgtaacgtttgctatgccaataagctcatcatctttgaagtcgtcaaagtatttaatatttactttgtccttcatatcgctagagtctttctcagcttcgtccttgtcttctttcttctcttcagaagcatccttcgcttcagtcttttttccttcactagcttcctctactttatcacttgcatcgctgtttgttttaggtgcacatgccaatgttaatagtgagattgctagtaaagctgcaataattatctttttcataataacctccatatctttacatctaattgtcattatacacttcttaaaaataattgtcaacaaagtatagatgaagataagtctctagcattaattttgcaaataaaaaattctccgattgctcagagaatttcttttcttatttaatcatcctatttaattatccttactactttagtcgcgtcgtcccaataaacttctgcgccaagcatctcggcgatgaatctaagtggtgtatatgttctgtcgttttctattaagacaggagagtctagttcgtaaacagtgccattaacaagagccttattcgaacctatagtaagcttgatctcaagtggcatcattgttttaaggttaaggccttttatataaacagttctctctgtatcattccatgtaactttagctccaaggctttcagctacaaatctcgccggcaacatagttctgttgtttttgatgataggtgctgtgtcgttagtgacatttttgccaaagacagtcataagcttactgcctactgctaagacaatgcttctttctttaagacttgtatccttattgatagtctcttcatcttctctatatagattagcatcttcttcaatgtctgcaattcgattatgccttttgcttttacgctcatatatcctgtgatacttagtatcattttcgtaattgtcatatgagtctggacttggtgttggatgcaatggtggatttggtgttggttctggatctggtgcttcttcaacagtaacttgtaattctacaagcttatctacatagttctttgatttgtatatagccttgaattctttttcgcctatttcgtttagctcttgatcaggatttttccatacaaagccctcaggtaatgctacagttgataattttttaccctttgtaccctttaaatctgtaggcttcttgctttcataagttgggtctgtatctgtagatttctttatctcccatttaatttttatatcattttttgtataatcttctaattgtatgccatctatagtcaacatacatcgccatatataatcattatttactttaaatacagctgtataaatacctgcatctgtcgctttattattttctactgtatatccattatcgctctcataagcagtttgttctcttccattgtaaactaagctctttccttcattgactactcctgtgcgtgcaagaccatcttttgcatttggtctgctagcgactttaagtacctttttttcattaaaaaatatgtcaaaacttgtaccatcaacacgcttaatagaataagcttttgttggtgttatatattctccatttatcttaagctttgtgttgccagtgacacaatagttttttgatttgcataatattttcagattgtatctgtactcgtaattaggcattgcttccactggataatcatatatagttgtccattcaccaccatttgttctatgctgaatatatactatatcaactgataatatgtccgcatgattttcagctataaatatacgattataaggtcctgaaggtcttggaatttttttccatggaattaaatcatagtggtcactcataaaatttttataatcttcattatcgcatgtaaaacttacctctttaagctcaacaggttcaccagctgcgtacacactagtatctacacccataaacaaaatgctacttactaacaaaagtgctaaaacaaaacagaattttcttttataattcatcgctctacctcctatgtacctatgccttcattatagttaatgacgcatcatatgtcaacagtattctaaggctttacacgcataaagacaaaaaaactgctaaggctcttttaccttagcagctatactgatatctaatcaagcattcttagtactgtaactaaaacttcctgtctcgtcatattcttctttggattaaacttaaggctactgtcgccttgtaagagtcccttcttgataacactgtctatcgcgctttttgcccactcacttgcatcggcataacccactttgttctcaaatttgtcttctaatttgattatgcttgctagtctgtccaagatcactgcgacctcttcccttgtaatctttctatccggtgcaaatgttttgctctcgttatacgttaagagctttatcttgtacgccttcttaactgcagtggactttgtatcaatgacctcttcgccttcgtagtccttaatgctctttttgtactcaagtgccttaataagcgcctctacgaactctagtctgcttgcatcagccttcatatcctctctcatagtctctgttactataccaagactgtcagctctatgtatggcgtcagctgcccacgcatcgtagttctttacgctaagcgtagcattgaatgtgattgtattagagaactcactcttttgtgcattaactatggccctgattcttacatcaaaactcatcgagtatttgatctcttccttaaacttgtactcatacatacgagtctttgtattgtaagtaagagttataagattatcaaagtcctcgctaagccatttaccatcatcaatcttgtaatcaagttctagattttcaaattgtctatggtcttcaatttgaacttcgattttattattttcaaactttgctaaatttatgcttataggactaatgctttctgctttattaacatttaaaggcgcaagacatataagcatcgctaaaataattaaaacaattgtctttttcattagaatattgctatagggttacttgctatatacattctcaagaagtaaataagtagtaagtgaactggatagaatgcatagaagaagtatttaaaacccttccccctttctccattgtaaaagtacataagtacaaaggcactcatctgatagaagaagccatagaagtaacgtgtcgatattcctactaaaaggttttggaacttattaaatctcacaaagtacataaggactatcaagataacgccaaacatatcatagtctgtttttaaaaacttcgctgcaaagatgcaaagaagtactccagctatccttattaatggctgattagcaaacttttctatgatgataagtgctgctaggcctaagaataatgtgaagaaaacgttttgatagtttggatcaaagactacgttcgagcttactaagtcgaatggcacttctgatataagcgcaaagataaacagtcttagtgcgtacttcattctgtttcttgtatgtataaagccttgcactataaagaagcagaagagtggaaaggcgattctacctatcactatcctaccaataaagtgaattttatccatcattgcgcctgttacatatgaaccggctatggtgatatttgccgcattgattatgttttggtacaaacccacttcgaagatgccatataccaagtggtcaacaagcatcgaaagtatggctatgaacttaagctgtgtttgattaagtccccaaacttttttctcttctaataattttgtttctgtttccattttactctccataatttaatttgtttatgataggaaagccatctactacttcaatctcgcatatccttgcgttctctactttgaaattgtagtaagcttcaagcttgtccactactattgataagattgtcttgataaaaccttcatgcgttatgacaacaatgtcctcattaagtttggccttctctttgtaaaagtcctctgcacgctctcttagatctgtgaatgattcgccgccaggaaacttaaatgtgaaaggctcttcaaagcgcttcttcgtctcttctggataaagtttttctaactcttcgaagctatgtccttgaaagtcaccaaggtctatctctctaaccctctcatctacttcataagtctcaacaccaagtaagtctgctgtctcttgtgctctcaataagttagagactatgacttttttatctttaagctctttatactcatctcttaaagtcttaacctgtgccttaccatttgctgatagcttagtatcaacacgcgatgtgatcttctttaaattgtcttctgactctccatgtcttattagataaaatttcatattaccccctctagattatgaataaagcgatagtctcagcgagttctatggatgctcccatagtgtcacctgtcgctccgtctatcttcttaagtgaaatgatgtaaataattataaagataagcgcctctactaataagtataaaagcactttgtaatcataaagtatgcttgcaattataattacaaagtttgcaaagtttataagaaaggtgcttctactctctttaaatgttttaaacaaggtgctactgtccgcgcttttaaagtagataaaggcattcatggctatcaactttgagtatataaatacgaatgtatagtcccacttgaaaccttgcaatgcaatctctttaaaagcaaaaaactttgctgctaggactatgactatgcttatgacgccaaagctgccaacgcctgggtccttcattatggccttcatcctgtccttgcttctgttcgataaaaaagcatcagctgtgtcggataagccgtccatatgtagtgcgcctgttatgattaaataaaaaatgatgtttaatagagcgactagctctgcagaaattttatcacgtaaaaaaatgcttggaataaacgtaaataaagcaattaaaaaaccaataagcggaaagaaagtaagcatagccccaatattcttcttattgaagtctatgcctatatttattggaactcttgtcataaattgtaaagctagtataagtcctttcactttatcttcactcctatggatgcgatgacatagtaaacttcatccgcgattctagcaatgtattgattaatcttgccgtgtatgtctctaaagagcctcgatagttttgcttctggcacaagacctgcacctagctctgaggagactataattatgtctgcatccttttctcttagtcttttgaataaggtttcaagctctttaagcactaactcttcgactacggcagcatcttcatctctaatgtccctatcttccaagtaatcaaagagtatgtttgtaagcatatttgttacatcatcaagaaagtaatatttagtcttcatggcaatgcacgcaaaatctttataagcttctactgttttccactgagtattgcgccttgctttatgaattgcaatcctttcttcaaactctttgtcaatggctttagcagtggcaatgtatgttacatcgtcaaggcctttatatatgtcctcggcgaactcgctcttgccacttctcgctccacccattacaagcttaatcattgtctttattcatttctttttcaagattagcaatgtattcttctgctttcttttgattgtactctctaaacttattgacgatgtagtcgtatccctttggtctatgaggtagtaaacagtttgagcagtcttttatacctgcactcatcttgtagttgccgccgcactcttccattagataaagtgggcagtagcagaacaagcagttgaagtcgtcgacattgtcaaccttatggcatggcatgtaggcacacttcttgttattaaaaaatctataagaatcttccataatttgcctccacataattaattacttcgtctatgctgtgcatagcgttctcttcttctcttgtaattataacacaaataatatttgtttgtaaacatgcatcaagtttggcatcggtgccaccgaccttgccactctctttgcttactaagtactttatatcgtagcgtttaatcaaggctacgttttcttcgagtgtgaagggtcccatctgcgcaatgatgttcttcatctctatgtgattgtcatcgcacacctttatgctctcagcacttggcaagactctgtatatgaatctgttcttgcccctcaccttttcaaaatcctttatcctgttcgagcctgttgtgaataaaaaattttcctctctatcctttagcgtgtcaatatacttaaaggctgcttcatatgatggcactctgactatgttgttcttctcttcatagtccaaaattcttcttgcataacgaaggtaggctatgcccatctccttagctgcctctgatgcgttctttgtcacctcaactgcgaatggatgtgaagcgtctatgatcatatcaatgccgtgctcctttatgaagtccttgaagccgtctttattcatcctgcccatgattaagtccttcgatgcatagagcttctttccgctctcagtagcaacagataagtagagttcgtacttacccttaagtctttcgtatatctcttcgccttcgcttgtgccgcctatgattagtatcatagcttgtatcctctaggcgtaatgaacttgccgtccttgatgtagctttgactgttgccaactatgacagtcgtgttcatctcgcaaaaatcataatccacctcgtcaagtgtacttagcctgtagtccatgccatcacgtaaggcattcttaaccatggcaacaggtgtctgcgcatctctatactctctaattatatcaagtgcttcttttaaattgttcactctcttcttgctctttggattgtaaagcgcgataaccatatcagcgtctgcgcagtttcttaccctcttaagtataaggtcccagtctgttagtaggtctgaaagacttataagagctgtgtcatgcattagaggcgcaccaacaacgcttgctgatgaaaaagcagcgctcactccaggtacaacttcaatgtttattgtcggatcaatttcataaacaaggcctgccataccatatagtcctgagtcacctgttgagatgatggcaactgtcttgcccttattgtactcatcaatagcaagctgacatctttccttttcgcctgtcatgccggtcttaattatctccttgccaccgatgaagtcctctacatagtcaaggtactttgtatacgcaacgattgtttgcgcttctttgatcgcgtctaccgccttaaacgtcatattctcttttgagccgggtcctatgcccacaacatataatttattcattctatatctcctctgttattgaaaatgttattgaatcgataatcttcttagttaatataatcttgccgccaagtagtttagcagccgcctcactaactgcgtatgcacctgtgattttcttaacgaagtcggacttctccgaaacatccacctcattgagttcgtctgccgtataaaaaattagctctctatcatattttttgcaaagctcaagcagcgcctcttcgtccttctttatatcaattgatccaaagcgttttatcgcctttggacttatattcatatccttaagcacttcatgaaaggcttcttcaagcacatctaagtgagttccacgtctcaagccaatgcccatattgtactttttctttataatgtagagagtcttttcattgtcttgtgcttcgtagtcttcgctttgaattatgaagtagtctgctttgcttttatcacttgtgaaattatcatagttaaagttaaaatcatttgcctttagataaatttttttattatttactatggcacccataattatggtaagagcttctctagagctatacgcaaagtcattgtcccttaggtaaatgtcaagagcttcgaggcctctgttgtctgaggctgtagttataactggctctgcacctatagtcttagctatatctatagctagctcattggctccgcctatgtgacccgacaaaagcgatataacgtgtcttgccctgtcatctataacaaggactgcagggtctgtgtacttgtcctttatcaagggagcaatcttacgcacggctatgccgctcgcacttatgaagatgatggtctcaagtgaagaccacctttcttctaagactttgtcaatatttttatccttataaaaaatttctacatcaaaatcctctgctatggacttagctatagcaagaccagcttcagtgtaggtgattataatcttattcatgtgcttttctgtactcagtcgagaagcttgggtcgtaaagtttgcttctttcgtaacgcgcgttaataaatttaccaacaagtataagtgcgtgcttagtaatattgtgctccttggcatctttaacaaggtttgcgatattagtataaatgattttttcgtcagcccatgttgccttataagcaataactacaggcgtatttggatcttcatagccctcaagtagcgcctcttgtaccttctctgtaagtgatgccgaaagatatatcgccatagatgtcttatgtttagcaagctcagcaagcttttcagtctcaggaacctttgttcttccttccatacgagtgatgattaaagtttgactaacttcaggtagtgtaaattctttctctatcctagcgcatgcagctgttgcactagttacacctggtattacttcgtacttgtagccaagcatgtcaagcgcatctatctgctctttaattgctccatatatgcttgggtcgcctgtatgtagtctaactgtgtttagacccgcctcttcagcctttataaactcttctataacctcttctaatgtcatctttgctgagtcaaaaacctttgctcctgtctttattccagatagtatatccttcgatactaaggagcctgcatatataattacatctgctgcgtttaataattttagtcccttaactgtaattaaatcactgtccccaggacctgcgcctacaaaactaatcattcttttcacctctcacaataatcaccggattctcagctatcatcatctctagcttctccgccttagaaacatttaccatgtatgtgtctatgttcttataatttttcttctttagtaaatctttaaactcataagcattgtcaaagatgataaagctcgcaataactgtaaaattattatgctcatcaagcttatccataatgctctctaaatttttaccagaaccgcctatgtagaccttattaaagtccactccgtccatgccctcaggtgccttgcccttaatgagcttaacattattaagtccaaatttttcaaaatttttctttgctacagctatggcctcgtcatctctttcgatagtagtgacctctttacaaatgactgccatctgacaagtgacacttcctgtgcctgtgcctatctctaaaactttgtcatcttcgcttacgtctaataagctcactattgcatttctctttatgaacttcgtcattggtacttcgcccctgatgaagtcctcatctttaaaccacttcatttataataatcaccaccgataaactattttctatatcaatgtcatcgtcttcaccataagttttaattacttcaccgctttgcgataaatttgtgccaacgatgtactttctctttatgtttttctcgtccaaatactttttaattgtccttggattattatccttgtcgcatagaactacaagcttggcattgttcattacaatggtcttgaagtcgtcatcaagctctctaccatgtagcgaataagtctttgcctcattccaattcacaagggtcttgctcattaagtattgaaaagccgttatagatggaatcacttcgtcaatggctatgccctcacgctttagatagtcaactgcgccgtagaaggatgggtcgcctgataataataaaacgccttctttaatatcttttagatccttcacagagacttcttctatgcgagcgaattcgtcctcgagctcttccttaactcttttaaacgcataaactttagtagcatttttaatcgctttatatgccctcacgctcatatattcacttttgcctggtcctactccaacaactattaacaatctaatactcctttttcaaacgaatatacttttacatctacatcaagcgagtcatcttttaggtaagtcttgactctctttgcacagccttcctccatagcacataaaacatctttgtagcctgcatcataaaggtagttgtagcacttctcagctgttataaattcatcaacttctttaattacttcatacggcttattcatcatcgcaaggtaatacacgaaggcctccatacgcgtatcggcgttctttgaatgcgtgttaaagacacctatcgataactttgcaaacttgcctatgtgaccaataagagtcatctttctaaaaccgatttcgtaagccatctttagtgagtcgccaatgtagttactagttaaaacgacattttcatttataccaatactctttgcttctttaaggccgtgactacccggtgtaagaactatctccttcgcacccttatcaagataaagagtttttatctccaagtttatggtctttagtaaagcgtcctcactcataggcttgacaagacctgttgatccaattattgatatgccgccttctataccaatgtttgggttgaaagtcttcttaccgatttcaacacccataggcgtaaatatagtaacgtcggctcccttatctgttaagagctcaacctctttagtaatcatctctcttggcaccttgtttatcgcatactcacccttcttaccgaagatggagtcattagtataaatgccaacgcctacgccacctttgataatgaccttgccgtcatttcttaaagatactttagagaaaatctctatgccattggtctggtctgggtcatcacctgcgtcctttataactgagcttatggcatatccatcacccttctcattagaattgatggcgacgtttatgcactccttgcaaggcagtactatgtcgtattcacctataggtccatctaaaaggtttgtaagcgctgcatgtgttgcaactgctgcacaagtgcctgtcgtataaccatatctaaggctcttgccatcaactatatcgtacttattcattttctgtataagatatataaaagtgcgttgattatggacgctgctacgtttgagccgcccttgttaccaactgtcgatatttgagcaattcctacttctctaagtgcttccttcgactcagctgctcctacgaagcctactggcacgccaataacagccttaggatgaattttttcttccttgatcagttctatgattctatatagagctgttggcgcattgcctactgagtagatggcgatgtcttcgcctatagtcttatctatggcttggtagcttcttgttgtgcctttttccttagcaagctcccttacgtcgtcgtccttgatgtgattaatgatctcacagttaagcttttttaagctagtttcattcacgcctgccatagtcatccttgtgtcagtataaatcttggcgccgttcttaagtgcatcaagtgcttcatcaaggaaattatttcttatatcgattatgtttttataatcaaagtcgcctgtcgagtgaatcattctcttcactataagcttttcagtatcagtaaattttgttcctacaagctccttgtcgattatgtccatacttgtgttttctatgttcatagggttgttatcgtaattatacatccttttcacctcttaaactatctatctttttataaaaatactcttcatcttgaacaaaggaaatgttttgctcgattgcaactatgttatcatctgcaaaagagcttgtccaagtgtcatctctatatggcttttctaccttaaataaattaaactcgttatcatttaagctgctcttatgaaattcttgtgaataaaaaattttatccgtatcaaagaaaaaattctttctaagtggctttagatatgcataaccaaagttatgaagcctcttttcgctcacagccttgccctttataagaccaagcatcttgtgctcattaaagctttctgctaagaagtatgttgcctctccttcggtaaatatctttcctccgtcttcataatatttctttatgcttgctaatgatttagatttttctattatgtctaagtgatcttttaaatttccactgccgatatataataagtcagcttcaggcacttcttcctcgtctagcaccgaaaagtacttcacagtaaaatatttttctagaaaatcaatattctctttgtaatagaagttaaataccttgtcataggcaattgccacagtagtctttgactttggaaaatctattttatctcctgtctttgccacttcgaaatattttaaaagtttctcaaaatcaattgccttttctaatttcgcagctatcctatcgagcttctcatcaaaagccttaatatcgcttggaagctctagtccaagatccttatcctctatgacaaagtcctcgtcaacttcgatattgccaaaaacttctaaaccaagttccttctcgactaagtctttgtatattgcataaagctttgcatgcgtcttattaaatataacgccaactatattatcagcgtagcacataaagccttttagctttgcaataagtgagaacatctcgccctttggtgtaagcactaaaactgtttttagtcccaaggcctttgcgttggcatatgacgatgcctccatggtgttatatatgccgtcaaggtagcccatgacgccttctaatacgcagtagtctgcacaccccatacctacttcagtagcgccactcttttgcataaagatgtcgacattaccatagtcccccttcgatgcaaatgagccaagctttgaatcgataaaatcgggcccactcttaagatacttcaccttattatttttatttgcaagcagtcttgctaaagctaaacttatagttgtcttgccgctatttgaattcatagcagctatgcatatgcctttcacttctctatctcccttagtttttcaagtaaataatcattctcttcacgagttcttattgcaaggcgcacatagtcgttacttatgttcttgtaaccttgcatccttcttattaatatacccttttcaagcataatcttatacatttcttcgtcactatgtttttttaatctaagcaaatagaaattggcatcgctatcactcatctcaaaattgtcatagctcttatatgcttctttaagtctttctctttcgtttttataatactcttttgtttttgctatatagtcctcgcttccctttaatagcctcgatgcttcgttttgtataaagcctatagaccaagcaaggcttagctcatcgtagtagtccttaaaatcctttggtacataggcaaagccaaagcgtactcccggtaaggcaaaggtcttagtcatcgctctaagaacaatcacgtcctcgtccttaaacaagtctatgctgtcatactcatgcatagtaaactctataaaggcctcatcgagtaaaagagtcgcgccatgctccttacaaatctcttgagctttaattaattcttccttcttaagcagccttccattaggattatttgggttagttagtataattaggtcgcccttctttaatatatcaagctcatcatagtcaatcataaagtctttataatttattctaatcaaatcttttttataaacacttgctctaagctcatactcatagaacgaagggtcaaaaataaccactctacttgccctgtatatcgccttatcaattatctctatagatccattgcccaagataatgttagacgcatcacaagccaaataagtggctacattgttaatcgcttccctctgttttatatcaggatagacattgacataatcaaagtcttccttaatattagagaaaagtatttcgttcatattaaatacattgatgttagagctgaaatctatgagttttttgtcataatcataaaaatttgctccgtgcataatttacttccttttctttaagtagaatagcgatatataatcgttatccttacgtatttcgtcctcatccgtaagatacatttcgtttggcatcgatatcctcttaaaatattctgcttcgtaagtatctttaagttctaaaacagcttccttgttaatggtgcccttaagtataacagctctgtcaggctttgctgccctaactagctctgtgttgtcacttatcacaagactctcgcccttttcaataagcggctctttattcattgcacttaatgctacaaaagatggcatgccattaataatatttatatttatcttcttatcaagtatctttgttaagttcataggtgtcgagaaaactgctgcatcacctatagttacaaagcttacgtctctatactctttaagcgcttcttcaagttttgcctttagctccctatataaagcatctgtagcattcttcatgtcaaatggcatctttatgataggtttatcttctacatagctcataactgtgtcaagagcaagattgcggcctctattgtcaagaacgaagacagcatttgtatttttcaaagtaagtatagccttaacagttaataagtcttcatcgccaggaccaacaccaactatatttagtagcggctcttccatggccttaactttttctatgcagtcgtttaagatataatcttcttcgccaagacccttatctataagcttcacttcgtagccaagcttttctagtttcgactttattgagtcatcatcgtcaggagcaatgtcttcaagcatatgaacgcctgaaactagcatgaatggccttagatataaagtttttgtgtctttagctaaatttttaacaacgctatcaagatcaagatcaccctctatactcatcatgtgatatttattgttcttttctctaaaagcttcgtcaatatcttcatatatcctatcggctacatgataagtaccatgaccaacgtagatgaactcttcgccttcatttaatttaaaggctgtcatgccatcaataagctttgctatatccttagcgttactgataaatggagtagtaagtctgttagaaacatcttttagcttcttatactctttacctggaatgatgtttgtcgaaacgactcttatatcgttatatccagcctctttcaattccttgattgcttcgcactcattattaaaagacatgcctttcttctctagtatcttcttaactatcctagaagtaaagcatatctttatctcgcagtccttaaattcatttttaaagccactcacaaacttgtcaatgactctttcgtgttctctaagccttgttgtaccaaaaaagcttaatagtattgcctttttcataaattcctccattatatgtacacgagaggaaaagaaaaataggagaagcgcgccttttcctctcgtcggttttttggaaaataaaaatccttgaataggggtatcaaggatataaaacatacatatttagtaagtttttccttcccaccgaagaagtaactttatacgaacgttctaaagatatcctgacttatagatcaacctcatctaaaccttcccagtttcccagtggtatacatagactcgtcactatttacagtagcgggggctgtgctggacttacaccagcttccctttatggtgaacattcaaaaattacacatatatgatatcatatatgtgtaattatttcaagtgtattaataaatttttttattttaatattaattttaaatatataacagcgatcactaatactagcaaggctagtgccttatacatcgcttttatggtgaaataaacgccatttttatttacttcgccatctatgtcgccaatatatggtttatcgactatcttagaaaaatatttgtgcggtccacctaaacgaatttttaaaagtcccgctatgggcgcttcaaggaaggcactatttggacttgcgtgtgcatatctatacttaaaaaacgttttgcacgcgtaggcgatgtttttattgaagatgttagtaattaatataagaagcgcacttaatcttgctggcactagattgactaggtcatctatctttgctgcgaaaaagccaagatcgccatatttttcattcttgtagccccacatcgagtccatggtattgataaatttataaaccagtccaagtggtgtatatatcgcgatgtagataagcggtgctattacaccatctgaagtattttcggcgactgtctctatacatgccttaagtatctcttcttcacttagttcacttgtatcacggccaactatgtaggagagtctcttgcgtcctctctctagcgaatgcgctagctcttttactaccatatctgcttcgaagtgaagtgagcgtgctgcaaggcagacgtagaccatgtatgaagtgtagattagatacaaatatttattgatcttaaataatattattgcaaagcatccgaataaaaatgcaaggctaatgttgaataatactgagactagtccaagcagcttcaaaaaaccacctcttgcccctgtccttcgaattaatttttcttcaaagctaatgacattacccatgaccttaactggatgaaaaaagttatatgggtcgcctaagattaaatcaagcaccacacctataagtatggcgatgagcttataagccaagtattgcatttaatttatctatgtcgatggcttcttcaaatactttagctagcctatcgatttcattattcatcgcatcgtgctctgccatgtgagcattgacagccttctcataatcatgaagcgagtcttcgtccgctatctcaagctttgtatatggtactatgccaagacagtcaagacctgttagctcgtgaagctttttgatgccctcatcaagtaggctcgcatcgcccctaaatttattgatgatgtagccttttatcctcgctctatctttttcatcaagtatcatgtatgtgccgtagattgatgcaaagacgccgcccttgtcaatgtcagcgacgattattgcgttagtgtccgcaagttcagccatgccagtatttacaaaatcatcctcaagtagatttatctcagcaggtgagccagctccttctataatcatgacgtcatatttcttctcaagctcttcaaaaacctcttttaccttcgcctttagctctttcttaatcgagtaatactcctttgtattcatgtgcttgtatagtttgccaagtacataaacatcgctacctgtgtctgacgatggcactagaagtatcgggttcatgtactcatccgcctttatgcctgctgcgtaggcttgtatggcttgtgcattgctaataagttttccgtcttgaagcttaaatgagtttctcgacatattttgcgatttgaacggacataccttgtagcccttgtctttataatatctgcacatagcagtcgctatcgttgatttgcctgctgacgatgtcgtgccgtatatcattatctttgccatttaaaattcctcatcattgtattcgatagtacctaaatcagtttctatcgagattaaatttttcttccactctctatatttagtcacttcttcgcctatagccttaactaatattgaaacgccaaatattttcgaagctatgatgaagaaagcgttttgcttgtatgaatttggatacaaaactataagtaagcctgaaattataaatagcatgttcttcttctcaatgcccttgtacttaccattgtaataatctttaacaagatctaaaaagtcattgataagttcttggtactttgctaaatcagtgttcgttttgatggcttcgccgatgtcaccaatcttgttcatggcttcatccttgtcgaaattaccaatgttcatgtcttttaaaaaatcaaagttcatatctacactcccttttttaatacaaaataaaaattcgatcctttgccgtaactgctctctacgccaaactctgccttgtgaagtaaaagcacctcacgagcgatatataagccaaggcctgtcgcatactttttgagctcatggttcgcgctcgagatgtagtagcgatcccaaaccctctttatgtcctcttccttaatgccgactccgtggtcaataacctcgtatctaacagcattttcttcttctgtaatccttacaataacgtcttcatcctcatttgaatagttcagtgcgtttgataagtaattatatataacgcttctaatttttttctcatcagccataaccatggtatcgccgctcacgtctaatttaattctctctctattttcagctgtatttaatttatctataatctccttggaaatggcttcaagcgaaactctttttaattcaagttcaccaagggcgcttacgttctttgatgcttcaagcatctcgttaatcatgctgtttaatctatctgcctcattgatgatggtgtcaagattctcttcacgcttttctttattatcacccgttatgtccttaatcatctcagcataagacttaatcacgcttaaaggcgttttgaagtcatgcgatacattagcaatgatattctcacgaaagtccatagtcctctttaaatctgcatttgcgctctcgagactcttcttaagctcctcaatctcttcatagccgccttcttcttcaacagaaaagctctttgtacccaaaaatttggacgcttccgaaagatttttgattggcttagtaagcttctttgctaaaaaatatgataaaactagagccaaggctatcgcaacgagacttatgtataaaagctcttctctaagcatctttttaactgaaccatcttcatcaagattatcaataagcttcatgtataattttgcgttaactgtttcgtatctctttaaaaatactaagtactctctatcgtcatgcttcttgatatagtcaacgctatcttcattgcttttaacaaaatctaagtcttccttgtcaagctctagtaaataatttgggtacaagaccaaaccattctcatcaaaaataattatgccaagtctagtcttacttgatacatcattcaaaaactttactagatctcttccagtataagatgaaatttctttttctgtattttgaatgagctctctcttcttttgcgtgtatatttctttgaagaaaactatattaaatagccacattgttgatagtatcagtaccgtaaatattaaaaaataactgattagctttgtgaataatgatttatttttcatcttttttctccagcttgtagccataaccgcgaactgtacttataatgtctttttcagctcctagagagttcctaagcatcttgatgtgtgtgtcgactgttctattgtccccgaagaaatcgtagccccaaacattttcaagtatagtctcacgcgatagagctatgccttcgttttgagctagataagcaagtagctcatactcctttggtgtcaaatctaattttttctcatcaatataagcttctctcgcatcaaaatctatttttaagctgccattaatatatacttttgcctttgtatcgcttacatgtcttgcaagtatcgccttgaccctcgccatgacttcgcgcggactgaagggcttaacgacgtaatcatcgatacctatctcaaaaccataaagcttgtcatactcctcgccttttgcactaagaacaagaacaggtatgtcttttacatccttaatcctcttgtaagccgagaagccatcaagctttggcatcattatatctaagatgataaggtctatatcgttattattaactttgttaagtgcatcgatgccatccacagcctcgattacatcatagccgttaatgaccgagtactctttgagcacgtttcttatgttctcatcgtcatcagctataagtatagtcgccatatcatcacctctatcaatttttaccctttaataatctttttaaacagcatatatataaaagagccttgcgttaacaaggctcccgttcttattttaaactgtctaggtagtctctaagctcatctatatccaagatggctctttcattgttgccaagtataagagatggtatacctatacgaccctcatccttaactatatcaaactctttcatagtgtctcttgccgctaaaaattttttcatgttagcaagattttctgttatgtcaaggtacaagaagcgtacccctgattcctccatcaaagccttgaatggtccgcatcctggtcacataggacttccgaaaactatcttcttctgtattttattcatattaattctccttttttgatgtagtcatcttcattgtaatggtaatgtcaatttttgtcaagaaaaaagaaagatccatatagatctttctttataaactattttattactactgtaaaaattttgttcttaacatatatttccttaacgatgttcttgccttgctttgacttttcaaatagctcgtgtgcataaactttttcttttacttcgtcttcgcttgcatctctatcaatctcgattgtatatctaactttgccattgaattgaactggtatctctatagtcttgatgatggttttgtcttcatcaaagcttggccaagttgatttataaagttctgtatcgaagccaaccatctcatttatttcttctgttatatgtggtgcgattggataaagaagtgtgatatatgtcttaagctcttttcttgtgatgcttccctttgaagtaattttattaagtagctccataagtttagcaaccgctgtgttgaattttaagttttcaaagtcttctgagactttcttgatagtgatgtggaagtcttgttctaagtctttagaatagttttcgtcgtcgtttactatatccatcaagcgataaactctttcaaggaactttcttgagccttgtatacctgtctctgaccacatagcaactttttcgtagtcgcccataaacatttcaaaaactctaagtgtgtctgcaccatactcttcaacgatgtcatctgtatttattacgttgcctcttgacttactcatcttttctccgtcttgagcaagtaacataccatgtgatgttctcttttgatatggttcgcttgttggcactacgcctatgtcatataggaacttgttccagaatcttgagtatagtaagtgaagtgtagtgtgctccataccaccgttgtaccaatcaacaggcatccagtacttaagcgcgtccatggatgctggtgctgcagtgcactttggatcagtgtatcttaagaagtaccagcttgatcctgcccagttaggcatagtatctgtctctctcttagcagggccgccgcaatgaggacaagtagtattaacaaagctatctatcttagctagaggcgactcgcctgtatcagttggttcgtacgcttcaacatctggtaatgttaatggtaaatcctcttcattaagtggcacccaaccgcatttttcgcagtataccataggtataggttctccccaatacctttgtcttgagaatacccagtctcttagcttgtagtttgttttaacaacgccaacttttttatcttcaaaatatttaattatcttcttctttgcttcttcaactgaaaggccatttaagaagtctgagttaactaaagtgcctttttgcgtatcagtgtatgcttctttactaatgtcgccaccagagataacttccttaatctcttcgccaaaggcttttgcaaagtcatagtccctttggtcgtgaccaggtactgccatgatggcgcctgtaccataagtcattaatacgtagtctgatacgtagattgcaattttttctccattagcagggttaatggcagtaagtccatctatcttaacgcctgtcttttctttaacaagttctgttctttcaaagtcagactttaactttgccttattttgatattcatgaacttcgtcaatgtttttgatcttatccttatacttttctataagcggatgctctggtgagataaccatgtatgatacaccaaagatggtatctggtctagttgtataaacttttagcttgtcatcaagttcatctatgtcaaaatcaagctccataccgtggcttctgcctatccagttaacttgttgtgtcttaactctatcgataaaatcaactgtgtcaaggtcatctataagtctgtcggcatacttagttatagcaagcatccattgtgtcttaactctgtgttcaacagtgtgaccgcatctttcacagtggccttgaataacttcttcgtttgcaagaccaatcttacagcttgggcaccagttaatattcatttcctttttataagcaagaccttttttgaataattgtataaatatccattgagtccacttataatattctggatcagttgtgttaatctctctgtcccagtcgaaagatagtcctagtgatgttaattgatgcttgaagtgagcaacgtttctcttagtaacatcctttggattcatcttgtgcttgatggcataattttctgttggaagtccaaatgcgtcccagcccattgggtacaaaacgttgtagccttcaagtcttctctttctagcaactatgtcaagtgctgtgtaacttcttgggtgaccaacgtgtaggccctctcctgatggatatgggaactcaaccatcaaaaagtattttggcttgtctgaatcgttttctgcatgaaacgctttattgtcagcccaaatcttttgccacttgccttctacgtctttatgattatattctttcatcttgtcctcctagaattcacagtgatgaactgttcttgggaatggtaggacgtctctgatattttcaatacctgttatatacatgataagtctttcaaagccaagaccatatccagagtgaactactgagccatactttctaagatccatataccaagtgtatgaatccatgtcaagacccatctcattgattctcttttcaagctttgtatagtcttcttctctttgtgaaccgccaactatctctcctataccagggaccaagcagtccatagcagcaactgtcttgttatctgggttgagcttcatgtagaaggccttaatatcctttggatagtcagttacgaagataggctttttgaatacttgctcagttaaaaatctttcgtgttctgtttgtaggtccatgccccattcaactttaacatcgaacttttcttcatgctcttttagtatatctatagctcttgtataagtaactctttcaaagtctgagcttcttacgtggttaagtctatcgataagtcctttatcaacaaaattgttgcagaactcaagttcttcttttgcattttccattacatagttaataacgtacttaagcatagcctcagctacatccatgttttgattgttgtccataaatgccatctcaggctctatcatccagaactctgcagcatgtcttgttgtgttagagttttctgctctgaatgttggtccaaatgtatatatctttgagaatgctaaagcaaatgtttcaccttcaagttggcctgatactgttaagtgtgttggcttatcaaaaaagtctttgctgtaatcaacagcgccttcttctgttcttggtggattatcgatgtcaagtgtagttacttggaacatctcacctgcaccttcagcgtctgatgctgtaagtataggtgtgtgtacatatataaagtcttgttcattgaagaatttgtgtatagcaaaggctgctaatgatctaattctataagctgctctgaaaaggtttgctcttggtcttaagtgagctatgcttcttaagaattccatagagtgtcttttgttttgtagtggataatcagctgtagagtcgcctaagacttctatctcttctgctttgatttcaaaagcttgcttattgtttggtgtaagaactaccttaccctttactcttatggacgcgcttaaatatagctttgatactctttcaaagttttctaagctgttgtcataaacaacttgaacactgttaaagaatgaaccatcattaatttcgatgaagccaaattctttttgtgctcttaaatttcttatccaagcttgaatctcaactgttttaccatcaagctctttgtagctcttataaagttctctaatatccatgccctcactcctatttataatcttctactgtaatactttcgattacaacatcctctacaggtttatcattttcgttaacttttgactttgcaatctcatcaactacatccatgccttcgtaaacttcgccaaaaactgtatgtttgtagtctagccagaatgctccgcctatctttttataagcatcgacaacagcctttggataacctttttcttctcctgcttcttccatttgttttataaggtcatcttgaacagcttgaccttgcactataaagaattgtgatccgttagtgtttggtcctgcatttgccatgcaaagtgcacctctgaagtttctagtcttaatatcaaactcatcttcaaatgaaccaccccagatactttctccgccagtaccattgccgtttgggtctccaccttgaatcataaaaccgtttataactctatggaagattagattgtcataatacttatcttctgcgtgcttagtaaagttttcaaccgcctttggtgcaacatctggaagtagttttaccttgatgtctcccttattagtcttgatagttgccaccttgtctcctgctttagggttttgtagctgaactagttcagcatcatcagtagtaacttcgctttcgcttctttcttttttcatttctccctcaccaccattgtcatttttcttgctacatgcagttaaactaaagcacatagccatcactaataataataaaattatctttttcataattcctcctacttaagtattcttttttgactaactatatttacatccaagtctaaaatattttcctttatcacatcgcctacattgataggtgcttttgcgcgtaaattaaatatttcttttaatattgcttggtgataaattttctttacttttttatcagtctttactggcaagcctgaaaccatctgactatctatcctaatcttaccatatacatagtcatcttcctcttgaagaaggctcttcgcataattgtagcctcttccgcagcgattgccagatatttcatcgccattgattcttatcttgcaacaaactgggcagcatacacactctaatatcatgcaatcaccttcggttctatctcttttttaagtataagcttaaaccaaacataggcaactatacccttaagtattgatgataatgatatcgctatccatacgccatctagtccgtagtatttcataaagaatattgcaaatggtatacgcattagatttagtactactccagagtatgatggttctttcgtcctgcctatgccgttgaaaaatcctgttacacctatctctataaccatgaacaattgtgaatatccaagtatccttaagtagtcagcgcctgcttgcattgctactggatcttttggcaagaacgctgagaatattggtctagcaaatactataagtaataaagatgttgctgtaccaagtgtcgccatgattctcatcgactttttaaagccaagtataattctatcatatgtacctttaccgaagttctgtccggtaaaagcagtgtttgcaaatgagaaaccatttgctgtcatccaagatattgactcaatttgcgaacctatggacatagctgagaccgcataagcgcctagctttgttaagtaacctgttagtatcatcgaaacggatgcgtggcaggcttccataagtgtcatcggcactcctagttttagtatatgtcttgtaatctccgaaggcaccttctttagatagtttactctaacatagattaggtcgttcttaatgcctatgaagacatatataagaaaaatcactaaagttgcaataactgaagctatggctgtgcccatcgctcccatatgaaacacgaatatgaatagtgggtctaaaaccatgtttactactaatccgatagagcttattataaatggtgtcttgctgttacccatgctgttaaatgttgctgcaaagagtggatttaagaacataaagcctaagccaaaggctatggctaccatgtattcactcgcaagctcttgaactgccgcatcgccttctttgaatgagtagaggcctataagttcattatgaaaaattataaatattgcagcgattgtcatggagattataaagcctaatctaaagccaccgcttatatagtttttcgtgctttccaggtcggatttgccaaagctttgcgaaacaccaacagatagtcccacttggcacatgattatcagtgagctaatcagccaaagatattgaccaactatgccgacggccgcaaccgcctgtgtaccaactttgccaagccagaacatgtctgtgatttgataagacatttgcaaaagtgaagtgcccataagtggtatagcaagtttaaaaagtatcggcgaaatctccccttgtgttaagtctctcgattccctcatctatacatcaccctgatcagtagttattattacaccattgtcagttaatactagtgtgtgttcgaattgcacacacttgctgccatcctttgttctagcagtccatccgttcttgtcaagcttcatagccgcagagcccatgcatatcattggctcgatagtaaaggccatgcccttaacaattcttggtcctttaactccagtattgtagtggaacacttgcggatcttcatgcatgttcttgccgattccatgaccaatgaactctttaactattgagtagccctttggtctagtaaaatcttctatgcacttacctatctcgcctatcctaacgttctcgtcaactatgctgatagctttgtacatagcctctcttgtgtggtcaaataatttttgatcctcttcagagattttacctactggatatgaccaacatgagtcagccatccaacccttgtagttaacaaccatgtcgatggagatgatgtctccgttcttaagaacaacgtccttacttggaaagccgtggcatatctcatcattgactgatgcacatatggcaaatggaaagccttcgtaacctttttgctctgggtatgctccttgactaacgatgaagtcatcaacaaagtcattaagctccatagttgttacgccttcctttactttgtctcttagcgcatgatgaacgcttacaagtatcttgcctgcatcaatcatcttattaatttgttcttttgtctttaaatatatcatatcttactccttttaagtctattctattattatatatattttagcctaatatgtcaagaagttcacagccatatagacacctataaaccgtgaacttcttaaacataattatatcttattaaattatctaatcctcaatgtgtttagtatagatataagtgtcacaccaacatcgccaaagactgctaaccatagtggcaattgtataaatagtgatagtataatgatggctgccttaactatacctgtgaatataagattctctagtatgatcttattaacgaactgagatgtgtcaaatatgtttactatcttttcaatcctgtcgtccatgataacaatgtctgatgcttcgatggctgcgtctgagccaagtgctcccatgcttagaccaatgtctgctctctttataactggtgagtcatttataccgtcaccaacaaaggcaacaagtccatcgtgaccttgttccttctcaaagaattttattttatcttgaggaagtagttctgcctcgaaggaatcaatgcctaagtcgtgtgcaactttttgtgcgtatatcttagtatctcctgtaagcataactggctttatgtttctttctttaagttcagtaacaagtttctttgtttcatctttaatctcatcttcaatataaaggtgagctataagcttatcgtcaagatatgtgtctaagaccttgtactcactttgcatatcgcttgtaacgacctttacactgccgtattttgtttcggctgctactccattagaaaggcttgtgtaagaaatgatttcgtctttatcaatgtcttctctctcatcaactatagcacttgatatagggtgcttagaatgatactctgcaagtcttgctaagtgaagagccttgccttcatcaaaatcaattgcttcaacattgacaagtttgaacttaccacttgttagtgtgccagtcttgtcaaagcagaatgtctttatatttctaaatctatctaagaattttgttcccttgaataatataccaatcttactcatcttacctatacctgagaagtatgctaatggtactgagatgattatagcgcaagggcaagatactattaagaaggcaaagcatgtatgaagtgcttccttaagcggcattatttttaatactggtgcaataagaccaatcattgctgcgatgaatacgactataggtgtgtagattctagcaaatttagatacactagtttcaagcttcgctttatcactttgtgagcttctaacaagctcttgtatccttgcagccgttgagttctttgcaagctttgttgtttctatgataaggtagccttctttaacgatggctcctgagtatacatttttatctgcatctacataaacaggttctgactcgccacttatgtgggcgttgtctaccttagcttttccttcaagaaccactccatctatggcgatggactcgccttcacgaactatgattcttgagcctatactaacttcagatggttctgtcttaatctctttaccgccatccaaaacagtagcgaagactggtgacttaactataagctctttaatcttgtccttcgacttatcaactgcgatgtcactaatgatttctccaatttgatatagtagcgaaactagtattgcctctaggtgctcacctatcaagatggcgccgacagttgcaacagtcattaaaaactcttcagctaatacgccatgtatagctcctttaatgccatgtataatgatgtcgtatgagataaccaagtatgagatgataaagaagaccatcttatatgggctgtcaatgaataaatatgctcctaagcatataagcgatactagtatccttattaaaaatagttttgagaagccttcctcctcttcctcttcagactcgtcctcgcctcttgtaactaagacatctggctctaagttgtttacgtagctcgtaatctctcttagcacaagctgtgcatcacttccctcttttacctctatgcttagagttgagttaataaagtcaaggctcgcactctcaactgagtcatgactctttgcaaagctttctatcttttgtgcgcagttagcacaagtaagtccgtttaaaattaatttttccatagctgcctcctctgtgtcatattgcatttaattaaatatatgcttcatacgttttatatacaaacgcataaacatatatttatatatcaatattaatataacacatcgcttataagaatgcaatagtttttttaaatattttttctcttttaacacttttgtatacattgttaatatgatatatgttataattaagctatatagtaaaggaggaaatatgcaagaaattatcgaactgaaaaatttaaagaaagcatttaagatcggtaaagaaagtcttcttgtacttaaaggcattaacttgactctctataaggagcaagcgatatgtattgttggaccatccggttcaggtaaatctactctattgaatatgatggctggactcgaaaagccatcttcgggtgaaataattgtcggcggcatacacattgagaatcttaatgaagatgacctaacaaagtttagacagctaaacattggttttgtgtttcagtcgtataacctcatccctaccctaaccgcacttgaaaatgtaggtttaggtttaatatttaaaggcatatctaagaaagaaagagatgagcgtagtgcttatctacttgaaaaggtaggcctaaaagatagaatgaagcacaaaccaagcgagatgagtggtggtcagcagcaaagagtaagtatagctagagcttttgtaaacaaaccgaagatagtctttgcagacgaaccgacaggtaaccttgatactaagactagtgtcgagattatggaactaatgactactatgacaaagaaagacaagcaaacgcttatcatagtaactcacgatttagaaacagcagtctactctgacagaatcgttcacgtgcgtgacggtatgattgagaaggatgaaatgaacacagataaaaaggaggcacaattaagtgaagaagatatttagcattttattaattgctataatgataataagcaccttgagtgtgaatatgtatgcaggtaaaccaagtgatccaagtaaacctggtgaaacaccaacaccaacaccaacaccagcaccagctcctactccagttgttgaagatgatttatttttggtgtcaacatctactgaagaagtgaaaccaggtgatgagactacaatatactttgaacaagataatcctggttaccgtagatattataattttgctggcaattatgagatttactcagtaagagcaacaagcgatagtcctaataactgctacgttattaattcatacggcgggatcaatggtgccgaggtaagagtcagaattcctgaaaatgccgaagcaggtacttacagaatcagccttgtaggtaaagcaaagcgtagaggcgacgatactgcttcacctgttaaagttgagggtgaagcttatataagagttaaggagggcagccaaagaaaggcacaactaaagattaacagagttgatatcttgccagataataacgttgcccctggtggatctttagcagttggctttgaaattgaaaatatttctgatatcttagcaagaaacgttgaactaaatatctcaggtcttgcagaagcaggccttgcattaagaaacggaactactactcaaaaagttagaagcattgaagcaggtaagaaaacatatatttattatgaaatgaacgtctctaacacagcaaagtttggttcatacgaactaaaaactgctcttagctatgagagtgaatttaataaagagactataaaagaagatacttctgtctttgttaatattggtggcgacgcttcacaaagctcacagctaatcatacaagacttaaagttcccttctgcaactcttggagtaaataacacattcgaagtaagctttaagcttagaaaccaaggtcaatccgttgcaaagaggatcagagctactgctaagagcgaagacccaacaggtgttgtttcaagaaccgtttctgaaatacttgttagagacctagctcctggcgaggaggaaacagttagctacaaattctttacaacaaagggcggagctacaaagaactaccctatcaacatcaagattgaatactttgatgacttcaccgatacaaaagagccaaagactgttgaacaaattgctggagttttcctaaacaatccagacaatgctggcgatggcaaggacgcaaagaagtcaacaccaaagttaatcatagacaagtatgaattcactccaaagcttccacttgctggaaacgaattcgagatgaatctttcattctacaacacaaacgctaaaaaggctgttaagaatattaagatagacttaacaagccaagacacaagtaaaagcgattcaaacacagctggctcatctgttttcacaccagttgacagctcaaatacattctatataggaagaatacctccaaatggcaaggttgaaaagactataaagatgtttgttgttccagatgcaacagctaaaacttacaatataacagctaactttgaatatgaagatgacgaaaataacgaatataaatcaagtgaaaatatcggtgtaccagtatatcaagagtcaaagcttgatatagacccaataaactatcaaacaaacgctatggtaggcgacaacatccctatcacttgtaacttctacaacactggtaaggttactctatataacttcaaggtaactttaacagctgacaacgcaacagttaataacggcacatactacatcggtaacttcaacccaggcggacaagatgtttatgaaggcaccatcatgccaaatgaagctggtgagttaaaggctaaggttaaatttacttacgaagactcaacaggcgaagttaaggaaaaggaagaagagcttaacataacagtagaagaagctccaccaatggatcctaacgctggaccagacggtatgccaatgccagatggagctatgggagagactccttggtttaagaagccactattctatattccagtagctttaataatcttaggagctataggctttgtagtatttaaaaagcttaaaaacaaaaagaaagaaaaggatttgaatatagatgaaaactaaagatctaatattgatgagtttgagaaatcttaatagacgtaaattaagaacattcttaacagtattaggtgtagttataggctcaatatccatcatcatgatgatatccttaggctttggtatgacagactcaactagaaagcaacttgctgcagcaggttcgttaacccaaatcgacatctaccctgccaatagatatggtggcgatatggatgaagatggcaaaaagaagccaaagactgataaggtcgcaaagcttgatgatgctactgtcgagatgcttaaaaaaattcctcatgtagatgcagttttagctactgagcagttttcagcacaaattaatgtcaagaacctacaaggttacgctactatcttaggtgttgatcctagagagtatgcaaagttcgacataaagctagatagcggtagacttctacaagagggcgatatgaaccaagttgttatgggtagagacgttcttagatggctaagcaatccgcaaaggcctcgtatgaatggaccatcaaaagatgaagaaagagatcctcttacaactaagatgtttcttactttagacacaggtggcagctacgacccagaaggtcaaagtgacgagcctaacaaacctaagcaaaaatacccaatagaagctgttggtgtatttagagatgacgactatgaaaataattattacatcgtaatgccgatagaataccttagaaaaataaaaaaggatgccaaaaaattacaatctggtgccaatcaaaatatgtatggcggatatatgatgggcggtcgtgatgacaaagagaacaaatacaacaacattaaggttaaggtagacaattttgacaatgttcaaaaagttcaagagcaaatcgaagcgatgggacttaagcctcactcgcttaacgatatcttagtcgaaatcaataactcatctaaaacacaaagactaatacttggcggcatcggtgccgtatcattactagtcgcagccataggtatctcgaacaccatggttatgagtatatatgaaagaacaaaagagattggtgtcatgaaggttataggtgcgagtgtctctgatataaagatgatgttccttacagaatcagccttcataggtctacttggcggtctcgcaggtatagtcctcagctacttgataagtgccctaattaactacttgggcgtaaagtatggctttgcaggtaatatgtcaggaggaggcttctcaccagactttgatccatctcaattaaagatgtcaatcatacctgtatggcttgcactagcatcccttgtcttctcagcactcataggtatagtatcaggttacttccctgctaagaaagcaactaagctaagtgcacttgaagcgatgagacaaaactaaatatatattaagagtgagcaaaatatacctgctcactctttttttgtgtagttcctatataaatttattgctacaaacaaaatagcgatgaacttctagatgtccatcgccatatacattatgcaaattaaattatttagccggcttaacttggtctctaatgactaagactgtgttaagtgctctacctgcttttcttagatacttaccgtttgcatacatagcacttgatgctcctccatcaaggttaaatgcatcagtacagccaaggtcttgcattatacctgcaacttggcccatagtacctgatgttgtagctaaaaccaactgtccgttcttatttatacctataaggcttcttgcgcctgctccctttgtcatctttgcttccataccagctacatgcttttcatatacaagtttggagttttctataagcataggtgatgctgatataatttcgctaagtttagcaaatggaactttttctcccttgtagtcaaatgtcttgtcttcaactgtattaccatcaactacgtgactaagaactagttcaatctcaacagttcttccttctttgaatctatcagtaacatatgtgttattactaaagtcacttccgtagtaaataaggtagccgtccttaggcactgttagctcgccattggccttgtaaaccttctttactgtgttattaaccacttctatagcatagccgcctgtaactgtagtaggagcgtttctgaacgaattaaatatatatacaccgctagtatctgttggcttaacatttacataccaagcgtcaaatagattaaaatccatgctttgtgttccgttgttccactcgttttttctcttgccatctaagtagcctttgtacttgaatgttccgtgcactatcttcgccttgttcttatcgaatacaataaggtttgcattagcgccttccatgttaatcattactcctccagtcatttgtgttccatatgggaacttgccgccattgtatgcttcaaagtaatttgcatttatggctgccttcggtttatatgagttcacaaaatcagtaaatgctgctgtaccaacttgctttccatttggctttgcaacctttatttcagttttttcatctaaatcgatagtcgtaacattaacacttttgcctctaaggttaactgttttcacttcaacctttgcaaaggatgtaacttgagatataagtagcatcgctgcaaaagctagtgccataatttttttcttcataatatctacctcactttatattatttattatattatataagaaagaaaaaataattgcaagtaaaaagccaagattcatctcttggctttaattatattctttattgccttttaaatactctctatacttaagtagcacatcatgtatctcgtcaaagctcttgctctcgcagatggcgttctttaccttcgccgcattccttaaacccttaatgtactgcaagagctgcttcttcatattgttttttagtagctcctttggatatagttctaaatcaaggtccatgtgccttagtgcgacgtctatcttttgatattcttccgaggtatactcttcgccccttaggtagctttcaatctctttaaataagaatggatttgcgagcgcgcctctgcctattgcgactccacttgcccctgtcacttcaagtatcttcttgtaatcatcaaggctcgtaacatcaccattagcaatgacaggtatcttgactgcgtccacaacttttttgatgtagtcccagtttgcgcatcctgtgtagaaggcctctctcgtccttccgtgaaccgtgattgcgtctgctcctgcttcttctatagccttagcgttctctacgccatttaagtgctcatcgtcccagcctatacgtatcttaactgtgatgggcttagtcgaggcgctctttgcagccttgaccaccttatatactttctctgtgtcttttaaaagagcactgccgtcaccattctttgtaatctttggcatagggcagcccatattaatgtcgatgatatccatgtccatagcgtttaagtaatcttctatagctcttttgtagtcatcttcatcgcttccaaatatctgcaccgcgtatatagcctcgtcctttatcctctttgttagatctaaggtcttcttgtcatcgtgaattatgcccttgacgtttaccatctcagagaccgtcatacctgctccaagctcgcaggctatgtgcctaaaggcgtagtctgtaaagcctgccataggcgctagtacaaggccgttttttatctcatagtttgcaatcttaagcatgattcatcttataaatttcatataaacctaataatgttaggtttggctcgattaggttcacataatcactgtacttggcaactttctctgcaagtccgcctgttgcgactatcaaaacctcttccttagtcttgtttatctcttccaaaatcttctttataatgtagtccatctcacctatctttgagttcataataccgcttttgatgctctcaacagtgttcttaccaagcacgtgctcaggcatttcaagctcaactcgtggaagcttcgatgtcctctctgataaagcatccatcgatatcttaaagccaggtgtgataactccgccaaggtagtcgcccttttcgtttaagtagtggtatgtgtttgctgtgccaagatctatgactatggctggcttactagtgatggctcttacggcaacagagtttacgatattgtcagagcctacttcctttggattatccataacgatgttgatctttgtctttaggttcttgcctacaagctctgcatctacaccaaaatattttttaattgaatcaataagtggacctgtcacaggcggaacaaccgatgagattatggctgcgtttacttcctttgcatcaactttggcaaagttcaaaaagtcgtggaatataatgccatactcgtccaaagttttatccttatctgtcgatagtctaaagctttctatcatattgttatcgtcgaacaagcctaaaactatgttagtgttgccgacatccattgctaatagcataattatctcctctcaactgataatactcttgaagctataaccgtaacagcgactatggatatgatgagttcaggtattgcgtttgtagttgcgatagcgagtatgtagcccttcgcagcacctgcctcaagtccaagcgctccctctataaagcttccataaattaagtacataaaggacaagactagtcctgtgtttgctatagtaccaacgaaggctggaacaactatgtcaagtctgtacttcttagagcccatcatgataaatgcgattatcataagtgtaattactaaaaatccaagatttactacttttactagcattttaatatcgggacttcctatatttagaagaagccaccttaagtagtagatgaatatcagtgcaaataccccaagtgtgatgatcttgtttgtcctttcttctcttttgctcataaacttaaagactaagcccgacaaaagacctataagtactcttggcacaaccgctatcacggggttaagaaaaaccaaagatataggatttggcttaagtactgcgttgatgatgcttgttataccaaagacaaaaccgactatggccccaataagtggaccttctagtatgcctgcaagtataacaggtatatgtagtgttgttgcattcgtaaagccgactggcacaaagcctataggcgtaaatgcaaatagtagtactatagctatgtagatagctgcgaaagcgatgcgtttcgagttcttgctcgtattcataatattacctccattccggttcactaaggataccgtttgtttacgataaatattatagcacaaaactctctatcattacaatgtttatggataaaaaataagcagccatacaagactgcttaaagtgaaaatatttacttaagtatagttccgactataatgccgtaccagttacctaggacataacctagtgtgcctactagtagcgcaggagcaataagacaatcccaagacttagataccgccatggcagctgctgtagttggaccaccaacattggcgtttgacgcgatgatgatctcttctatggagaacttaaatagctttccaaagataagagatatgattaggttaactaggactataatcgctgctaataataagagcagtggcgacttttctatgattaactttagtgaggcaggcgcacctatcaccgcaaagaataaatatataaggaagctgcctatctcttgactgccgctcatgcgttcaaagtaggagctaaagactgatgaagctagcatggtcatagttgtcatgatgaggtacttgttagaaagcaaggcatttactagctgcataaagacagtggactttggcacaaggtatgaaaaatatcttgctatagcgtctgagagagtaactatgaagaaggctgtcgctataaccttagcgatgtctagaagcgagatctcctttgccttccaaaactgcgccgcctttgtcttagtctcatcgctcttttctctctcaaggccatcgatatatggatgagtgaagcgcttatatataaaatttatacttggcaaggctatgagcacaaagaagtataaagccatgagcaagttgtctgcaacgagtgccgcgctcgttatggactgatcgactttatagttatccgccatcgcaacaaagttcacgctgccacctgtgtatgtgccggtaaacatcggcataatcttcgcaagatcttttatttggccacgcaagatgtagaaggctatgaaggatcctagtaaggtgccgatagagcttattatatagatgaaaaatagtctacctgagtccttcgctatcttcttaatatttgctttgaataatagcataggtactgctaaaggaacgacatagttccaaaccgaatcatatacagctgcctttgtaggtatgatgtttaagtttgacagtataagtgttgtaaagattgagattatgcaagctgttactttgtttgcccacttgtacttttgctctaaatatatagctagggccgcagtacacgatagtaccgtccacagagcccatgtgttgtcttgtgatattaatgttgtactaaacatatattaactccttaaaataaattacaagacttagtataacacgaagttttaatttttacaagaaaaaaaaagcgtctgagtaaacaaacgctttgtatattattctccaagaacttctaagaattcttttctattgattgtttctttttcaagaagtgtttgagctaatctttcaagctgctctttgtgtgtaagaagaatttgtgttgcttcttccttcgcctttaatatgaagtctttaatctcttggtcgatggcatattgaacttcttctgagtaaacctttgttctgccatagtccctgcctatgaagacgttctcgccttcgttgtcatagcaaactggtccaagcttttcactcataccatagacagtaaccatgctcttggcaatgtctgtcgctctttctatgtcgtttgacgctcctgtagatatatctttgaagataatctcttcagcgatcctaccgccaagtaaggacttaagcatattctccatcatggacttagttgtgtaattaaagtcttcttttggaagatactctgtgaagccgcctgctctacctctcggtactatagtaatcatattgacaggatataactcatctgtgtaatggctaactatagcgtgacctgcttcgtgatatgcaactatctgtctttctttttctataacagtttgtgatttcttctctggtcccgcaaccaccttgatggaagcttcttgaacaagtctcattggtattacatctaagttttctctagcagttagtagagccgcttcattaagaaggttctcaagatctgccggtgagaaaccaactgtcttctttgcaatattctccaagtctacatcatcagcaagctttttgtttcttgcatgaacttcaagtattgcctttcttgccttcacatcaggaagcgatacgtagatatttctatcgaatctgcctggtcttaataaagctttatcaagtatgtctggcctattagttgcagccataacgatgatgccttcgttttgagagaaaccgtccatctcaacaagtaattgatttagtgtttgctctctttcgtcgttgccgccgccaaggcctgcgcctctttgtctaccaacagcgtcgatttcatcgatgaagactatgcatggtgcgttcttctttgctgtttggaataaatctctaactcttgaagcaccaacacctacaaacatctctacaaagtctgaaccggatatagtgtagaatggaacgcctgcttcgccagcaacagcctttgatagatatgttttacctgtaccaggctcaccaactagcaaaacgcccttcggtattctcgcgccaagcttgatatacttcattgggttccttaggaagtcaactatctcaaatagttcttccttttcttcgacaagtcctgctacatcagcaaacttgataactttaccattaaccgcctttgactctctagctcttgacctgccaaaattttgtgggctccctgtatcttgtcctcttggtgcaagcagcgcacgcataatgaatataaagaatagcatggatcctgccatcatgattatattcatcatcatagagttgtcccttggcatagtaacgtcgtattgaatcttattagctatgactctatccttaacgtagtcatcatatatagactgccaaacattaggatccacttctacataatcattcttgccgtcgttctttgtatatttaaaaccatagccctcttggctaatcctttttacttttccatctttaatatcgtttatgaaagtattgacattggccttgtcatcagaaaaaaatccatctgagaagaatctcaatgaaaaaaagacaagtatcaatatcagtgcataaacaataagatttctatataaagatttcttcaaattattcctcctcacctaaacaagtctcatctaagactcctatgtacggtaaattccttaagtgttcgttgaagtctagaccatatccaatgataaacttatcaggtatttcaaaaccaacatagtcaacctttatgtctacaactcttctttcgctcttgttaagaagtgttgcgatcttaactgacttagcacccttgtttaataagtactcgtgaaggcacttaagagtgtagccagagtcaataatatcttcaacgataagtatgtcctcaccctttggatcaaactccatatccagctttatattaaccttaccatcagacttagtcttagatccatagctagatgctctcataaagtcaactctaagctcatgattgtcgatatttttaattaaatcagccataaatacaaaactgcccttcaatatcccaacaaatatcggattcttgcccttgtaatcttcagtaattacctttgctaagtctaaaactttttcttgaatttgttcttctgtgaacataatttctttaattctataagccatcattatcctccattataatgtttaaatactttttagttttatcactcgctctatacttattggcaatgtcgtagccaataacgcaagcaatttcgtcatcatttgtaaggaataaaactttacttctttcctcactagataccttcttatctatgaagtagtctttaatcttcttagagccctgcatgccgaaggggttgaatctgtcgccacttcttctattcctaatcataagcctaccacttaataagtcgtaatctaaatacttcttgctaagcactctatcgcttaaaacgaatttaaacttagtcccataaatattgtatgctttatctaatttaaagtcaagagatatttcttctactttctcattgctactagagtctttgagagtagttttatcaaaatcattcataagataaaacttgccatctatgtcatactttttacccgattcaagcgaaattaaattaatcatatcttcaatattgtccttgctaatgttgtttagatactgaagatgctcttttaaaaattttctaagaactaaagttttctcatagtgatcaagttcattaaatgcatctctaataatgctcttctcagtaactatagcttcatatttgtccttaagtatagcatctaagtaagagttattctcctttgcaatagatgcaagccttgtcatagatgagatgatattatcattgaagtccctctctataagaggcaagatttcgttacgaatgatgtttctcttgtaatcattagtaaagttagtagagtcgtctacatatcgtatgccctcatcctttatatacttaagtatctctttcttgtcaaagcaaagtatcggccttatataaaagtcccttctcagaggtatggactcaagaccatcaaggcctgctcctctaaatatatttagaaacatagtctcaacaacgtcgtttttgttgtgagctatggcaactgaattagccttgtatttatccttaagcttttcaaagaagatgtacctaagcttgcgacccgcctcctcacatgtaagcgagtgactcttagcatagccttgcatatcaatgtgctccacctcatatataaggcagttcttctgtgcgagcccccttacaaagtcttcatccctttgtgcctctgcacctctaagcccatggtttacgtggcacactataagattaagattatactcatcttttatacttaaaagcatttcaagcataaaaacagagtcagagccaccagagaccgcgctgactatagtatcatttttagatattaaattgttttctttaatgaaatttttgaacttttctaaactattcataagaaacctctgatacaatacatttatttaaaagtaaaattaaaggctgaactaaacccgtccaaccttgaaaaatcatattacatcgaaaaaacgattaattcttgtagtcacctttctttgcatgataactacttcttctgttctctttaaacttcatttgatccatcttctcagtgctttcttttaagaatcttgagatcttgtcttcgaagcttaaattttctgtttctgttttttctccttcccaagtatatggctttctagcttgagatttagaaaaatcttttttagcctttgggaaatcttttttattattaaaatctctttgcttaggaaattctttttttggaagagtttgtttaattgacaaacttagctttccgttttcattcgataaaactttagccttaacctcttgtcccttcttcaaaacgtctgaaacattttcaacataatcgttcgatatctccgagatatgtacaagaccgttttggccaccttctatctcgatgaaagcaccaaatttagttatattaactacttttccactcacgatgtctccaactgaaagcgtcataaaaaacaaaatcctccttaattattatttgttttccttaaatatgtcagtgtcgactttgtcaacaacctttatctctttaggcttaatcatacctaattcatctcttgctattagctcaataaattcttgagttttagacttagaaagcaatacctttacgtttgatatctcatcctttagttctgcaatctcttcttgctttgccttatcttctttcactaatttattgtaagttacaatttgattataaaaatggattgacacgattagaaacaatgaaataagtcctaatttgaatgccgtgattccaccttttttactttttttcataatcaccactccttacaaatcatagctctttatacatcagcttagcttgatctttgtttggactctccatcaaagatactacctcatagcttctgtggtcttcattaaatgttgttgttataatgtctccaacctttaaatcatcacctggcttagctacttttgaatttataagtatcttgccgcttttcgcagcgtcattagctactgttcttcttttaataattctcgatagttttaaaaacttatcaagtctcataaaatcacccttatgtacattgtagaaagtcaggcatagcctgactttttacttattgtgtcgtaaaaatcttacttgatgaaaaacatcaaattagattatttacatttctttttgcatttagtgttaactgtttcttttaaagtcttaccagctttgaaaacaggtgccttagatgcaggaatttttattttttgcttaggatctctagggtttcttccttctctagcttttctgtcctttacttcgaaagtaccaaagcctactagttgaaccttttcgccttttttaagtgtgtcagtaacaacacctgtgaaagcgtttagacaagcttcaacatcttttttagtcatttcagttttttcagccatagctgcaactaattgagatttgttcatgataaatcctccttttaaaaagtgcttgaaaagccattcgtggcccttctatacttatattataacctattttctctaaaaatcaaggtttttttacatttttttgtaattttattgaaaaaatagcgatttttttgctattttgatataaaatcttcaatttttactagttttagtaagagtacgaggcctccataaactattattccaagcaaaattgatattgatattgatattaaaagtgagaacttaatgctcaatatatcatatgaaactttaactgctagtgccataattatacttacagctaaaattttaagtgcatatgaaagcaaattgtatttcttatcaagtattttttcaaggtctatatagtttaataccattgcaagaatgaaggcaatgtttgtactaattgctgctccttttacattaaagaagcttatgcctgttagtacatacgttaaaactactttaaccgctgaacctatgaaaagatttttaaccggcttttcaggtctgcctactgcttgaagtattgctgttagtatctgtatcatacatagacagataagacttacagatagtatgcttagtagctgtgctgttccttctatggcctcaggagagttgttgtagtatatcaagcttatgattggtttacttagcgctataaagccaagtgtgcatggaaatgcaaaaagacaagtaaacttaagtcctgaatatattgtttgatgcatcttatcaaaatcttttttaaccatgcaagctgatactaaaggcactatactcatcgacaaggctatggatattgcttgtggcatattaataagggtagttgccatgcctttaagccaaccgaacatatcgtttgcttcgcttatagtgtaacctatatcagtaagtctcataaagacaagctttgtatctataaagtccatgattggattgattgacgcgcctatggtgataggtactgctatggatagtatgttttttataacttcactatcgctgtacataaaaccgctttggtctaattgcttttcattcttataatctttatactttaataaaaatactgcaagcaaaaataaaaagccaaaaaaggctccgatcgaaccacctgattgcgcagcgcctgcagcaactgcaactccatacatattaagtgcatactttgttagtattagtccaaagatgagcttgaagagctgctctataacttgtgagattgctgttggcaccatgttgtccttaccttgataaaagcctctaaatgatgacataagaggtgagaatacaagggcaggtattagtgcaactaatgagtaccaactgttttcattttgcaaaaagccaactatttgatggctaaacacgtatacaaagagtgcacttattatgcctaaggcaaacataagttttgtcgactctacgaatactttgtgtgctgcttttatcctacccaaagcatagttttcagatacaagcttggcaactgccacaggtaggcctgctgtcgatatagtcagcagtattagatacactggataagccgcttgatagtagcctatccctgtatccatgatgatgtttgttattggtattctgtacacggcacctatgattttaactacgatgcctgctaatacaagtataaatgtatttttaaaaaatttactagttttcttcttttccatatattaatctacgaagtagtagcctaccccccatttagtctttaaaaattttggtctcttgctgctctcttctatcttgtttctaagccttcttatgtgaacgtcaacagttctttcatcgccatagaattgatagccccaaaccttctccaaaaggtcctttctcgagaacacttgttctttattcgatgcaagtatatataaaaggtcgaactccttgcctgtaagcgaaatttcaactccatctttaaagagttttctgcctatggtgttgattgtgaagtgattaaactcaagcatgttgttctttgcatcatcgtttgcgccttgcactcttctgaaaagtgacttcatccttgcctttagctcaagtatattgtaaggcttaactaaaaagtcatctgcgccatattcaagtgcgagtatcttcttaatctcttccttattgttagttgatatgatgatggcaacattcgatgctcttcttatatcttggcatagatttagaccgctcttgtctggcaaatctatctccataattattaaattgtactcgttcggcttaagaagttttgatgcttcttcagcactatatgcagtatctatcagatactcatcttgctcaagactgtattttagcccctgaacaaaggtttcatcactatctataagtaaaatcttttgcatatatacctacctttttaatactctcttatcgccaagcctctttgttaagtttgtcttatcaaagtcctctagcaaagcaagcgatatcttcctgtttgacgagataaggtctctgtactcagcaagacttatctcttgattcttatttaaaaacttaattagctcttctcttgcatctaagaaggccttgtagcttatgaagtcatcttgaagcctgtatatgctcttgcttgcttgcaagtcttgcaaagcttcggataaaaattcattattgatcttcatcttctcttggatttcatcctttgttatgccttcatatttgctgtcttcaaccaattttaataccatgtccatggactttttgtcctcatctgaaagacttggtgcgtaacccttgattgaaactagctcgccatttaactctaagctgtcttccttaagtataagatcaagcacattctcataaagtttttgattgttgttaagcttcttaaagaatctgttctttatctcttctttgaatattcctcttcttaatggatatttttcgtaatatttatttaagtgaagtataagttcttcatttatatcgtgaatgtatcttaatgagattggatataaaccgttctttagttcgtaaacaactatagttccttcatttgctaaatcttttaactctgagtctattgactcttctgacttgctaagtagttttgcaagctctttcttgttcaagaagtctgtctgtcttgtgtagataagattatttagaacgtctgtatccgaacctgtttcgtttatcttaaactcttcaactgcatcttcgtcaaaacgtttcttcttctttggattagtctctagcacaacgccgcctgctatagtcgacattggtgagtagaaccttagtatgaatctatcaagtctcttgcaaactgtttcgctctcaagtattagctgtgcgtagccttcttctcctgggttaagcacctctttatctaaaagcaccactcttgcaagtatctcttcagttcctatatataagaagactctcgatgcattctttatggatctgtcttggtctttaatacattcaatcttaacgtctataaggttggtattttgaagtgcatcagggtaactaattacgctgcccctatgtatatcttccttcttaacaccagggatatttagtgcgcatctttgtgaagcataagccacgtcttcagactcttgatgcacttgtatagatctaatcttagtcttaattctctcaggatatatctctatatcatcttgtagagatagctgtccatccataagcgtgcctgttactatggttccaaagccagatataacaaagactctgtcgataggtagtctcggtgtatcgttcttctcttccttttcaaaactatctgcatgctttttaagtatcgcttttatattatcaatgccttctaaggtcttgttagatactctaactatctcagagttttcaaggaaagttccttttagtgagtctctgatgtctgatgtgacaagctctatccactcctcatcaactaagtctgtcttagtaagagcaacaaagccatgctttacgccaagcatagtaagtatgttaaggtgctctatagtttgaggcataataccctcatcagcagcaatgactagcataacaaggtccatgccgctaacgccttgcaccatatttctgataaatttctcatgtcctggcacgtcaactatacctactcttaaatccttttcaagatcgaagtaagtaaagccaagctctatcgatattcctcttttttgttcttccttaagtctgtcagtttgtctgccagttagtgcgcgtattaaagaagtcttgccgtggtcaacgtgacctgcagttccaagtattaaatgtttcactatctctctcctagtatccccttaagttcgcttacaataatttcgtattcttcctcgtctatagttcttaagtcaagaagcactttgtccttatatatccttacaattataggtatttcaagatgtctaagtttttcttcaagctttgcagtagatatattctttggctcaatttcaattgctttagacttgatgaattgatttggaagtgagcctccacctacttctgatgctgtttcaactacgctcagttcagctccttttatgccttcaagcatagctaatagcttttgcgctctcttatctatggatacatagctttctgttatcatctttatagtcggtatttcaaatgttttattcttgtctatataatagtttagtatcgtttcaagagctgctatagtcatcttgtctactctaagtgctctaagcagttgattcttcttgatttgactgatgtatttttctttgccgactatgatgcccgcttgtggaccacctaaaagcttgtccccactgaaagtaacaacatcaacgccacttgcaaccgattccataacagttggttcatgctcaagaccatagtcctcaagattgattaaaactcctgaaccaaggtcttctataagtggcaagtctccctttatactagcaagttcacttgcattaacgctttcagtaaagcctaaaattttgtaatttgatgtatgaacctttagtatagctccagtctcttcatttatagcgttttcataatctcttagatgagtcttattagttgtgccgacctctctaagtgtcgctaagcttctttcgcaaacatcaggtattctgaatgatccacctatctctattagttcgccccttgaagtgataacttccttgttcttgctaagtgtgtcgagcacaagcataacggctgcagcgttattgttaactacaagtgccgcttctgctccagtaatcttcctaagcttttcttcaatgtgggagtatcttagacccctttcgcctctttcaaggtcatactcaagattagagtagcttgataagagcctcacaatattttcttgagctgattttggaagctttgacctacctagattggtatgtatgattacacctgtcgcatttattacgggtcttaggctatagcttagctcatcttcaagcctttgtgcaacagacttttcaatgtttttaagcctctctctaaggccttcttcatcaagaccattctttatcgcttctctcatctcgtctaagatatttcttatagtatcgttaataagtccagcgtcgtgaacttcgaataatttcttaatctcttcattctccataacttgatcaacgcctggtatcattctaaataaattcatatcacacctacttaattaaaatatatttatcgtcgaatttttttgcttttgcaattatgccaactccaaatggaaggtctatcctttccatgtatgtctttgcatcctcttctgacaaggatattagtagtcctccagaagtttgtgggtcgaataaaaggtcctccatctccctttttatctcagaatctatcctaaagttttcaccaacgaaaattctgttgtcatatgcacctgctggtacaagacccatcatcgcatagtcaagagctccctttagtacaggtaatttctctgtatagatctcaacggtaacgtcagtgtttctaagcatttcgtatacgtgacccataagtccaaaacctgtaatgtctgtgcaggcatgcacatcaagtccttccatagcgtcctttgccttcttgttaagagtcttcattactaaagttgcttcatccaaagcatccttgtcacagatgccgcccttaacagcagtgttaattattccaaggccaagtggctttgttaatataaggacgtctccttctttaactccagtattcctcaaaactttgtctggatgaacaaagcctgtaacgctcatgccgtacttaagctcatcatcttgaacagtgtgtccacctattagcaaggcacctgcttccttaaccttgtcaaagccgcccttcaatattagctttaatacttctggcgatagacagtttggaaaacacgatatattcatcgcaagtataggttcaccgcccatagcataaacgtcagatagtgagtttgctgctgcaatctgtccaaatgtgtatgggtcgtcaactattggagtgaagaagtccaaagtttctatgatcgctctgtcttcacttaccttgtacacagctgcgtcatcactagtctccaaacctaccaatagatttggatctggtgcactcttttctagtccctttaatatttgatctaaaacctccggttttaccttagccgctcagccagatgtcttagcaaaacttgttaattttacgtttaagtcattactcatataatcaccttccgtttacacttatatagtccttaatatttttaaatttattctctccaatgccttctatgttcatcacgtcttcaatctttttaaacttcttctgctctctgtaatcaataaacttctgtgcagtcttctctccgacaccaggtagcgtcattagctcacttagactcgctttgttaatgttgatcttcttagtcttagcatctatcgccgcgctagttatgccttcttcgctagcttcactctttgatggaactatgatcctctcctcatcaacaagcttttcagatagattaatctgattaatgtcagcatcatcagtcaaaccgcccgcctctttaacaaggtcgtccatacgagtgcccgccttcatcttgtatacaccaggctttttaatctcgcccgtgatgtgagtgtatatgtatccaccgtcctcatcactctcgtcatttaaagagtccttcgcgcttgagtcataagccttttgcacagtaataccatcatcactagtgctaaaaaagtctgtattcattacctttacaaatattataataagtgcgactataagtactatcttaagtcccctcttaattttatcgatgtccatagaatcaccagatatattataccataaatttgataaaaatgaaacaactttgtgaacttttattcataaagctttgcaatgcttgcaatcacttatacttatatgcacttactgtccatattaaacattgactcgcagggcatatgcttagaagccacatatatagtgtatggcttggcatatagtgagtggcttgctatatatagagaggcttagcatatgatgagtggctttctatatggtgagtggcttgctatatagtgacaagcttggcaccataaacataaaaaaaggctatagaccaagtctataacctatgtggtggagatgatgggagtcgaacccatgtccgaaaacccttcctaaagaacttctccgagcgcagtttcttataaagtttcactaagaccaatttaagaaacaaaacaagtcttagctagctttaaaataatcttttaacttttaagcttggctaaaagatcttctcgtctaagttgacccaatataaagccgtacgagaaaactctatattgagagctagcctaactaggcagcgtatgcaaaattattgttttctgcgtttatatttttttgacagatgtaacgtatccatcaatccggctcgctattctaaattccaaatccccgtcgaaaccaaattcatccccgtggtattttattattacccagtaggctctaatacataacaaggcagcttaaggtgcacaaggcacccatagctatatttccttttgatatattctgtatgttatattaatctttgctccaaagctttcaacgtcgttcatcatgtctctattgtactcccaaattgtcgaaccttcaagctctgtgtagcctttcttaagtgcgttaagatatgtctttaggtacatcacactagtaacgcccttctttctatactctggtactacgaataaaacaaagaatctaattctgtttatttttcttttgtaatacaagaattttaagaaaccaaatgggaacatctttccattcatcttcttaatagcttgattatagtctggcagtgttatattaaaaccgattggctcgtttgtcttattgtctctagctatgaagataagctccgaatcggcaaatggcactagctgcttaactatctttcttatctcttcttctcttggtggagcaaagtcgtcccactcgcgcggtaaggctctctctagcacatgcattatgtccatagcgtccttatcgacattcgtaaggtctatgttgtctactctaaagtcgaattttttcattgcatatggaactagcttttcatatctatctatgtcggcgttgcctatagtgtctttgtatgcgtagcagtcaaaatacttctcaaagccatacttaacgaagtagtcgttgtagtactttttattgtatgtgttcataatgaatggttgtgcgtcgaagttatctatgatgaagcctctgttatcttctccgcctggtagtgatagaggccccttgacctttgtcatgccatgcgactttaaaaactctatggccttatcaagaagcgcctttgcatactcgtaattctccttgcattcaaataatgagatgtagccttccttgtatccatgatgcttattaagaatattgtttactccaactaaaagtctgcctaccaccttttcatcatcgtagcagatgtactttgtgtttgggcctgcttcgttaaggtcgttgtcaacgccttgaacgtactttttatagtccgctcttagtggcggcacaaaatttttatctccttcgtaattttcatagataaagtccacgaaatcattaagtgttttcttatcgttaacctctttaatcgttatcaaggtaagcacctcttctttcttttaaataatcatacacgtcttggctcaaaaagttcttcacagctataaaatctgttttaaattcctctctaacttttgatgcgctgacgtattcaccgtcaatcatttttctatctataaatacagcttcaaggccgtattgtgaaagtatactcttcatcatctcattgtacttttcagtaactttgtcagtgggctcagtaccgaagtacctctttttaatatttaagtccttcgcaatatgccttgcaaatatctttgcatcaagctctgtatatacctttagcttatctgtatccttctttaaaaaatatgttggaaaggttaatctagatatgatgtaaggccctgatttaaagacgtgaactctttcattgtcttgatagtgctttttcactatctcgtatctatccttagtactaaagtatgatgcatcttcttctaagacgaagatgattaagtctctatcgtcttccaaagccttgtctactaagtactcatgaccaagtgttagtggatttgcattcataacgatggcgttatactctttattgtcaagctcacttcttatgctttgagtccagtctttgtacttaaagaagccgccttctagcaaaacaacgtcttctgtcttttctatcgcatccatagacaaggaagtgaatataccctcgttctttgtctttgtaaatacaaagtagtttctatatcccttattaataatctcttcaagagcgctattaattagatcgatagccaagccctcgccttgatatttatcgtcaatgtagaagaatttaattagattcttctttactgatacagtcgcaactatattagcattgtctcttatgataaagctcgcatcaacgtcttcataagtcacatcacgcaaggctaagaagtcaataagttctttctcgcttgacgagccttttattagtctatctacataaaacataattagtccactataatgccgccgcctacaacagttctgccgtcgtatataactaggctttgcgaaagagtgatcgctctttgcggctcttcaaaattaactgtgtaagttccgtcgtcatttttctttacttttgctctctcgtcgctagacctatatctaacttttgcagtgtagaccttgtcttcatcaatctcatcaatagagataaggttcacatcttttataagagcagtctttttgaataagtcctcttctggtccaagaatgatctcgttatttactggatcaatctttgttacaaaggctctttgtcctaaggcgacattaagcccacgcctttgacctatggtgtagtttctaataccatcatgctcacctaaaacttttccacttttgtccttaataagacccttcttgctaatattttctgaatatttatttaaaaatgccttataatcatcatttgcaataaaacaaatctcttgcgaatctttcttattgtatacaggtatgccagcttctttggcaatggctctagttttatccttatccatagctccaactgggaatatcgcatcccttaactgatcttgcttaatattgtatagaaaatagctttgatcttttctgatattagatgatttttctaagtagtgaattccgccttcgtcgtacttctcaacataatggcctgttgcaataaaatcagcatcaaagtttttcatctcatcgtgaaatctcttaaacttaatgttcttgttgcagaatatgcaagggtttggtgtatggccaagctcgtactcgcgtatgaagggttctataaccctctccttaaagtcatctttataatcaacgacatggtgctctatgccaaggtaatcagatactctctttgcatcctctatcatctttctgtaattatctttaataatatcgtcgcacaaattaaacgtaatagctacaacatcgtaaccttgcttttttaataaatatgcgctaacggagctgtcgaccccgcccgataaagctattaaaactctcttcaaactatttcgtctctctttctatcaaatcaactaaatctttagctaatcttctaagttcatcctcatcttcgccttcaagcattactcttagaagcggttcagtgcctgatggtctaatgacaactctcatgtctggattattctttgttaaatcatctatagcactcttaacgcttgctatgtctaaaactttattcttaatatcgttacttacttttgcatttaaaagtacttgtggatatgtcttcataaggccgtttagttcagcgcaagtctttttaagctcggtcatagcattgattaggaagatggcgcttagtagaccatcaccagtattttgataatcctttaatattatatgtccagattgctctccgccaagtgataagtcgtccttaattagttcagctaaaacatatctatcgccaacacttgtcacatcaagctctacgccaatagtatcaagatacttcttaaggccaatgtttgacattatagtcgcaacaagtttattcttcttaagcttatcatgctttttcaaatatgtcgcaagcgccgcaagtatatggtccccgtccatgatcttgccttcattatcaactacttgcaatctatccgcgtctccatcgaaggctatgccgatatcagctttctcttctttaacagtctctataagtgactcaagatgtgttgagccgcaattcaagttgatgtttctgccatttggctcgtcatgaatatatatcatctcagctccagatctatcaagaacttccttagcagtcacgtagttcgcgccattagacatatcgcaaactatctttagacctgtgtaatccttcataagcgagcgcaaataatcagtataagctgtcttatctagctcgtcagtgatatatctaccaaagtggtccgccttcttaagctccttatcctcaagcatattcgtttcaatagcttcttcaacttcgtcggcaagcttgtaaccatgcttattaaagactttgatgccgttgtattcatatggattatgtgaagcagatacaactataccgaataaagaatcattcttgctgattatatagcttgcttctggtgtagatgttacgtttaaatcgtatacatcaagtcccatagatgtgatggcagctgcaagtgatagcttaatcatatcctttgattctcttgtgtcagtcgctataaaaacttttttgctctctccatccataaaatagtcagctatatattttccaagtttgtatgaaaattcactcgttaaaaactctccagcgacgcctctaacgccgtctgttccaaataatttcttcattcttcttcctccatatattgtttaagaagtgggagcaaagtttctctatcgttctcaagctccccaagactcactttctccttaattttgccaagcgcacttttaaatttcttacttggcttgtatcccatggcaatcaaatcatcaccactaaccgcaagttttaacacaccactgtcgtccaaacttgcctctatctcttttatgtaagatgtaaatttatttatattgtcaagctccctaccaggtctcgtagcaacagtatcagccctaattaggtcaaggtagcgatagatattatccttgccataataattataaagccttcttacagccttgataccaaagtttgggtcctgcttcatatgctttaaaataaggtcatgaactagttttatagtctttttatcataattaaattttttcaaaatatcaactgccatctcggcgccgaccttgtcgtgatcgtagtagtgcgacacagacccatcttcagagcgtgttattggctttgcaacgtcatgaaatagagccgcaagacgtgtagcaaggtccttttcagtagcttccaccgccttcatagtatgcgtaaataaatcatagctatgataaggattgttttggtcgtaattaaactctctatctatatcaggtaaaacttcctttaatagtcccaaatcatgcataagagtaaacgcgtaatgagcattgtcaagaagcaaaatcttattaaactcctctctgaacttatccatagagagagtttttacataaggtgcatatttcttcgcagccttaaaagtctctccttctatctcaaagccgagctttgcagcaaaacgcactaagcgaagtatccttaagtagtccttggcaaagctttcatatggatcaatcactgttcgcaaaattttagcatcgaggtccttcttagcatccagaaaatcatatatcttcttgttctcatccatgagcatggtgttgatggtgaagtcgcgcctaagaaggtcttccttgacatcactagtaaagcttagaatgctagggtgcctaccgtcgcggtagccagcctcgcgtctaaaggtagtaatctcaatcgaaggctcgcccttgatcttaacagagccgtagttcataaacttagtatcaagctcatagtcacttaaaagactagccacttcatcaggcttctttgcagtacatatgtcgatgtcatagacgtccttgcatagcaaatagtccctcacagcacctccaacaatgtatgaggaacccttcaagcttttcaatacatcaatcgcgtagtctaaatttttcataatataaagaattataccatatatgtaagaaaaaatcaaaattcatagctgttcaataaaaataacagctatgatgtttgatactaaattttatcatccattgtacccaatctctctttcaaaaattgtgccatttcaaatgtttttgatattttagcagcatcattcatatttccttcaaaaccagatttaatataccactgaccatctatttgaacaaaactcttttcaacacatttcataagtgcctgtttggcatctttataaaaattttgcaaattttcattataaatttttgtattttcagctgtaacctctgtaccatgtctcaaatcatttacatttggtggtataacttgtccgttttcctctatagctggtgtgactggtatcaatgcatcagctcgaacattaccatcacctttatttgtaactgtcaatattgaaccgtgtaaattatcaccatcatatgtcttagattgtcctttatttggtggaatatctgctcgtgttaatggaactgcacttatttgtggttctccacctacagttgttccagtagatcctgtattatctattgttggagtgtcattagcatgtacaacagtttctgcaattaaaaagagcgctagaaaaacgctcaatactttaataatatttgattttaacttcattatttatcaccttccaaattatttttctgccattattaatttattatcgttatttgatattacagctccaccccatggtccaggatttttatatggatttctaactttaaattttgtatttggaacatctattactaaccatttttttctaaatgctactagtattttatctacttcatattctcctactttatctcctggcataaataatctaccatctgtagttaatactaatgctcctctattatcagtttcaataaaatatggtgtgtagaaatatccttttgagtaatttaaataattaaagctaggatctattatacctgtggcatcataaaactcatcatcttttttaaaaaagtttatagctttaccccaagaaccagtaagtttagcttttttattgaattcatctacatattcttttttaatctctctaccaattaaaaatttttctacttttgcatatgcttcatcattagcaaaaaatgttctagtaggtgatgctttaatatttttttctttatttaaataattaaaagtatctgagtttggattaaaattatgcatatcattccatgctttttcccaatactcttctccttgaccaaagacataggttccgattctatcatctggtccattgtttcctacgattttaaagtctgtatgggctggagatgattctactcttctatattgtttaggaagtgttgcttcccaaggagttcccttggcaaatgtttctgttccgtcgccattatcaataaagtctgcttcactcaacttatatctagcttcattaggtgggttattaaagtctggtagtgcttctccactagataatataaatttaccgtttttgttttgtgttgttgttggttttgtttgttctgttgttgttattcctgtgcctgcgcctggtgttaggactacttcctttgctttgttgtcccaatcaactttatagcctaatgtttctgctatgtttcttataggcaagaatgtttttgatatttgtgggtcgatttgtgctggcacgtctatggttactgctttgccatctgcccacataagtggttttcctactgggtatgatattatcttgtcagcatatgtgatgtcaacaatgtggttagtgccgtcccactcaacttttgctccttcgattgcgtttacaaggtctcttactcctacgcatgttcttccattaactactcttaaaccgtctgtcatcttttgatcgactctcactttttctccgtctttgatgatgaatagttttacttcgccttggaagtgtttaatctcttgtttgattgccggaaccttgttaaattctttaattgcttcgtctggtgctgcaagtgctgctgtgcttaaaatttgtgttgcgataattgtacttaatattgcgtttttgactttcattataaactctcctttgtgtataattttatttttactttatcttaattatacaatatgcttataaatatttctagttttatttaaaattatattttgtatagtcttcttcaaatgtaagaaaaagagctgttttttgtataaatttttgtttttactataaatttgatctttctatatattttttatcatacttgatatgttttttatatctatcgatacatttagcaaattttttaaattattttcaaaaaaagaaaacagccacccatatcacgtggtagctgttcatccattataaaatttcttttaacttttcactttcatataagaggtagtcttctactctatcgacttcgtaatcgaactcacttatcaccttattgagtaattctttatttttaatcgatgtagctaagctgttgccacatgatgaagaaagatctctaggtgtcggtataattagtgactctacgcctagttctttaagtttattttttaacatcaggcacgacgatattgaatagaatgttactatgacaacattactttgttgctgtaagttcaaagtcttctccgtcttttttaactgatactgtgtatccagcgttttctaacatccttgtaacattttctttagcaacttctatgtcaactagtactgtgaagttctttgtgcctttatcagcttcgttctttgctaatataactggttctggacaagaaagtcctcttgcatctactacattatttgccattttgagtacctctctttctttcagctatgatatagcatgctgctaatgctactactacaagacctactactacagcaattttacctgatggtgttgctcccttgcctgatgaagcgagattaaagttgtgtgatgctgcagctccacatataagaccgataactgtcatgaatgcgtctgtatcaccttgtgaagctagtattgtttgtctgattgggcagcctccaagtaataccgctgttagaccaactagtgccatggataagaagttccataggtgttctgtgtgtgcaattggttgttcagcaaagccaaacttgaattgtccaagtgccatgtttaatactgcgtttgctacaactatacctactataccatataggaaatggaagtctttgattaaaactgcgtctctaaagcctgcagctgtacaaagtcttgttctttgtaggattgctccaactataagacctgcgcataatgacataacaagtggtgcatgcattgagcctggtcctttttctgagaagtgaatgaacataggcttagctattgctagtactaaaagcaatactgcaaatattggcataataagtcctgacaattttgattgatcatggtttctaccaagtgagtaaccttttttaataaatacaatacctaccaatataccgccaatgaagcctaataaacctactactgcgttcatatctcctgcgccgattcttagaagcattctaagtgggcagcctaagaatacaagtgcacctatcatcattaagaaaccatatacgaaacgaagtgctgggtttgaaccaccctttgctctaaactcgcctgtagctatggaaatgatgaaagctcctaatacaaaaccgatgatttctggtcttatatattgaactgcggctgcactgtgcaagcctaaagctccagctatgtctctaaagaaacatgcaacacagatacccatgttaccagggtttccgaaatgcatcaataaggctccgattataccgatgatggcgcctccaatgaagatcattaaattttgttttttcttcataatatccctcctttatatgagtataccataacttaagcaagcttttgtgctgtataaaataattttatagttttacactaaagtataagaatttattatcaatattttttataataaggcccctaattattaaatatttttataattattgaatatgccctactaatgagatataatcaagaggacataagaaaaagaattagaggagcgaattatgcattacataggtattgatataggatcaactgcatcaaaggctgttatcctagacgaagaaaaaaagaatattttgcacgaaaagatcatgccaagtggctggaacagtaaagagactggtgaagagattaaaaagtggatcaaatcactaggctacgaagatgacgatgttagtatcactgcgactggctacggtagaattagtgtgccttacgctaacaaaactgttactgagataacttgtcacgctaagggtgcttactttttgaatcccgaagacatgactgttgttgacataggtggtcaagatactaaggttatacttgtacaaaactctaatgtcatggacttcatcatgaacgacaaatgctctgcaggtactggtaagttcttagaggttatggctaacagacttggtctatcattacatgagatgttcgagtttgcaagcagaggtcagtctgtaaacatatcatcagtatgcactgtctttgctgaatcagaagtaatctcgcttatgggcaaaggcactcctcgtgaagacattgcaagaggcgttgttgactctatcgttaaaaaggtttctgcacttactaatagaaagaatacaactgataactacttcttaacaggtggtttctgcgactcaccatttaccgttgacttactaagtaagaaactaggcgcagaagttaagactcataaagacgcaagatttgctggagctataggcgctgcactgctagcttaactatgatagatatagaattcttcaaggatttaaggcgcaatgcatatgtagacgcagtaactttaaagctaacaaagaacaatgtccttggctactttgcaaaagacattgacgaagctttccttatgagctacggccttgtatgctaccccatcggctcaactgatacagagatattagcctacggagactacgtgacttgcgacatgatcagtgcgacaactatatacatgactactaaaaagtgtccacttatctactcttcaaaaatgtttattattgaaaagatatgcaagaggtttactgaagtctttacttcaaactgcgataggctagtctacgagtttagtggtgatatcgcagcaagtgatattgatagcgttattaaatctgtttatggctttaaattcgatgagaagaagtataaagagaacaagaaaacattttctaaaattgatgagctcttagaaattataaaagaaaagattgagccctatgagtacaacattgttaagtactacataagatatgtgcatgatcttgagaaaagggttaaaatcttagagaaagttttagaagataatattaacggcattaataaaaataaagataaatgtattaatgtagcatgtccagaaataattctggatgaaataaagggccctatatgcgagagctataaaggcattgaccttgctccgaagggctgcatattaaaaggaggacaaaatggataagaatcatgaaatgtggaacaagcttggcatggacattgaaaaacatgatatgctatgtgaagttttaccaggagcttttggagacgtgttcctaagccaagaaaacagaccaaagggtatggactactggaacatggtagttggcgacatccacggtataagaccagctgaattaatcgaacaccaaaaaaacggtggcaaggtagttggaacattctgtatacacgtacctgatgaagtacctatagctgcaggagcaatcgttacaggtctttgcagtggatcacaattctgggtaccaggaggagaaaagaaacttcctacagcaacttgcccactaatcaaagcatcactaggtgcaagatttgacagaacttgcccattcttcagaatagctgacctattcgttggagaaacaacttgcgatggcaagaagaaagcttgggaaatactagcagaagacgcaccgatgtacatcatggacatacctcaaatgaaaagagacgaagacttcgagaaatgggaacaagaaatcaaacgctacatcaagagagtcgaagaacttacaggtaacaaagttactgaagaaggtctaagaaaggctatacatattgtaaacaacaagagaaaagcattaaagagacttaatgaatttagaaagaacgacctaatcccaataagcggtaaagacgttctagttatcacacaagttgctttctatgacgatccagaaagaactacacaaatgattaacaagctttgcgacgaactagaagaaagagttaagaacaaagtttcagtttacaaaccaggtgcaaagagaatacttcttactggtacaccactttcaatacctaactggaagatgcaccacatcatcgaatcacttggagcagctgttgtttgtgaagaaatgtgtacaggtattcgttacagccacgaacttgttaaagaagaagatggtgctgatatggatacaatggttaaaaaccttgcaaagagataccttggcagcataaactgcgcttgcttcacacctaaccacgcaagaatcgacgacatcgtaagacttgctaaagaatacaaggcagacggagttatcgaccttaaccttaagttctgtaacctatacgatacagaaggttacttcgtagaaaaagaacttaacaagctaggtataccagttatgggtatagaaacagactacacagacgaagacgctgaacaattaaagacaagaatcggtgccttcatagaaatgcttggctaaaatgaaagaacttaggcaatacattctcttaggagattccgaaacagcatcaaagctgtactaccttcttaaggataatggtcttgaagtaaccatagcaccgacaccaagaaatgcagaccattgctgcggactttgcatcatataccaagcacaagacaaagagaagatagctatgcttgcagagcaaaactctataaagatagataggttttgggaagacatcgtaagagatgatccaaatagaatgagattttgctaagaaaaattagagtttagataatataaaagggataggcctctcgcctgtccctttgcttattttaaattattgaagagacattttttttgtgatataatctacatatatcacatgattggagttaattatggtttttacaagtgtaacatttatattttattttttgccattagtgctaatgatgtattttattgtcccaaaaaagaatagagaattaagaaacatagtactcttactcttctcactattcttctactttgcaggtgaaccaaaagctatcttggtaatgctagtctccattgtaacaaattatgcttccggatatttaataggggtaattcacggtaaaaaacgtgcgctgcctttaattacagctatcattataaacttgtcaatgctgttttactataagtacttaaatttctttacaacaaactttactagcatctttaaactaagtattgaaacaaaagagataattatgcccataggtatatcgttcttcacatttcaaggacttagctatgtttttgatgtgtacatgggaaatgctaaatataaaaagaatcctttggatatagctttatatatatcgctctttcctcagcttatagcaggaccaattgtcagatatgaaactgttgctaatgaaattgaagacagagatgaaacgcttgataagtttgcaagtggtgttttgagatttatagttggtttctcaaaaaaattattgctagctaataaatttggcattatagctgatgaaatctttagacttaatggtggatacaacattagtgttccacttgcttggtttggagcctttgcctatgcaatgcaaatttactacgactttagcgcctactctgacatggccattggtcttggaaaaatatttggatttaatttcttagagaactttaactacccctacatttcaaaaagtataacagagttttggagacgctggcacatttcacttggcacttggtttagagactacatctacataccacttggcggtaacagagtaagtgtatttcatcatataataaatatctttatagtctggtttttaacaggtttttggcacggagcatcttggaattatatcatctggggtctatacttctttgtctttttagtattagaaaagtatatatttaataaggcctttaaaaatattccaaacatttttaaacatatctataccgtttttgtcttactaataggatgggttatatttaaagaggaaaatatttttttattattaaaatacctacgtgctatgtttaattttggttcaaacgaaactataggcggacttctttattatttaaaagaatactatatagaaattattttaggcatagtcttttcaacaggcttgtttaaaaagtttgaattaggctataaaaaattatacctaatctttgtatatggaatacttttcatcttatcgataattgtactatttagcagctcatacaacccatttatatatttcaggttttaggtgatattatgaaaaagaaaaacttatttataacaatttcgtttttatctataatttatatttcaatgcttttaataacaatgtttagaaatgattcagtgctaacatactttgaaaatagaaacataaaagctaaaccagaaatgagtattgaaactatcttcaatgaaaattattttggtaagcttgaagactacttaaaagattcttttaaaggtagaaataagttagtagaattagatacgctaattaataaatcaattataaaaagacccgtggttaatggtgtttactgtgataagaatctttatctggcaagatgggaaagatggtggccgtatgactataaaaatgatctaaaacatatgtctgaagcttatgccaaactaaatgataaacttaaaactaatggcattaactttatatatgtaggtgttcctgaacatagctatgttttctcagataaatatccagattatatgctaaataagcatgatgaatggaaagagattgaagatgcattcttcgatgagctaaacaaaaaccttattctaaacataaaaatgagcacaaagattaaaaacagagatttagaatactcaaaaacagatcatcacttttcttaccttggggctaaaaatgcatatgatgaaatcattaaaaccataaatgaaaatacaaagtataaacttgatagcaatgttgaattaattaaaggaaaagaagagttccgaggctcctatgcgagaaaacttttctttttagggaacttgcatgatgactactacacctataaagaaaatttcaaatatgaaagatttgatgataatataaaaagtgatgataaactattctttcaagaagacaatctataccgtggaagcatgggctacggtgtttacatgggcggagataaaagctttacggaaattaaaactgataggaacaacttacctaatatattagtatatggcgattcatttacaaacccaattgaaacacttctagtaagaaatgcaaataatttttacagtgttgattttagatacaagaaggatcaaagtttaatggaaattattaataaatacaagcccgatatagtagtatgtattagagataatcttatgtatttaaataaagatgacaatggtataacagaataaataagcttatcaatataaaagcactcgtatataacgagtgctttctttatatttctatatgactaataaactttactaagaatgattagtcctatgaagtttgcgatgtagaagtaaaattttcttatcttgtgcctgaatacaaacattgcagcaaagcctcctagtcctccgcctgccatgctaaataaaagaagtacaatttctggcactctccatccgtggaaggatgcttttagcttgtcatatgcgtacaatagaaaggctatgacgtttgttcctaaaaatattattcgtccaaatgtttttattatgtttaaaattattcccatactactctcctatcgctcttgttacatctatcgcctttatcaacaatatgtcttgtgcaccttcattaactactctacttgcttgcgctgtagtaatcctttcgaatattctacgtgcctctctaccattgccaaagtttttatctttgtgttggactaggtattcgaaatgctttgatacttcttctaaggcgtcttggtctatctcgtagtgctgcgaagtgcatatacgtttgaatatttctactagctcatttgcgttgtaatctggaaactctatgatctcgcctatcctggagctaagtccagggtttacatttagtagatcgttcatctcttttgtgtaacctgcaaagataacgactagcttgtcacgattgttctccatctcttgtataagtgtggctatggcttctggaccaaagtcttttgagctagttcctgctagtgagtacgcttcatctatgaataagatgccgccgtaagctgacttacatatgtcttgtgttttaggacctgtctgacctatatattgaccaactagctttgatctatctgcctctacaaacttttctgcgcttagtgcgcccatctgataaaagatcttgcctagtattcttgcaactgttgtcttacctgtgccgggatttcctgtaaagaccatgtgatatgacttagtgcttgtctttatgcctttttcttcaagcatcttgttatatatcatttgattttttaactcttcaactctgcgcttaactggctcaagtccgactagtttattaagctcttccatggcttcttctatgccatctcttccaactttgcttagatcgactccaaagtctaccgagcttagtgttgttagttcttcttttgaaacgttcttgcctgcaactcttagtgctttctctttgatggcatcttcgattatgcttcttgcgcttctaccattgccaaagtcttcttgtgctttctcggcttctatcctctttaagaaggcctttcttccatcttctgataatacaaagtggttcttctttgcatatatctctgctattcttaataggtcttgctcctcatagtcttcgaagtagatctccatattgattcttgacttaagtcctgggttcgtcttaagcagctctctcatctcttttgtataacctgcaagtatgacgatgaacttgtctctatggtcttccatagccttaactagtgtgtcgattgcttctttaccaaagtcattctctccaccacgtgcaagtgcgtacgcctcgtctataaacaatacgccgcccatcgcttcttcaatcttctcctgtgtttgcttagctgttacgcctatatattgtccaactaggtctgaacggtctacttcaacgagctgacccttttcaagtatgccaacgtctctgaagatatcacctataagtcttgcaactgttgtcttaccagttccgggattgccgtagaaggcaaagtggtagctcatcttgttctcgtttactatgccttgcttttctctcatctgttcgaactcgatttgctttataatcttattaacttcttccttaacactatcaagaccaatcatatcgtttagctttttaaggtcttcttgcaaggctgactgtgctgtttctttcttagcagcttcgctttttgtcttttgcaagaatgtacttgctgcgtcgctctctttggagtttgggcgcgtcatcattatcttcctagcaagttttttaagcttatcatactcgccgactctataataaaaatcaagctttaaagcctcaaagcccttgtctggataggagtcgattgtgctcccaatttcattgtactcgcgatcgactaagagatgcataaattttagcttgtcaaagccttcgtttctagcatataaattctcaactatagtgtagattctcttaaagtcttcgtcattctcgctttcaaaatatatctcaagcaaaaactggtagcacttaaagtctttatcagtttcctcttctagtaatcttactgcctcgtctttttctcccttcatgtaagaagcttttgctaagaagtaagcataagtagctttgctcacctcgtctttatgcttttctaagtatggaaggaaagtctctacgccacctgagttaagtctagcgtttaatctctcatccatgctgctagcgtttgaaaataaattcatatccatctgttattatcacctgcgttttggtcttttctcgccacttaatttgctttgtagagcccaaataaatttgtttgtgccagctatcatcgcaccattagctaaatagccttccactttcataaatgttttcactaagtatatgtctacagcaaatactccaagtgcaaaaagctcagagttcaatattgacttcataaaaggtaagatgaaggaaataatcgaagttataatttttaatactggattttctactaaaagtagtgctaaaactccgagtatcttccatattagttcaactggctctgtctttttaagtaaatcctttgcattttgtagtaagtttgtatatacttcatcattgtcataagagatcgccttttccatatttgcgatgtagttataaacatctttcttcgttgttaaataacagttgtcttcgtaagggactgcatactctaaagcttttttataatacatccttgctacttcattttttaaatttgcattggatattatatagtcatatggttcaactgttaaatatccatggaaggtatcaatatctccacctaatttatatgcagcctcgtaaaattcaatagctttatctaaatcgttcttacactcatagtatacaccctttataaagtgtccatatacagaatttttatcttttattggctcgtatacaatcttatatatttcttcaaggtatcttttatcattagtgtaggtgcacaaaacaagcaagctataagcagcatcataatctttatctcttatagaaaagatcttatagtaagcatctttagcgctatcatactcacctttgtttctatagtagtcaccaagtgctttccacacagctggatactttggagtagcctttatcgccttgtcaatgagtctatatgcttcattgtcatcatagcccataaggcctctagctttctcaagcgcctcatcaactgtcatggagctgtcattattattttgtttaggctgtgttcttgggcttggctgttgtctaggcgcctcttgattattattccttgtttcagccttcctttgctcgctaagattgtagagataatcattataagccttctcatcttcaaagatgtccacagcttcattgattaatttaaccatctcttcagctttgtcccttttttcttttaaaggatttgatgttcttgaagtccaagttctaagctcttcatgaagataatttgcaatctcttgtctattgaaatcttgatttatatttaataatctataataatctttcatctctgcacctactcaatatttagattgttaatcttgtttgccttttccataacctcttgcttgctaagattagcttttctttcaagttcttctactctccacttaatacctgttgtcacgtccaaaacatcaacacagataatgccgtttacatcgtagctgaatgtgatttctatgccagcgccagctgatctttgtgcttgaggcaattgtacgtcagtctctcctatgatattaacatactctatgtctttatcttcaccttcgcaaatcctgatcttgatgtgatcttgattatcttctacaagattgaacgatgcagtaaatgatgctggtagaggactgtttttaggtatgattacacagttttcttctttacctgagtcaacgttatttgcaatagttcctagagcgtgtgagttaacgtctatgatgtttacacctttgatattttgatcagatgtatccgcacccttaagtagatgtgcttgtatagctgcacccatggcaacgacttcatctggatttagctcgaatgatggcttcttgcccatgaactcttcgaccatctctctaacaagcttcattcttgatgatccccctacgaagatggtcttgtctatgtcgtctttagtcatatctgcatcttctagtgtaaacatcatcatagtaagtgtcttcttgacatcttcttctataagtgagttgaataattcaagtgttatctcgattttatctctaactccgtcgctgttaataataatgtttgtctttgcctttgatgaaagcgccttcttcgcctcttcaactttttcgcgcaaatcttctatcgcatacacatcttcagataagtcaacgttgtgcttttcttcaacatagtttaaaacatatgcaagaagtgcattgtcgaagtcaaagccacctagttcacggttaccgtttgtagctataaccctaaagttaccatctttaagctccataataacaacgtcaaaggtacctcctccaaggtcgtatatcatgatgttttggttttgtgaattttgattgataccatacgcaagggctgctgcggtaggctcgttgataatcttaagaatctttagtccagccatgttgccggcgtcttgtgtagcttttctttgagcgtcagtaaagtaagcaggaacagtaataaccgcttcagtaacttcttctcccaggaaatcttccgcactcttcttcattttcttaagtataatggcagagagctcttctggagagaacagctcatggttcttgtcactaaacttgtatgaaggctctcccatatgcctttttatataggaaacagtatcctctgggctaattagggcctcctctttagcagcgttacctactacaacgccctcatcttcaaaaaatattacagaaggtgttgtacgtcctccttcactgtttggtattacctctggcttgccatcttgatttacataagcaacgcacgagtttgttgtacctaaatctataccgatttccattaaatgaccacctttcaaaacaattaatctcactattattatagttcaaattgcaaaaataagcaacaattatatgccttttagctttaattattctctttaaggcaataaaaaaagtagatgcattaaaacatctacttataatttattgaaccttaggtcttctctcgccaaataatctagatctaaacttccacttcgatacgctcttgcccgcaagccttgctccgttgtagaggtagcctctagtgcctgatctaaataatgttaagactatgaatacaagaactgctagcttcgcatagtcgttagataagattgcaatcataaacttagtaaagcctttgacctttagcaagtgctgaggtctgaagctaaggtatagaatgtatgcaagatataggtcaataaggaataaaattaagcctttaaaccagttttttccgcgctttttaagaagagccttggcgttttgtatcttttctttatataggccgtcttccttagtgttaagagctccttgcatcgcatcaacaaagtctagtacatctttcttagttgttaaatactcagtatcgttagttccgaaagtatacaatctacccttttcataataagcattcgcaatgtcatttttcaagttaatattgccaggtccaaatagttttggatctactgtaagttcagtatttattgtatccttactgccaataaccttgtaagcctctttaaagtgacttataccaacatcataatttccaatgagcaaattatacttagcattaataaagtgcgcgtacgcatcactcttgtcttttatcggtggatatatgatattatacatagcttcgccttcactaacgttagaagcgtcacaatatatcaaaaataaattatacgctgcgatatagtcgttaggaacaaaagtaaagactttcctaaaaagctcgatagctttagagaagttattgtttcttttgtagtagagagctagtacataccaagaccttggatatcttggagatgtgtttatagctctatttacataatcaagagccgccctgtcatcatatccgaaaagagcttgcgccttatcaagcgcctgatcaacagtcatagtatttgcttgtggctgcggcttaggttgtggctgcggcttaggttgtggctgattagccgctctaagctcattaatgtagttattataagcttcttcactttcgaaaattcctatagcttcagaaacttccttaaccatgaactccgccttatctctcttttctttaattgggttagacgttctgttagtccaagttctaagctcgttgtgcaaaacttctacaagctcttcacggcttagattagagttgagtcccaacgttttaaagtaatccttcatctcatcaccttttttatgtttagattcatatatcttaaaatatattccttagtaatattataatttaaaaataaaaaataagcaatagataagcaaataaaaagtagataccataaaaagtatctactaaattagatattaaaaatctttatttctaagcctagtctttatattatgtccattaaggtaataataatccacacttttgaatggtatattctttagagcgtaatcgagaaaaatctcatccccttcccaatgaggactttcataaaattcctcctcactcataaacttaagagtgccctcagaacattctttaatcgtgccagtataatcatcactgtagtaaacatgtatcgatacataatcatcttcatcaagatgtatgtagcgaacctcccccatgtagtaaaaagtctttaacttaagattcgtctcctcatagacctcacgcaaaatgcacacatcctttgactcgcccggctcaatcttgccaccaataccgatgtgtttaccgtgattaatatcattcttctttttattcctgtacaagaacaaatacttattagtaatcttgtccttaatatatataacagtgtaagcttgctttaatttcataataaattatcgtttatttacaaaatttattccaaaaatccacccagctgccatgtacttctct

SEQ ID NO: 27 - DNA, 220890 bp, Peptoniphilus rachelemmaiella
  source 1..220890: mol_type = genomic DNA
tccaatttctaagcgcttcgatccataaaatacttttcgcctgtatttcggagcaaacactacgtgatacttacaattccattttgtgtgtgataaactatgggtgtgatttagtgatgtcattattccctcctgattgtgattggttggcagacctttcttatcataccattctgggaataacgggtgattatcgctaaagctaaacggaacccccggtctaaccgggggttttctaatgcaataaaaaatgcgcaccgaagtacgcatttttgctatcttaattatttttagaaggcgggctttatgtcgtgatccgaacgtttcttgcccatgcccattttgccgcaaaccgtgccgattaatgcgccgacgacgccgggtacgaaccagccaaagccgaattcggctaagggcaaactgtcgatcaaattggcggcgccttcgaaggaaccggtcatgttgtaaatggtggtaaaggatgcggccacgatggtgcctacagccataccgataatggttccgtcatagggtaacttgcgatcgaagatcatgatgaaggacatggcgataatggcgggatagacgatgtccaaaacgggaccggccaagccgataatgccttcgacgccgacgagggagaaggtaaagcttacgaggacggatacgcagacgatgtattcgtatttccacttgccgttggaaacggagttaaagaagtttccgcaagccgaggttaaaccgacggcggtggtgaggcaagccaagctgactgccacagccaatgccgcttgaccccatttacctaagagcaggccgacgctgccgacgaggatttcgacgcgggttgcatcgggaccgaagtgggtgccgccttgggcgccgacgtaggtgaggccgccgtagatgatgattaagagcaccatggccaaaacgcaaacttcgacgatcattttttgcttttcagccttcggcgcatcgccgtagccttttcgaatcaagtcgccggttacgatggcggtacagagtaaggataccatggcatccatggtttgatagccttcgatcatcccttgggtgaagaatcccgttccctctgcggggaggacgggcccgatgggggtcgcaatggcttttgcaataataagtcctaagaaaatgagcagtaccggcgtaatgtaattaccgataatgtcgataacgcccgtttctttaatggacagtgccagggtgatggcgaaaaagatgccggatgttacccaaatcggtgcgccgggaaagaagggcaggatgccgacttcgtgggtggtggctgccgttctcggaatagcgaagaccggacccagactgatcatggccgcaacggctaagatcagagcgaaggggtaattgacccgtcggcccaagtccacggctttaccgcctgcaaaaatggtgacgactaaagtaataatggggataaccgggtctgccaagaggaagcccagcataaccgaggtccacgagtcgcctgcgtggaagccgagataaggcgggaagattaagttgcctgcgccgaaaaagatagcgaacagcgcgaagcctattacaataacgtctttcgttctactgcttttcatatagtcactcctccaacagttcaatatgtcattcattatacagaatattgaaggcggtcgctactttcatgacaaataagaatgatttatttgtgaaaacctttattcatggaaaatatttcgtgtgtttaacttgatttcaaactattttttacatcaccgtttcgtatgcaatcgtcgttatattgtatactgaataacggtgtgtcaattgaccttttttactcttgcatggcgagaagccacgagcacgaggacgtcgtgttccaacaaaagggtgccgctctcatcccgcgtcgaggcgatcatgtgcacgacgccgtagtcgccgtcgcttttgatttcgatgccgtcgacgactatggtggtgtaaaggtccacgccgggatagatgggattgacccagcgcaggtgattcatgccgatgccggcgacgacgccgccgcagtccagccccgtggcgacccaatggccccaagtggcgcttaagctgtgaaggcccgaggcgataatggtgccgaagcggcttttcttcgccgcctcgggatccgtatgaaagggccggtcgtcgtaggcccgggcgtagtcgatgatttctttttctgttaaggcgaagggatcggtttgaaaggtcagccctactacataatcttctaaatacattctgcctccttatccgcgggaggcgacgatggtgccgccgcctaccactttatcgccgtcgtaacagaccacggcttggcccttggcgatggcgccgtggggctcgtcgaagattaaggtaatgtttccgtcttttttgtcgattaaggtggccggcgtttccgcgccgtggtagcgggtgcgggcggtaactttcatttcgttggtttcggggtagctgagccactgaaagtcgacggcgtcaagttccttcttcttcaggctgcctttgttgcctacgacgacttggtttttctccatgtccttgtccagaacgtaaaccgggtggcctgccgccacgcccaggccctttcgctggccgatggtgtagcccacggcgcccttgtggcggccgagaatgcggccttcttcatcgacaatattgccttcggcgtaggttttgttttccctccgctctaaaaaacttttgtagtcgccgtcgggaacgaagcaaatgtcctgggaatcgtgtttcttcgcattgaccaggcccgcttcttcggcgattttacgcacctcgctcttttccaaatcccctaagggaaagagggtgtgggccaattgttcttggctcaggctgtagaggacgtaggactgatccttcttttcgtccgggcccttcaagagggcgtagcgcttaagcttctcgtcgtattggatgcgggcgtagtggcctgtggcgatgtagtcgcagtccaattcccgcgcccgggtgtaaaggtcttcgaattttaagtagcgattgcagtcgatgcaggggttgggagtccagcccttttcgtaataggcgacgaatttgtcgatgacttcttcttcgaatcgctcggaaaaatcgtagacgaagtaatccatgccgagcttcgccgacaccatgcgggcatcgtcgatgtcgtcaagggagcagcaagtgtggccggtgtgggccaccgtgtcattttcgtacagtttcatggtcacgccgatgcattcgtgcccggcttttttcagtaagtaggctgccacggaggaatctacccctccggacatggcgacgagtatgcgactcacgatctcttcccttctactatttcttttaatgcgtctaaaaatccttccacttcttccatggtgttttctctgcccaaagacacccgcataggggcgcggcctcgttgatccacgcccatgacttcgaggacgtggctctttgtggcggcgccggcctgacaagcgcttcccccggagagagcgaagccgcggcggtccaattgatacaataaaacgtcccgggacatgccctccaccatggcgtggacgatgcggtcgtcgccgccttctgcggtaagcacgacgccttttgtggcggcgaggccttcacgtaggcgaagactgaggcggctgattcgtacggcctcttcttctctgcgatcttccgcctcttttaaggcttccaccatggcgcagatgcccggcacattttccgtgccgcttcgaatgccccgctcctgaccgccgccgtagatgacgggctccagctcttttcgcgtcagcaaaatgcccacgcctttgggcccgtaaaatttatggccgctcatggccacggtatcggcgaaggcgtagctgtctcttgggcgatggcccgccgcctgcacggcatccacgtgaaagtgcacgccctcggggagaccgccttttatctcggccaggggctgaagagagcccacttcattgtttacggccatgacgctcaccaaaaaggtgtcttctcttacggcggcaaggatgtcttcggcacggaccacgccttttttatccggggcgatgtaggtgacttccacgccctctttttcaagggcttcggcgcatttcaacacggcttcgtgctcgatggccgtggtaatcatgtggcccgggctcttttttctgtttttgtaggcactcatcatggcgatgttgtcggcttccgtgccggatcccgtaaaaaggacgtttttcatggaaaggccgaaaagattggccacatccaggcgggcgccttccaaggcatttttcgcctccctgcccaagcggtgttggctggatggattgccgtagcctgcttttaaaagggcggtcatggtgtcgatggctttttcgctcatgggacaagtggccgcgtggtcgaagtatatcatggatctcctttcataaaaacagcccctcgaaaggagccgtcatctcactacagggccttcgcccgggccttgagggccgggggtacgcggcgggattcattgattttccgaatggtctttttctgcaccgaaggggaaagatcccctgttgccaatcgctttaacacggcctccggctcgtatagggcggcttcggcgaaaaaccaggccatggccatgtccacgtagtaatggccgttttccacgcctgccacggcttccataagcctttttgtgtcttccgtcacatggcgcagggccaaaacgatgcccaaacgtctgccgtagggcgcaggggactgcatgaggcgaatgtaatcctttaagtaattcccctgatagaaggcccgtgggtcgatggcatccaccaccgcccagttgtctaaatagggcacaaaggcgtccatagctttcagggcttcctcggcgggcaagtcgttaatcaaaagcccgtggaggatattttcctcgtagctttcgtggggcagcttctttaaaaaagagggctccgcttccttggcgagctttcttaaggtaggcatgttcacacctaaaatcatctccggcgccacggtggggatcagtttctccaaaaaagctttgtgtttcgccgtggccaatggcttcagcgcctctcttactgttttcatttcaccaactgatagataataaagagaaggaccaaaagggcgatggccatgaggaccgggctcatgcggccttttttcgccggcgcctcttgcgcctcggtttggattttctctttttctaatttgaaatcatcggcggcttcgattttttccttcggcttttccaccggctcttcccgtttttctaccgcttcttcccgtttttctgccgctttttcttccgcttttttcgcaggcacaaccgattccttcttgaaatcgtcagcagcttcgattttttcttctgctacaggttctttttcaacgggggcggcttttttctcttccttggtttttcgggcttcgccttcgccactctttctttccccttcggcggattgctttctcgccgctttttgtttgcgctttaaggcctgtcttttgcgcttgtccatgggcttggataaatcgaaatcatccgccgcctgaattttttcttccggttgggaatcttcttcaaccacggattcttcaactgcagcttcttctgcaatttcttcaaccacaggttcttccgctacaggcgcttcaaatgtatctgccgcttcgattacttcggccttttcttccgcaacagcttctttgaccgcaacttcttccgccacggcttcttcgactacagcttcttcgactgcaacttcttcaaccacggcttcttcgactacagcttcttcgactgcaacttcttcaaccacaggttctcccgctacaggcgcttcaaatgtatctgccgcttcgattacttcggccttttcttccgcaacagcttctttgaccgcaacttcttcaaccacggcttcttccgctacagaggcttcggtttcttctgccacagcttcttccgctacagaggcttcggtttcttctgccacagcttcttccgcaacaggggcttcggcttcttcaaccacaggctcctcaaccacagcttcttccgccgcaatttcttcctctaccaccggagcctcgtcctcgggtttgtagcctaagggatagaccatgggcgtctcgcaggacgcacagtatttgacgccgggcacattttcttttccgcaaaatcgacacttcatttcataccctccttgacatagtcctttggatttatctatacccgatgaatgactatttatcgcagaaaagcccctgcctcgaaaaatttatttaatttttcgccatcttgattaatttatccacgggcaattgggcgatgagtatggccgcaaacaaaagcacacagccaagagcttcccgccccgtcatggtttcgtgcagaaacaaaaagccccccaggagggaaaacaccgattccaaacttaaaatcaagctggccgtggtggggtctgtgtggcgttggcctaaaatctgcagggtaaagcccacgccgcttgagagaatccccaggtataaaatggcgggcagggccttggcgtattccccgaaaagggaggccccggtgggcaggacgaaaaagaaagaaaggatcgccgccgtaaaaaactgaatgcaactcatggccacgccgtccacatcctcggcaaaatagtcgatgacgagaatatgtacggtaaaggcgatggcacagagaaagacgagaaaatccccgaggcccatggaaaagcccgcgccttttttgatgctgataaagtacagccccacggcgccgacggccacggcgagccaggtctttttggaaatggcgtggcggagcaaaatcccgccgatgggtacgaggacgatgtaaagggccgtaataaagccggtcttgccggcggtggtgtacttcaggccgtattgttgcagggccatggccacacttaagcagatcccgcaacaaatgccgccttttatggtggcatgtaaatccttgcccgtatcccttaatttcggaacaaacaggagaatgaccaaaagaaaaagccctgccgccagggaacgatgcatattcagcacaaagggatggatgtggttcatgccagcgacttgcaccaccacccccatgccccaaatcaccgtggtcaataccaggaggaaaatggcttgattacgcttcattcccgcctcccttatttaagaccacgccggtggcgtgcatattgaaaatcgcctgaaagcagagcttgtccttttgaaagaaatggacttccacattgtcgttgaccttgccccgcttgttgaaaaaggccttggccaccacttccccttcgtaaaggggggcgtggtagaagcaggaggcaccttgggtcaccaccacgcctttgcggttgcaaaggatggcgctgattacatcggccatgccgaagtggatcatgccctggcaagtgccggcggaattaatggcgccgggccacacctgccaagtggcggttagggcctcttgattttgctcaagaacggtcaattcggaatcggccatgaggcggtgatccacgctgtcttctaagtattcgtagcgagccataaatcctccttactccatctcgatctgttccgcttgcggcatataggccatatcaaacatgcccttggcacaaagcttgccctcttgacgcacctcagccgccatcaccgaggtgtagcttcccactttttgaaaggaggcggtaatgtaggcatcaccgggaaggacggaatggtagtaataaaagctcacgcttttggtaagcaaatgattgtttcgcaggccaagcgccgcgcaaatggcgtcggtgacggaaaaaaccgccccgccgtgggcgatgtccgcgggatttaaaaccgtcttgtctacatgccaacgggcgtgaatctcatcgtctgtatgctccaaaatcgtgagatcgaaaaggcttgtaaagcgctgaaaaatctcctgcacccgttgttctctccatgcttccatgttgcacctcctataaaaaacgcaattgcctgctgtaattttcttccaatgcggacacactcagccccaggaggcgaagcttctcgccgccgtaaagggaatcgaaaagggcctttgcctcacgatacagcgccttttccccttccaccggcgtgggaaaggtcttggacttggtgtgggtgtcgaaatccctcgtcttgatctttacggtcaccgtgtagcccacaatcccctttttctccataagaaaagccgtctctctcgccgattccatgagccgctccttaaaaaaagcgcggcttctggtctcggcgaaggtttcttccgtgccgatggattttcgcttcctgcccggcactaccggccgcatgtccacgcctcgcacccggtcgtagagctccgtgcccattttgccgaaagtttcctgtaaaaaatcccgctccaaaaggagcagatccgccccggtgtgaatgcccaaatcgttgagccgcgccgccgtcttctcgccgatgccgtgaatcttcgaaatgggaagggttttgatgatttcctgcccccgcgccccgtcgatgaccgtaaaacccgcgggcttgtccatatccgaggcgatttttgcgagaaatttattgtagctcagcccgcagctcatggaaaggccgaagcggtgcgccacttcccgctgcatggtccgcgccacagcctcgggatctttctcccccgttaaatccaaataagcctcgtcgatggagacctgctccattttgtagccgaagctgtgcaaataaccgaagacctttcggctcacctcgccgtagacgccctttcgcgtaggcaccacgatgagattcgggcacaaacttttcgccataaacatcggcatggccgagtggacgccgtattttctcgcctcgtaactggccgtggtcacgatccccgaaggatttctcccaccgacggccaggggcttgtttttcagggcgggattcaataaaatctcaacagaggcgaaaaacgcatccatatccacatgtaaaatgttcaaatgcatcaccaatccactataacaaaaaaccgccgccggcggaagtgcgacggacaaaggagaattcatgaaacaaaaaattgccctcttcgatttcgaccgcacggtcatatcgaaagactccatttttatattatacgacgtaacggcaaaaaaaatcccgggctttcgggcaaaactttacaaagagctcttggcgggaagcctctttcgctcgccgaaaacggtgaagaaaaatgttaaaaacagttttctctccatgcttcgctactacacggaagatgaagtgaaggccttcgtctacgacgacgtcatggcctacgcctttaaagaagccgtagacgagatctatgccctgaaggcggcgggctactacctgcttctcgtctccgcttccgtggaggactatttgaaatatgtaggcgacgtgctgcccttcgatcacattatcggcacctccaccgacgcgcaatttgaaatggtgggggacaacaacaggcacgcaaaaaaagtggacaacatcctcgcccatctcacggaaaaaggcatggaaatcgactacgaaaacagcgtggcatacagcgattccctggccgccgatcgccccatgatggagctcgtgaagacacgctatttaatcaacaacaaaaccgacgccgagggctatttgcatctgaactggcaggaaaaagcccaaggcccccttcgcgcctgattcgattaaactattcattcccgggtatctattgaccaaagtatttaacaaattgatgaatgcacctttacgtgcacataatagatcccagattaggaaggaatgaagtatgagtcgattaattttttacggcgtcgacgacgaggcgcggcgagcccatttgctggaagccgccgaggcccaggccattgacgtgcgggaagttaaaaaagaagaagtgggcgagcttttgggctactttgcaggccttgaaggctacgaaaaaaccggggaggcggcagaggcgccggaagaagagctcttggttttcgtgggcctgcactcccacgatctgcaaaaaatcctgctcaccttgcgtgaaatgggcgaagtcttcccccacaaggcggccatgaccgaaaccaacaaagattggcccttcgcccggctcgttacgcacattcgccgggaaaatgccattattcaggcctggtcccaaatgatggccgtggccaaagaagtcattcaggcgcaggaaaccgaacccactcaagctcgggacgaggccctcacctttgccaaagaccttcgcttaaaaggcgaagacatcgaagagagcgatgtaagagaagccattcgccgcttaaaagaaagcttgtaaaagaaatgagcccccgagaggaggctctttttttacggataaattttctgccctatgggcacattccgcctagtgcaaaattctacacgacaggctcccttatgaagcctgaggcagtcattttttaacattccacccccggttgcctccgggggttattaaatttctccctttaaaaggcctcgcttcatgtaggcaatgatttgaaaggacacattgagcagaaagcgtgtttggctgtcgctcaagtcgacccggcaaaggtctgtaatgcggtgcaggcgataactgaccgtgtttcggtgaaggtaaagttctttggctgttttttggacagaggcttcacaggccaagtaagcctccagggtgcgataaagttggcttttgttctttttatcgtattccaaaagaatgtccaagccgggatgaagataatttctccaggaaaaacccttctcgcttcgtccttgaaattcttgtaacagggccagaaaaaagacttgatcgtaggaattgaccgcctcgggagttggcatttccaatgccatttgcccttggcgaaaatagtcggacactcggttcaaatcctcaaatccatggctgaggcccacaatcaaatgctgttctgatgccagatcctccagctttttcactatttttgcgaaggaagatttttctttggaaaaggaaagaaagagcacggcccggttttgaatttgagccaagggaggagcgggaaaatgccgccgaatcgtcgacataggcggcggcattttctcttcttttccgcagccctcgaagacggcaattcgatggatttctcccatggcaagtaattcatttgaatggtccaactcttcaggatgggccccgaccaggagacgataaaacgcctgatccacaggtcgcccctccggagagggaacgggaagaagtcgaggcaggatttcttctaaaagccggctgatcttcggtagattttcataatgcaccgcagaaaggggggaagattcttcgataaggatgatggcgccccaataccggccattgtaaaaaatcttgctgtaaatcttcggactgggcgtatgctgacaaatttccccaaggtacgcttctcggctccgctcaccatgtcgaaatggcggggagctttcacttgccttgattaaaggatacaaacagtagcctcgctgaacgattcgagcccaaaggtcttctttcaccgacgggcaattggagcttgcgataacgcggtaatcggcatccagtaaaatcaggggattgtctaaacgcaaggccagggcattaataaagctttcaaaatccttggcctgatacgccaagtctttaaattcttcatacaaatccggcacttctttttcccgaagcagttgctgcgccctattatagacggaaaaaatcttatcctcgggaaaccgaacgaagcaatgcacctctcctttaatttttgcatcgccgaaaagaaagccctgacggggcggattctctccgaaatcataagcaaagtaaagaacatcctccctgtagctctcttcactgccgtccaaaaggcgcacctcgcgaatggcgggggcctcgtcgatggccaagtcctgaagggcaaaatggtttttcaaaagatgaatgagttcgccaaagtacataaaaagctcctctaacaattgatttcttttattttggtgcattttgcacaaatggtcaaggtttttttgtccgacgcgtccattgttggcttccctttgcaaacgtatactaagggcacgaagatttcgttacgaataagacaatttgaaggaggatcattatggatcaagttgaaaagttacttgcaatcgaggaaatcaagcaatgtaaagcgagatactggcgcgccatcgacagcaaagatttcgatctcttaagaaccgtttttgcagaagacattgtctttgacctttccgattccactcgagaccccctgaagggacagcatccggacattcccgaaaagttggagccctcgagatcctgtgagcaaattatcagcaactcaaaaaaactaatgggtgcgactacgcaaagtgcacacatgggacatattccggaaattgaacttacatcagaaaccacggcaaaggcctatttcccctttgaagacaaagtcatcacccacggctttgccgcattcacaggctatggttactacgcagacacattcgaaaagatcgacggttgctggaaggttaaaaccagcaagattcaccgttaccgcgtgattttcgacgatataaacgactaggaggcactatgtattcccatttattttcaagaggtaaaatcgataaggtagagacgagaaatcgcgtcgttatgcccggcatgctgacgcttttggcggatccgtacggtcgcgtcgacgacgccttggtgaaatattacgaagaaagagcaaaaggcggcatcggcctgattattgcagaatatgccaatatcgactttgaaaccggtcgcgcggcaccaagccaattgaccatgctggatttaaattccgccttgtccattcaaaaaatcgccagagtcgttcatcgccacggcgccaagtttttcgcccagctcgcccatgccggtcagggcgccaatcccctcttattagacggaaaagaccccatcggcccttcggaatccaccacccctgacggtcgtcgggtgcgggccatgaccgtcgaggaaattcaaaccttaatcgatcgattcgttcaaggggcggtttatgcacaaatcggtgaagcggacggggttgaaatccacgccgcccacatctaccttctctcgaccttcttgagcccgcacttaaaccgccgggacgatgcctacggcggaagccacgaaaatcgtgcccgcgtcatttgcgaaatcatccgcggcattaaggaaaaatgcggtaaagattttcccgtcagtgtccgcataaacggctcggattttgtcgagggaggcaccaccttggaggatgccgttatcacggcgaaactcctcgaagcggccggagccgatgcgttaaacatttccaactccaccttcggcgctgaaaagcccgtcatcgaaccggtctttttcggccaaggatggaagaagcacttggcaaaaaccattaaagccgccgttcagattcccataattgccgtaaacaccattaaaacaccggaatttgcggaatccctcctcgaagaaggggtcagcgacttcgtcggtttggcaagacagtctctggcagatccttattggtgcaaaaaagccatggcaggagaagaagaccttatccatcactgcatttcttgtctgtattgcgccgactgtgaaagtaagttcaaagtcgtctcctgcgccgtcaatccgaaaaccggcagagagtctgaacttgcgcctctaaaagtcgacggccaagggcgacaagtggttgttgtcggcggcggcgtcgccggcatggaagccgcctctgttttaggtcagaggggttttaaagtcactttatttgaacaaaaagaccatttaggcggcgataccttcttggccggccaaccgcccatgaaagattggacccaccaattgcccgaggttctgaaaagagaatgcgacaagtatggtgtcaccattcatttaaatcatgggcccactgtcgaagagatcaaggctttaaatccctacgccgtctttgtcgccaccggtgcggatccggtgattcctaaaaaaattcccggcatcgaatccgatcatatttacaccgtcggccaaattttggatcaagaggtagccctttccggaaagaaaatcgtcgtaatcggcggcggtctatcggggctggatgtggcatctttcctggcagaggacaatgacgtccaagttgtggaaatgcaaaaagccatcggcatcggcgtccttcccacctacattaagccggaactggaccacttaaaggaaaaaaatgtgactctccacacgtctagcgcccttcaatcgattcaagaaaaaaccgtcaccatcgaagatttaaaaacgggcaaggtctttgatttggaagctgatgccgtcatcctttccttaggcgtccgccctaataacgagaaaatccaaacgattcaagacaatttcgaaaacgtccgcgtcatcggaagtgccgtcgccaccaccggtcgcatcggccaagccatgcgagacggcttcgatgccgcctacgccctggattaggaaggagacagccatggaaaagagtatgccgaaaaaaattcattatgcctggattattttaattgcctgttgtttgatgagtgttgccggaatcagtattttcggaagctgcatggggatttttatgacgccggtatccgaaagtctcggcgtggcgaaaagctcctttaccctcgctacggccaccctttccggattggtcaccggttttttgagccccttggccgtcaagctcatccaaagaaaaaaagtcaatctcttggcggggggaagttttgcccttatggccctttctttggtccttatgtctcgtgcccaaggactgactaccatggccctggcctttgttctggccggaatgggcgcaagcgtcgtgttttacgtcttaacccccatcttaatcggcaattggtttaaagaaaaaatggccttcgccctgggaattgccctcggcttttccggaatcggcggcatgatcttaagccccttgggcgccgcttgcatcgccaaattcggctggagacgtgcctacctcttttacgccctgttagtatttgttctcggtgttttgcccgctttattcctcattaaaaaaagcccgaaagagatgaaccttcatccttacggctacaaagaagaaaaaaaagcggccgataccccatccgtaaacaatgaagaactgacgggaatgaccaaatcccaggcccttcgttccgcgaaattttattacgtcttgctggcggcggcccttatgatgattttaacttgttttacctaccacatgccgtcctacgcgccgtcggtgggcctgagccctgtcttcggcgcctccatgatctcctatgtcatgttgaccaatacactgagtaaatttgttttaggcagcgcctgcgatcgcttcggcatctctaaaattacctgcctcgttttaaccctcgtcggggccggctttgtccttttatactttgccggatccaatcccctgttcaacagcttcggggccgttctcttcggcttcatcgttccgacgaccagcatgtttctgcccctgatcgttcgaagtgttttcggcaatcgcgattacggcgaaatttactcctatgtggtcctcgttaccaccgtggcctcgtctttgggcgtaaccctcattgaagttattcgcagcttcaccggaggctacagcatgcccttcctattggctgttgtgctggtttttatcaccatcggtttaatcgcattggccttttccggaacaaaagcgacggaaaacaaatcctttgcgtcactgtaaaaattcctttcaattcgacacgttaatcattttttagaaatcagccccaacatctcaaatccgatggcggggctttttcatgctcaaaaaaatcgagcaaagtgcttgctcgatcattttctttgtttttaatccgatttgtttcgatgaaatgcactacggcttttccacctcgtcttctttttcgtctttttgctcctttttttccgccgccttattataatccacggtctccagggcatggggaagcataatcaaaatcaccagaataaaaagaagacgcaactcatagtctccaccatccataccttcctgcggaagggcgatccacggtttccacgccaataagcctaagaaaaataggctgatggcgtaaccgacctgcttaaaatcttttttcataaaatcacctcattgaagaaactttctatcgccttccgagtcacgcccctgcaccccgctccagggcgaaacggagaatggtaacgatcaatagcagaaatgccaagacgcgggagatcgttcggtcgtgtttttcaagccacgggcacttttccaatcgcacctttttcccggacaagtaaaagggcaaagtggccaaggcatagagtgtaaccagcaccgtgacaatcagttgaattcgaacaatggtcataaaggctcctttcttttcgtctcactactataacgtttcacgaaggaaaaactgtacagtctttttgaaatttttatttcttttcacggatggattcggccatttttattaaatcatccaccgtaacatctccatcaagtatgaaaatataatcttcattttccatcgtaatggaatttgaaaacccttcacgtttggacacatagaggaatgcttcattttttcctattcttaatttttttctttctccgttttcattgtcttctccaagggtaaatgcaccgtctttcgcgacgcactcaaagctaaagttttttccttcctcgttctcaaaaaatgtaatttggtatccctcatctaatttttcaattttagataccttaaagcctttcggaatataggtgatttcccagtcttttttctctattttttccttttgggtaaagtagatggcggtatggtcgctaaaccacgcttccacataggattgaatttgggcgagggcgtcgccgtgaaaggcaaagaggctcacaaggccgatcccggccacgagaagtacggcagcggctttttttaagggatttctctttttgctctttccaatggcggcgaggatttttcggtcggtttcggtcgagggggcgtagcgatggtcgtggccacttgtccactgctcttcgagggcgcggatctcttcttccgtgtttttctccatggcattttttatccattgatccaatggacgatcattcattttccccctcctctccaagcatttttcgcaatttttgtttgattcgatagagcttcacctgaactaaattggtgtttatggccagagcttcggcgatttctttgtaggatttctcttcaaaatactttaagtacaggatctgttggctcaggggatccagtttgtttaacgcctcccgcgccatttgctcccgctcttttttaagataggtcgccgacaggtcgtcgaaaccatcgagggcattatcatacgagtcgacggcccgattcgcccatttcttctctcttcgcaggcgatcgatgcatttgtatttcatcatggtgacggccacttttctgaattcgtcgtcggaaagatcggcgtaattggcttttctctcgatgatggcgagaaaacactcctggaggacgtcttccgccttttcttttgatcccaagattttgcttccgtaggccataaggaaggctttttacttctcgtaatggtcttcgattttttgattgaatccttcgtctcttctgtcctttaaaagcaaggggcgccctcctttctcttttattaaagcaaagcagatggaaaaatacaatattcgcgcccctgccctcagaaattttttcgggcacaaaaaaacaaatcccgaaggcatcgagatttcagagtgatgacaaagggagggagaatcatccgattcaccctctctttattgtgtcatcaaacagcattcgcctcaattatagtaaaatagaaaaaaaggaggcttatcatctcctcctaagcaaaaatagcaacgcatagtagctataaaaaagcaactctccaatcatttcacataatatttgtaaaccgtaagatattattatgtgatgtgacggagagtagataaaaaaatacgacttatggctttttcgtttgggacatccttgcggaatgccagagaaaaacgaaactataagagagaacagattgcggagcatgcagaaatcagtcctcgttttttagcggccatagaaagcggcaggcgcaagccgagcctggatgtcctgattcgccttgacaatgccattggcgcttcttttgatgagattcttgcaccgcaggtgaacgcagacagcgaaatcgttgaccggatcatgcggttggttccacaatgcagccagcgggatcaggagttgctgcttaccccggttgacaaaatgccggataccaaagagaagaaagctgacaaataatgcggtcgggtgtattgcccggccgcattgctctgtccgttactgaatgggccaactattttcccttttgagaagaatagtaatcccgaagtttctcaaaggattctatactgatattgtgttccatccggcaggcgtcgtattccgctctcttgggatcaacgcctgcggcgatgagcttgtcgcggaagaaacagtgccgctcgtaaattttctcagcaacttcgcggcccatatcggtcagatggagaaagcgatcttcatccattgtgagaaagccgccatcccgtaaagccgctaccgcatagctcacgctgggctttgacacctccatgtgccgggatacatccacggagcgtaccttgcctttctttttctggattaccaacacagcctccagatagtcctcgccggaagcgtacagttttttaccgggaggcattgactgcacctgcttcttgctcgcgggagaagaaagcccataagagactctcagcctccccgtccataggtcggtgccacagcaccttgctcccctgaatgaacaacaggtaggtgcagcatttataaataagttccgggtcatgtgtaatcaggaacaggctctttcccagttctttcaggcggtttaagttgtctgatacctccagcatatgccggtaatccaatccgctggtaggctcgtcaaatatcaggatctttttgtccgaggctattgcactgccaatcgccaccctctgtttttcaccgcctgacagggacatggggtgcagctttgccttctccgacaggtcaaggcttgtcagtatctccttggcgcaggctgtgtctgctttctcgtcctcgccatccatactaagtagcaattcgtccatcacatcttccgtgaatagctgatgatttacatcctgcatgaccatataggagatatgcctgcgctgcttcgcgtcataggaggccccatccatttcaagcacacctctcgcttttttatctagaccgcacagacaccgggcgaaggtggattttcctgcgccgttgtatccgatgatgccgataatctcgccttgaggcaagtttaggtccggaacatccacattgagggggccgtgcttttcataggagaaccggaatcctttgatatgcaatttcggagcggtcggtttgggggcagcctctggggacaggtggaatgggtccagtgcccgtaaccccatctcctgcaattcatcgggcgataatttttgaaactccgccccggtaaattcccgcacaatacttccatgcttcatatagagaattcgatctgcatagggaacgagataataaagtcggtgttccgcgacaatcacagtctttttctctgactgccagtgccgaatcacaccaatcaaatcttcgatagtggcaatatctaggttggaggatggctcgtccagtacaaagatatccgggtggattgcgtcggcagaggcacaggcgattttctgtttttctccgccggagagagcaaacaagctcctgttcagcagcttttccagcttgaggctgcgggcagtctcttccaggcgctcccgcatctccgggaccggcagggccatgttttcacacccaaaaacgatctcactggtggtgtccacattgtagaattgtgttcttgggttttggaatacagatcccacccgttgcccgatttgataaagaggatagtcttttaactctttcccatctaaaaggacttgcccagtcagcttcccgccgtaataatgcgggatcaggccgttgattagccgagtcagcgtcgtcttgccgcagccggactctccgcagagcaggatggtttcgccatcctggattgtcagattgatatggttcaggttgttttgggtttctccgctctcataagaaaaggaaacatctttcaattcgatcacagtatcacctccttaccacggcctgaaaaagtatgtggagagcagtgcggctccggcaatcaacaccaccagtagatcccagccagtaaaaccgacctttgtgatattggtgcgctggaccgggttatccaggccgcgggtcagggccgccgcagagagatcatccccgattttgaccaccgagatcatcaggggaataaaacggtattcaatcagagcggcggggttttgccagaatttctttgttccgaactgaacctcacgcattcgcatggcatctttgatggctgccgactcctcttgcatagtggggatgaatcgaaacaggacggagagtggaatagtgatctgccgcccaatgtgcatccggcccagcgcggtaatgcactcgctggccgtagtggatttgatgatgtaggcccccatcacataggccggaaacagccgcaggaccagccccaccagcaggactaccagcatattgacgatcatggggaactggactgagttctggatggcctgcacaaacagcccgaccacaaacaggcagaagaacacggttgccgttttatactgccggttagtcaacagcaggataaatgggatcatcgctaccgcaatcataaaggcggtgtggctgtataggaattctgcagtagcgacaacggccattagcaaaagcttggttcgtgggtctaagcaaaagcctgttctgttttcaacaactgcttgaagctgctccattacacaattcccgctctttcaaagtgttttttcagcattttatggcccagaagcgcgcccagaataccgcccacaaacagcagcgcaaagcccacatacatcatccgggagggcatcatggattgcaaagtgtttgcgtactgatcacccatggaggtgtgaatgtttttccaatatgcttcaccggcaaaccagagattggcggggcagcccatgaagccgaagcaaaagcaggcatagctcagaacagtgaccttaaatttctgatagccgccgattttgagcacgacatcgcttagaaaaccgccgagaaaccagccgagcaggccaatccatccataaccaatgaggtagaagaaaataccaccaatagcgccagtaatggtaagcattccgaattttctgattttcgtgtaatacagcatcatagggatgccgcaaacgatcggccagatcaagaacaagaacgggtatactaccggcaacgcagtcagcagtccaacaacaaagaaaacaaccaaggtcatggcagaatagatgccgatgttaataagatctttacctgtgagcttatttgtattttccattttcaaaaagtcctttccatataattagataaataaataagtaaaaaaatttctttatacaaaagcaatgctacagacgcacctcctagatagatagttagactacgctaacttatggttaaaaattttggggatcaaatccccaaaacggtttgccacccggaactgaaaaaagtggctaatgtatgagcgtattttatcgcagcatcttttgaataattgtgcaagacaatttctgcgatagatgaatagtaagaatgaacgagcatatgccactcgtcatcctccagatcatgtacggaaactccgcgatctttcagctctgctattagcttttttgtctcccgaacatcggaacgcaccacatcatccagaaaagaagcatattttgtgccggcagactgcatcagcagcaatttgaatacatcgaaatgttcgtaaatgtattcgataatctgacggatcgtgtcctccgacagtttccagagctgctttaattcatccgtccgggccaattcaaagtgcttagcaacagaatcggaatacatctctgataccgcctgaactaccggctctacaagttcgccaaacaaagcctctttatcctcaaagtgattgtaaaaagccccgtttgtcacatgagcagacttgcatattttacggatactggcacgttcaaacccgttttccagaaaatgtttttttgcacaggctaaaagattttcatgggtttgttgaaaatccattgacatttctatccctcatcctatacttaaattacagtgtaatattacatcgtaatttacgttatagcacggttacacgaaaaatgcaataccttccttgcattttgtggcctgaaaggagactttcttatgttccaaaaagaaccgggtgcaatccgccaactatttgcttttgtcggtgagagtaatggaaaaatgcgcatttctattcttcttgctgtgttgggagagatatttggtatcgtaccatttctaatggtggcactgttggcagatgaactctatcacggtacagctactccgcagagcgttttgtttttcagcggaattgctgccatatgtcagattataaaaatgcttcttacatggcgttcctctcttatttcccacaaaatctcttttacgattttgaaaaatgtccgtgaagcgattacagatcggatggcaaaagtcccaatgggtgttatgctggaaacgcccacaggaactttcaaaaacttgattgtagacaatgttgcaaagctggaagattctatggcacattttatgccagagcttccatcaaatattgcggcaccgttgtgcagcatcctcctgattttcatcctggactggcacatggggcttgcatccctaatcacagttccactgggtattctcttttttgctgctatgatgcgcggttatggcccccgaatggagaattatatacgctctgcgaataatatgaatagttctttagtggaatacgtcaacggcattcaagtcattaaagcctttaatcgctctgcttcttcttatggaaaatactcggaatctgtcaactattttcacgattccacaatggagtggtggagccaatgctggttctggaacgccgcagcgagggccgttctgccctctactcttttgggtacattaccggttggcgcatggctctatatggaaggaacgctttcactccccgtatttttaatatctttagtagttccgctggggtttgttgctccattgatgaaagtgtctgaagcgatggagcaagtcagcatgataaaaggtaatttggagcaagtaacagctttcctaaaaaccccggaacttgtccggccctctgaacctgtatctttgggagaacgtacttaccaattcgagaatgtacatttcggttataaagaaaccgaagttctccacggtatttcttttcaaaccagacccggcactatgacggctattgttgggccttccggttccggtaaatccacgattgcgaaactgatggctggtttttgggatgtgacttccggctctgtgcgtttcggcggccaggatattcgtcaaatcccctttgaacaattgatgggtgaaatcagttatgtggcacaggacaattacctattcgacaaatccattcgggaaaatatccgcatgggtaatccagcagcaacagatgaagaagtggaagctgccgcaaaagctgctaactgtcatgactttattatgcagttagagcagggatatgacacactggccggtgatgccggagaccgtctttctggcggggagcgccagcgtattacgattgcgcgggccatgctaaaaccggcatctgtagtcattttagacgaggccactgcctatgctgatccggaaaatgaggcactcattcaacaggcaatcagcaaattagtggctggaaagacattgattgttgtagcgcaccgtttgaatacaattcgcaatgccgaccaaattctggttgtggcaaacggaaatattgcaggccgtgggacacaagaagaacttctccgggaatgccccatctatcaaaagatgtggcaagattatgccggaaccatagaagaagcagacatgaaaggaggagtgaaaaaccatgtttgaaatgatacgccgaatttttaagattgcgggtagaagccgaaagaaaatcatcgttggcatcacatttaatattctcaaatcctttttcaacagttttatgatgttcggtgttttttggattttattgcatttagaaaatcttacacccactattatcctgcaagcctttggcgttgtattaggaagtgttatcggacgctttttcttccaatggatgtatgaccgtaccatgagtggaacgggatatgatattttccgtgattatcgtctggaaataggagaaaaattgaaacaggctcctatgggctacttttcagagcaaaatttaggaactattcagacaatacttactacgacgattgcggatttagagggttactccatgcttgcaatcgagcagatgacaagcggtgttgctatgacagctctcatgtcaattatgatgttctttttcaacccaattattgccattttgagtctgatcgggctattattaggtttacttgctcttcgttgggtccgcagtagagccgcacaatatactcccatttatcaagaagcacaggaaaatctggtgagtaaatcaatggaatatatccgagggatttctgttctacgctctttctccaaaggtgaggaaggacaacgagaagtacgcagcgcatttcaaaaaaagtgggatgcagattatgggcaggaaaaagccacagccggagttcttcgtttttatattctggtatataagctcatgagctgtgtgctgattgctgtggcagcattgattttcatggcaggagaaattagtttgccgtattgtttgactttcctgttttgtgcgtttacggtgtactctgatttggaaactatgggaaacagtgcttttttgagcaagaaaataatcacagaactggaacgtttggaagaagtcaccaatataccgcaaatggataccagcacagataaattaaaaacttcccactacgatatagcactggattatatctcgtttggctatggcaagcggcaggttatccatgacatctctttggaaattccagaacatacaacctgtgctattgtagggccatccggcagcggtaaaacaactttgtgtaatttaattgcccgattttgggatgtgcaggacggcgctgttcggattggaggaaaagatgtcaaaaattatactgcggatagtattttggaatatatcagcatggtctttcagaatgtgtatctttttcacgattccattgaaaacaatatcaaatttggtaagccggacgccacacatgaggaagtggaagccgccgcaaaacgcgcttgctgccatgattttatttccgcattgccagatggttacaacacaatcattggtgagggcggttctacactttccgggggcgaaaagcaacggatttctattgctcgcgccatgctaaaagatgcccccattatcattttagatgaagccacttccagcgtcgatccagaaaatgagcaagcacttctatctgccattgtagaactaacaaagaataaaacattgatttcgattgcccatcgcttgagtacggtgcagaacgcagatcaaattgttgtaataaatcaaggtagagttgttcagcggggaactcatcaatctttgatttcacaagaaggaatttatagaaatttcttaaagcaaaaacttgaatccgctggatgggcactctaattaagttaagtacttttcaggggcaaactcattgtagcaagcaatgcctgtgttaatacacacaggcccgcagagaagaaaatccctttgtgattttcctctccgcttgcttgttgagggcagcgcccccaagcccctttgaacacagaatttcattctgtggctgcgcgttctgtgaacgcttttgaccaggaccggcttaccgctggccgtggtctttttctttttcaacatcctgaaatcccgaaggccttgagatttgtcttaaaaaatcatttcatccttaccgcagcccttttttcggaaggatgaattcgaaaatggtgcccgtcgggggattgtccttaatttggatttttccgcctaagcggcgggcgatttctttgaccagggccaggcccacgccgtagccgtcgtggtttctcgaaggatcggcccggtagaagaggtcgaaggctttcgcctttgcgtcatcatccatgcccacccccgtatcggccacggcgatcaccgcatcgtcgcctttttccgagaaggtgatggttaatctgcccccgggccggttgtatttaatgccgttgtcgaagagattatacaaggcacgctcaagaagggcgtcgtcggtttcaagaaccatgtcttctccctcaagggaaagggccacgtctttcgcctcggccttttcctccagatccaaaagaagctcctgtgccatggccttcacatttaccgggcgaaattccggggcaccgtcgcgacctaaaaagaggacctcttctactaaatcgctgaggcggcggatgtttttctccatgctttccacaaaggcagaaagttccggatccatggtgcctctttttttcttaaacacgtccatgcgggtgcgcaacacggcgaggggcgtgcgcagttcgtgggccacgttcacggaaaagagccgctctttttcgtaattgtcgtagattttatccagggtcttttgaaaggcttcggaaagggccacgatttcgtaggctccttcttttaacacgaggctatttttttccgccatggcatccatgtccgtggccgccactttttccgttaaaaccgcgagagggctcaaggtgcggcgaatcaaaagaataaatatggtgccgccgaaaagccccgtggcgagaacgacgccgagggcgtagagcttaaaatccgccaggtggcgcacttcctcctggtcgataaagaccatgaccgagtcgtctgtctttcctttcatgcggctttccacttgagcggtaaggttttcggcgatgtcttgctggcgccgggcgatgagaaagtttgataggacgagcatgagcataaaaagggccacgctcgccgccgtcagcttgaatataatggagcgccgggttttattccctatcaatgacatacccccttccgatttcgtttcgaatgatgttttctcccagggcctctttgatctttcgcctcagggcggacatatgcacccgcacggcgtttgacacgtcgcttacattcatatcccacacgtgttccataagctcttcggcggagatggtgcggccctgattcaagatcaggtattcgaaaatgcccagctccttggccgtaagcttaatcacttccccgttcacggtgaggattttcgtcccggtgtcgaaggagaggtttttgtacgtaatgactttgtcttccaccacctgttttcggcgaaggagggagcgaatccgcgcctccagttcatcgaagtgaaagggcttaattaagtagtcgttggccccgaggtccagcccctttacccggtccgccacttgggtgcgggcggtcagcatgatcacattgacctgcttgtcttcctcgcgaatttctttgagcagggtgaaaccgtcgattttcggcagattaatgtccagcacgatgaggtcgtaggtctcgctccaaaagagatcctccgcctcgacgccatcacgggccgtatccacggcgtagcccgaaagcctgagcccttcggcgacggattccaacaattctttttcgtcttctacaattaacagtcgcatgggcgcctccttttttctcattatagcaaaaacgcaaacaggcggcgcctctttgcgttttcggaatcttttagttttcaggtattgcttttgttgtctgtttcatagaaaggcctttggtaatggccccggtggggcaggctttctcgcattggccgcagcggatacattcggcggcgtttgcattttcaacagggttgacgttcattttacaggccctcgcacaagcgccgcagtgcacacaagcattctcgtccagtctgtatttaaatacggaaatggaattgaagagagagtacacagccccgagggggcaaatgtatttacagaatgggcgatagatgatgaggctcaggagcactgtggcggcgaggatggcgcctttccaggcgtataaaaagccgacggcgccacgcatactttcgtttttcaggaccagggggaggcccccttcaagcatcccgacggggcagataagtttacaaaaatacggggatccctgacccaggacgtccacgagaaaaagggggaggagtaggacgaagatcagtaagatggcgtattttatttttctcaaatgcttgtccgccttgaagctttttattttcttcggaaagggaattttgtgcaaaagatcctgcaccagaccgaaggggcaaagccagccgcagacgaagcggcccataagggcgccgataaagaagagaaatcccaccacgtaaaaggaaaatttatagtccatatttcctatgacggcctgcagggcgccgatggggcatgcccccttggcaccggggcaggaatagcaattcatccccggtacgcagaggtttttcattttgccctgatagattttgcccgtcttaaatccttccaggtaggaattggtggcgagaaaccacaggccctgaaaaaggtggcgcttcgtttctttcatggattttttttcactagccaatgccgatacactccatgcaaattcttatggccttgttcagaaccacctgcatctctccccgattgacgccgtaggccatcatggccacggaggcgaggagaatagcagggcctaaataggcacggtatttttctttcatcttactttacgtttttcaattctttttccacaatggccttccattcgtccaagctcttggcgccggaataggaatcgccgacaatattgcccttgctgtccacgaagaaggtttcaggcaatgcttgaatgccttggaggcggcccttcattaattgatcgtcgggttttaagaaggggtaggtggtctttaatttcttttgaatggccttggctttatccaatgcatcgggaatgtcttttccgtcttcgtgggtgtccatgaccacgccgacgacgccgacgcctttgtctttcatttcggcgttcagcttttccagatcgggaatttcctgaatgcaggccgtgcaccaggtggcgaagacattgaccatggtgagtttgttcttggccagatccgcgtcggtaaaggccttgccgtcgatgtcttgggttttaaagggagcaatggatttcgcatcggacgtttgcttcatttctttttcttggaacacatagccgttttccgccatgggcgtttgatccatggtttcaagcttcacgccctttaaggcttccagaatggcgggatccacatctttcgccgtggacaaatagtaattgtactttccgtctttgctttcaccgagtttcgtatgggtgtctaatttggtgaccttactaatggcggcctcgtccatggatttgtcgtagatcccgatggtgccagcccgcttaatggcttccagccacttcggatagtcgtcgcccattttcgggatttccttgttcttgtcttcttccgttaaagcggagaaggtgagcatggcgtatttaatttcgtttttctcgcctaaggactgatcgtccagcatgatcacgtcttttttcgtcatcatgtcttgtaagtttttcggcaaagtgatttttgcacccatgtagggaaattcataagtatcttttacttgccaggcgtaatcggcgggcttaatcatttcattgcccatgccggccttggaggcctcgatgctttcgccttgggccacttcttccggatggtcttcccggcgattgtctttcttctcgcaggccaagaggctgaagcttaagcttgcgattaaagcgcctgccaaaatctttttcattttcttattcatgtgaacactcctttttcgatggtaaatccattttaaccgacggcctgttaaggccatgttaagacaataaaaatccgaggaattatttttcctcggaatgtttaatcggacagggcatctttaaattccccaatggccgcctcgaatcgatcctgaagcccctgaagggcagctaaatcgacatttttctcatccagggcttttgtcagcgcccggacataggccttttccgttcgcaacatatctttttgcaatcgcctaaaggtgcgaagggattctctgtccacgccttacacgtccttgtggttggggtagtacatttcgtccatttcttcggtgaccgcttccacaatgccgtcgtctaacacgtccagaacttctttaaagacctgcatcttttcttcgggcaccttttcttccaggcatttcaatacatcttccacaaaatcgtaattgacttggtagtacttcttgaatttgtccgtaacaaacaggtgtacttggcggcggtctttttggctgcgtactttttctacatggcctttttccactaagttattgaccttgtaggcggcattgggttggctgacgcgaataaaatttgccagttcgttaatggtcggcccttgcaaggcataaattgcctcggcacaaaacttttccatcaccgttaaagaatccgcttgtcggttattgcgatacagattcttgtagaaatttaatttgtatttcaaataaattgaattcatgacttctttcatcgatttattgttttccattacacacctcactcgattagataaaagactatgatcgtgccatacataattaatcgttagattcttgccaaatccattgaatttagaaaagaacaatgcccgcatcgggattgttcttttttcgttaaagcgaattgtcgcttatgtattggcggagctgagaggaatcgaacccccggcacgtgccttaggagggcactgctctatccaactgagctacagctccacaatgaatagtatacgcaggtaaattattttttgcaattcatattcattgccacacaaaaatcttttacatttatttgtatttatcttccaatgcgatcatgcgcatgcgtccttcttccatttcttccacttgatagacgtagcgttcgtcttccacgacaccgcctaattctacgattttaccctgttcgtcgaatattttttgaatgtaatcccctaatagctcttctttgctttcgatgtctcgaaccaagtgctcattgactttgtccattttcgttttggcatcgaaaatagccacgccggcattggcgaggattttgtggatggtaaagtatttgcgcacgataaataagacggcgatggccaagacgccgatgaaaagatcccgcgtgttgtcgccgtaaataagcatttttctcgccaccaccataatcataatgtagatgatttggtattcctcgtgattaatcagcatggccacaaattccaggccgatgaccattaacagcacgtgggagagaaaatcctgaaagagctgatagctgcttcctttggtgctgtggaggatgtccaccatgtatttaaaaagatcgggaacggagataataatcccgaaaataatggtgacagccatagcaaattccaaggcgtagagcaggctttggagcccggatacatattgctttcgattcatcccatttctcccgacttttccatttccttacgcattttttccaagagttttttttcgatgcggctcacggtcatttgggaaatacccaattttttcgcaatggacacctgggtcttccggtactggtagcggtcgattaagatggttttttccacatcgttaaacttttccatggcccgttgaataaaatcgttcatctcgactttttggaagtattcttcttccacgccgattttatctccccgggacagatccctgtcttcgcttcccgtatcgaaattcatgtccaaactttccggcgaatacaccttcgatgcctccattacttccagcacttccgccgtggaaatgtctaaaaattcggcaatgtcagaaatggtgggggtcttttggttcgtctgggccagggttaatttggcgtcgttgatttttttcgacaactcctgcaccctgcggggcacgcgaatggtccagcccttgtcccggaagtatttcttaatttcaccgataatggtcggcgtggcaaaggaggaaaattcaaagcctttggacggatcatagcgctccacggcaaagatcaggcccatggaagccacttgaaagatgtcgtcgtagtcgatgccctttcccgtgtattttttcgccagaatttcggcgatgtaaaggtgctcttcgattaaaatgtcccgaagggtcttgtcgccggtttcggcgtattcggcaaataattcctttcgcttctgttttgaaaggggccgatccatgttgtaataggcttctttgtccatgctacgctccgaaggttttgtagacgaggagataatcgtcgccataggaaaattcatcggccaaggattcgataatcatggccgtaatggccaggcgctcgtcggccttcactttttcctcgctaatgcccgagacgcggaagcgaatggccccctcttccggctccatgacgatgtcgatggtgtctttcatgccgatggcaaaggataaattgcagctttccgtaagaagcaggcgaatatcccctaaagtgtctatgtcgatgtcttcttccacgcaaatccccgacacatttaagcgggccagggataggtagcgtggcttggccggaatggttaaatagactttttctcccattaggcctctccttcaatgtgaaataatttgtccagtttcgtaatggtaaagagcttttttacattgggatccaaatgctttaattgcacctgatggccgttttctttgacgtaattgagcaggtaaataaacccgcccagtcccgtggaatccacgtagtttaaatcggtgcagtccacgagaatgtttttcttatgggcgtcgtaagcggccgtggcttcatctttgaattgggccgtgtagtacatatccatttcgccgcaggggatgaggcataaatgatccccttcttcttttattttcagtgtaaacattccgccctcctttatctctcagtatatcggctgtaaggcgtcgaggcaatgaattattcttcccccacgtattccgccacggcgacgatgtggctgtctttaatgttcatgagcttcacgccggatgtggcgcggcctaaaagggagatggattccgctttcaggcgaataatgacgccgtcttcggagatcatcatgatttcatcggaatcatttaaaactttcgccgcaaccaattggccggttttttccttgatgcggtaggtaatcaagcccttgccgccgcggttttgtacgttgtattcctcgatggccgtgcgcttgccgtagccgtattcgctgatgacggccagggtcttgcccgcttcggcctttacgaagctgaccacttcgtcgtcttcatcgaggcgaatgccgatgacgcccatggcggttcggccttgttctctgagatccttgcctttaaagcgcagggacatgccttttttcgtgacaaagagcagatcttcgtcgtcgccgcattgaatgccgccgatcatggtgtcgccttctcgtaagcccatggcaataaggccgtttttgcgaatgtttttgtattcgcccattttggtctttttaatgtagccttgtcgggtaacgaggaagagattgtcgtcgtccgccacctgatcgatgggaataatgctttgaatccgctccccttcttccaattgaaggaggttgacaatggccgtgcccttggcatttctgccggcggcgggaatttcgtaggcctgtttcttgtagacttggccgcagtcggtgaagaataaaatcgtatccaaagtggatgtaataaagaggctggtgacgaaatcgtcggcttttttatttaaggcgctaatgccttggccgccgcgattttgcggcttgtaggtgccttccggcatgcgcttgatgtagccggaattggtgagggtgaccaccactttttcctcttcaatgagatcttcatcgtccatttctccgtcggatttggtgatgaccgtgcggcgcagatcgccgtatttttccttgatctctaaaagttcctcttgaatggtcccgtccaagaccttgggatcggaaagaatcagctctaatttttcgatgagggccaaaagctcccgatactcttcttctaatttttccacttgcaggccgcttaagcgcttaatgcgcatatccaaaatggcctggccctgaatatccgtgaggccgaagcgttcggtaaatttcgccttaatctcttcgtcggtgcggtagcttttgacgatttcgatgatttcgtcaatattggcgatggcgagtttcaagccctcgataatgtgcacccgggccttggccttgtttaagtcaaaggtgctgcggcgggtgaccacgtcgcgctgatgcttcacataatagtgaatgagctcgagaagggttaattctcggggcacgccgtcgaccaaggcgagattaataatgccgaaggtgatttgcagctgggtttctttataaaggcgatttaaaaccacattgggattggcatcccgctttaattcaataaccatgcgcacgccgcggcgattggattcgtcgcgaatgtcggaaatgccgtcgagttttttatccttcaccaattcggcaattttttcgatgacccgcgccttgtttacctggtagggaaattccgtgaccacgatttggtgcttgctctttaggggctcgatttccgcccgtgcacgcacccttactttgccgcggccggttttgtaggcttctttaatgccgtcttttcccataataaaggcgccggtgggaaaatccggtcccttaatgtgggtcatcatttcttcaagagatatggcttcgttgttcatataggcaatgaccccgtcgatgacttcgttcatattgtggggggccatgttggtggccatccctacggcgatgccggcggagccgttgaccaaaagattgggaaaacgggaaggcagcaccgaaggctccattaattcttcgtcgaagttgggcacgaagtccacggtttccttgttaatgtccctgagcatttccatggccagcttcgacatgcgcacttccgtataacgcatggccgccgggctgtccccgtccatggagccgaagttcccctggccgtcggctaagggatagcgtatgttaaagtcttgagccaagcggaccacggcgtcgtaaatggacgagtccccgtgggggtgatacttacccataacatccccgacgaggcgggcgctttttctgtggggcttatccggcgtgaggccctgttgctgcataccgtagagaatacggcgatgcacgggctttaagccgtcccgcacgtcgggcagggcccgggcgacgatgacgctcatggaatattctaagtaagcctttttcatggctttttctaagacgacgtcttgaatgccgctttcatttgcaaattttgccactgtatcctcctaagcgtcgatattttcgacgtaaattgcattttcttcgataaattcccgccgcggtcccacttcttggcccatgagcatggaaaatacttcgtcggccatttgggcatcttcgacgcttacgcgaaggagcacccggtgttccggattcatggtggtttcccaaagctcttccgcgttcatttcaccgagacctttgtagcgaccgatttttaaattcttgtcccggcccaggcggttcatggcttctcgaagctcgtcttcgttatagcagtattccaacactttcgatccccgcttaatgccgtaaaggggcggcttggccacaaagacgtgccccgcctcgataagcgcaggcaaatgacggaaaaggaaggttaagagcagggtttgaatgtgggcaccgtccacgtccgcatcggtcatgatgatgatttttccgtagcggagcttttcgatgtcgaattccttgtcgatgcccgtgccgaaggcggtgatcatggcgcgaatttcattggagtttaaaattttgtccatgcgcgccttttccacgttcataatctttccgcgaaggggcaaaatagcctgatagctgctgtctcttccgcccttggcgctgccgccggcggagtccccttccaccaaaaagatctctgtcttttcgttgtcgtttaattggcaatccacgagcttgccgggaaggggggtgttgtctaaaatggagcgtttccgcgtcaaatcccgggcttttctcgccgcttctctcgcccggcgggcggagagggctttcgttaaaataatcttgccgattttcgggttttcttccaaaaaggccgttaagtaattgttcaacacccgctccacaatggccttggtttcggaattgcccagcttggctttggtttggccttcgaattggggatcgggaatcttcacgctgatgacggcgctgatcccctcccgcacgtcgtcaccggagagattttcttctttttccttaatgtaattgtattttcttccgtattcgttaatgcttttggtgagggcgcttctgaagccggataagtgggtgccaccttcttccgtattaatgttgttggcgaaagataaaaccgtctcccggtagctgtccgtgtactgaatcgaaatttccacattggtgtcttgttccgtttcgtccaggtagagaattttgtcgtgaatgggctttttattgcggttaatgtattccacatagctttgaatgccgccgacatagtggtagatttccttaaatttatcgccgtctcggtggtcaataaactcgatgtaggcgcccttgtttaagaaggccatttcccggaagcgacgggccaatacctcgcgactgaataccacggtttccttaaatatttcctcgtcgggccagaaggtaatggtggttcccgtatcttcaatgttttcgtctacgacggtgagttccgtttggggaatgcccctagagaagacctgttcataggcctttccgtttcgatgaatatgggcgatgagttttttcgacagggcgttgacgacgctgacgccgacgccgtgaaggccgccggaaactttgtaggcgttgctgtcgaatttacccccggcgtggaggatggtaaggacggtttccacggtggattttttcgtttggggatgaatatccacgggaatgccgctgccgttgtcgcgcacggaaacagagccgtcttcgtttagttccacgatgacctgatcgcagcggccggctaaaatttcgtcgatggaattgtccaccacttcgtaaaccaagtgatgcaagcccttgggcccggtggagccgatgtacatacccggacgtttgcgaaccggttcaaggcccgttaatacctgtatgttaccggcattgtattcattttcccttaccataaatcctcctcacgcaaagtgtctgcgctcttttttatactgattaaatcaatgggccgagaggcttcttccaaggcctccatgggctccgccgccgtaataaaacattggcctcgtatcatggaaagaagcatgcgccgccgcttctcatccaattccgacatgacgtcgtctaaaagtaccaccggcgattcgccgacgtgttcggtaatgcgatcaatttccatgcacttcatggccaagacaatgcttcgtatttggcctgttgatgcaaatttcttcgcttcttccccgtttagcagaaaagataaatcgtctaagtggggcccgatggacgtccgcccccgctcgcgatccgtttcgcgtctcgccttcaggctttcgtaaaaagcgccttccaattccccgtccagggccacgggaaaggacgccttgtagcgtagctccaagcgctccccggctcctgcaatggcttcgtagtagctcgacacggaggtggccatgcgctttaaaaattttagccgctcttttaaaattaccgccgcaaaggaggccaatccccggtcgtaaacatctaaaagatccgtatcccgaagttttctgagcacaacatttctctgatagagcacgtggtaataagaactgtaggcctcgtcgtaggcaggggagatcatgcgaagcatctcgtcgataaatccacggcgacgagagggagaaccctgcaccatttgcaagtggccgggctcaaaaagcaccacacccatgcctcgaccgtaggccgaggtgttttttaccgggttgcgatcccttaaaaagcggcgcttgtctttttttacggtaatctccatgtcccgctcgaaatcgtcgagtacgacggtggctcccacaaaggcgctctcttcgccgaaggcgatcacttcttttaaagaagcggttttaaagctccgccccgtcatggataagtaaatggcctctaaaaaattcgtctttcccgtgccgtttgggcccacaatgcgatacattttgggctcaaggtccataaaaaggcgtcgatgattgcgaaatgagaccatgtttaattgtgaaacaaacacatcgtcctcccgccgcgattcatcttcgtcgtttaaccttagtatagtacaaatgttctattccgacaaatgggtttcgtctccttcgatggtgtctttttctcccataaattccaccacgtcgccggggtagagctttctgccacggcgcttctccatctcgccgttgacgaaaaccaaaccgtctgataccaccattttggccatgccgccggaatccacccactgcacgtatttcaaaaagctgtcgagtttaatatagtctgtggttattttcatagattggccaacctgacggggagtacgaggtacagtgtatcggcgccttctaaaggcgtaatgatgcagggatttaccgcatcggtaaagcctaaggagatgcgctcgtcatccatgacccgaatgccttccaataaatagcgggcattaaaggcgatggttaaatcgcttcctgtcttttcggcgcgaatggtttcgtggactttgcccacttcggaattggagaggatttcgatttgatcgtctttaatttccaggcgcaccaagccgtttcgctctttgcccgtcattaaactggcccgctccaaggcgtcgattaattgttttctgtcggcgacaactttcacgtcgtgttccgtgcgaatcaagctgttgtagcggaaaaattcgccgtttaagagcttggtaaagaatttcgtctcgtcgaattgaatcaagatgtgattgtttccgatttccaatgtgagggtcttggtctcgtcgatgagttttgaaatttccgagacgcttctcgagggcaaaattaaatccctacgcacggattgttctcccttaatgcggcttaatgccatgcggtagccgtccaatgccacgaaggtaatgccctccggctgaacgtctaataagaccccggttaagacgatgcgcatgtcgtcgttggatgtggcgaattgcgtttccttaaaggcctttaataaggattcgccggtgaccacgattttttcatcgccgcccagttccggcaattggggatattcttccgggttttgacccatgatttcaaattccgattgctcgcaaattaaggtgattttttggccgtcgctttctatatgcaccatggcgttgggaagtttgcgcacaatgtctccgaataatgaggcatttaatacgatgctacccgtctcttccacgaaacaggcgtggcgtgattccatggatatttccgtatccgtggctctgagaatcaattgatcctctgtggcttccatgtagatgccttccagaatttgcatactggtttttgccgagatggctctggagacggtagagacaatagaagctaatgcggatttttcgatttgaaatttcaaatgctttcctcctaactaatagattagtacttcgtattcgtagtaggggctgtgaatatgtggataccctcgtttaaaaggattggattcgtaatagccctgtggataatttatggatattcccgtggatgatttctctttttatccacaatcccattaattgcccttaatggtttctttcagggattcgatggtgacgaagagattggtgtctttttccatatcgtctttgattttatcgcaggcgtgaatcaccgtggagtgatcccttccgccgaattcctggccgattttcggcaaggacatgtccgtcagctcccgggtcaggtacatggcgatttgtctgggataggccaatgggcgggagcgcttcttgctgtccatttgttccacggttaattgatattttttacagaccacatcttttatccgctccaccgtaatctttacgggccgattgttttcgtaaatatcttttaataccgtcgccgccgtctcttccgtaatgacgccggtggtgagcttggaataagccgtcacccgagacagggccccttccagttcacgaatattgcttttcacgtgggtggcgatgtaattaatcacctcgtcgggaacgtggaagccgtcgcttttagctttgtttcttaaaatggcgatgcgggtttccagatccggcgcttgaatatccaccaccaggccccaggcgaagcgggaaatcagtcgctgttccagtttttgaatatccttcggcggtttgtcgctggtcaggacgatttgcttgtctcgtgcgtggagttcattaaatgtatggaaaaattcgtccatggtggattctttgtcggcgataaattgaatatcgtcgattaaaagcagatcctgtgagcggtatttcctgcgaaattcttcgttgcgattggtttgaatggatgcgataaattcgttggtaaattgctcactggtgacgtataaaatacgcttgttcggatcattgcgatgcataaaatggccgatggcgtgcattaaatgggtcttccccaaaccgacgccgccgtagataaacagcggattggcgtgggcctcgatgggattttccgctacggccaaagacgctgcgtgggcaaattgattggattggcccacgacaaatgaatcgaaggtgtatttaggatttaagtggtacaaggcctcggcggtattttccgcaggcatggaccggttttctccgtcggcggtgaggacaaattgaatctccagatcccggccgccggcttctttcactacgcggcgaatgaggtttttgtaattgttgttattcttttttaaatggtttaaaacaaattcccggctcacgcctaaaatgagggcgtcgccttgaatggccagaggttgaatggggcgaaaccaggtgtttatttgagactcgtagaggttttcttcgagaatcaattgaaaggcatcgtcccatagctttttaacatccgttgacatatacgtcgctccttaagggtatgtattaacatagtcacatgtggaaaaaatccctatggatgaaaaaatccacataattgtggattgtgaggataaactgtttatgaacaaggtgtcgttattcacttgttcataaaaagggatcattttttcgtattttacgagaaagaaagtgaataaagaaaacttatcaacaacttatacacaatttgtgcataaccaccatctatccacagactttatttttattcacaggctcgaaataattatacacaaagataaaatagttatcaacatattcgccggccctcgattgccgcaaaaagggcctttgtttcgaatttttttatcccataaagaaggaaattccccactatttattgacttcggcggcgtgagtccctataatatatagagtgtatttaaaaaaataggtccattgggcatttttttatcccatagaggaggtgtaatcatgaaaagaacgttccaaccgaaacgcaaacaaagaaaaagagaacacggttttcgtgcgcgcatgagaacgcgcggcggtcgtaaggttttgcgcgcccgcagacttaagggaagaaaaagactttccgcataatccatggaaaaaaagtactttcttacgaaagacggggattttaaaagagtatataggaagagaaaaacgttcggaaacagaaattttactctttacgtcaagcaaaacggcctggcccattccaggatgggtttttccatcaacaagaaggtgggcaaggccgttgttcgtaataaaataaaaaggcgactgaaggccctttatcaggaagcgtacccgcgtctcacaccgggctatgattatgtcatcgtcgtcaaaaacaatgtggcggaattggatttcaaagcgacaaaatccgccttttaccatctgtttcgcgtatcgaagtttttaaaggggggcaaaaagtcatgaggactttggccttaggactgattcgtttctaccaaaaagtgatttctccttatatactgcccggggcgcactgtcgtttttacccgacgtgcagccaatacggctacgaagctttttcgacataccccttctttaaagcgctttatttaacgataaggcgcattttacgctgtcaccctttccacaagggcggctatgatccacttccatagattaggaggaagttcacttgattaacgctttagcgagtttcttcggcacccttctccacgccatctacaatttcgtggcggggctcgggtcggaaccgaagatgatttccttttatgcgatttccattatcgtcacgaccctgctttttcgtttggcccttttgcctttgaatttattccaaacgaaaaaccagctgaagatggcgaaattgcagccggaaatgaaaaaaattcaaaaaaaatacgaaaaggacccgcagctcttggcgcaaaaacagtcgcagctctacaaggaagcgcagtttaatcctttaagcggctgtctgcccatgctggttcaatttcccgttctcttggctttttatcggatctttatgttcccgacgaaatttgcctttacgaatccggaattttacgcgtccatgcagaaaaatttcttttttattcaagatctcgaccacggggaccctacgaagttggtctttcccattatcgcagccttttttacctggctgtccacctatctcgtgcaaaagagcaacaaagcgccttctacggagcaatcggagcaaatgatgcgcaccatgtctatgatgatgcctgtcatgatctttattttcgcgagaaaaatggcggcgggtttggtcttgtactggatcgtcggtagtatttacacgattttccaacaatttgtgagcaataaaatcatcgaaaaagaaaaagaagcggaggcatagcatgaatttctccattcagtcggcaaaaaccatcgacgaggccgtggaaaaggcccttctcgagttgaaagccacccgagacgaggtggacatcgaagtaattgaagagccctccggcggctttttagggctgattgggggcaaggatgcgattgtcaaagtgaagaaaaaaatggaccacaaggacattgtggaatccattttaaaggatgaagagatccaaagtgtgcgcacggtcttggaggaaaaagcccaagaggaagcggcgatgatcgaagacgacgaatcagaagctccgtctgacgaggcggatgaaggggaagcggcgtctgaggaggctttggatttcgattatctcgacgacgaagccatggaagagatgattcgcgagtacatcgaccgaatcatgggggccatggagttggcctacaccttgtccgtggatttcagggaaaatgaaattgacgtttccatcgacggcaagaaggaggagacgggcattgtcatcggcaagcacggatccacattaaacggcattcaaatcgtgctttccgccatggtgaatcaacggagcgaagaatttcgccgggtcatcgtggattgcagcggctaccgaaagaagcgggagcaggtgctgaagcgcatcgccggaaagacggcgaataaggtattaaagacgaataaatccattaaattggagccgatgaatgcacaggaacggcgcattattcacgcctgcctggccaatgtcgatggcattcgaacgcgaagcgagggcaaagatccccataggcgcgtcgttattcataaggatacatcccagccttcatagtctctatgaaggcttttttataggaaaggttgacgactatgactattgcggctatttctacagccaagtccccggcggggatcggcatcgtgcgattaagcggcgaggcggccatttctctggccgacggtttttttcagggcaaacagcgcctcacagaccctttaaacgaccgcaagcttctttacggccacatcgtctccgatggcgaggtggtggatgaggtcttggccgtggcctttcacgcacccttcagctataccggcgaagacatggtggaaattcaggcccacggcagccgcatcggcctggaacggattttagattgctttattcgtgccggggcggagcctgcgaagcgcggggagtttacgaagatcgcttttttaaacggcaagctggatttaacggaagccgaggccattatcgacatgatcgaggcggagagcatttcggcccagaagcagagcgcccgccaactcaccggccatttgtatcgtaagatcgaagactttcgcacgcggatcaaggacaccttggcccatttggtggcggatatcgatttttccacggaagaggtggaacctgtcgatataagcgctttaattaccacttgcgaggccattttagatgaaatgaaagccttggaatccactttcactcgaggcaagctgatacaggaaggcatcgctacggctattgtaggcaagcccaatgtgggaaagagctcgtttttgaataaaatgctccgggaagacaaggccatcgtcacggatattccaggcaccacgcgagatgtgctggaggccggttattccctggacgggattcacctcaagatacaggacacggcggggattcgcaagaccgatgataccatcgagcaaatcggcatcgagcgggccatggcgagcatggaggaggcggatctcattatcgcccttttcgacgcctctcgccccctggatgaggaagacatggaaatcatcgagcgagtcaaggataagcgggtgatttgcctcttaaataagcaggatctcggctcggtattggacaagaaggccatggaggcctacttccccggcgccgtcatcgagaccagctttattcgagacgagggcctcgccgccgtagaggatttaatccagtcttggttcctctccggcaccatcgaggaagacgagacacagatctattccctgcgccacaaacttcttctttctgaagccgtagaatctctttcgaaggcggtggaggacatacgttcgggtattgggttggatcttgccgaggtgtatatcgaggatgcttttttgaaattaggcgaaattaccggccaaaccgccggcgaggaagtcttggatcacgtgttttctaaattctgtatcgggaaataaggagcgaaaatgaattttttagctaaaaccgtcgatatcgtcgtcgtcggcgcgggccacgcgggctgtgaagcggctctggcggcggcgcgcatgggccattctgtggctatacttacgattaatttaaataatgtggcggccatgaactgcaatcccaatgtcgggggcacgggcaagggccatttagtccgtgaaatcgacgctttaggcggcgaaatcggaagaaacatcgacaagacctttattcagtgccgcatgctgaaccgctccaagggcccggcggttcactcgttgagagcccaggcggacaagtggaactaccacgccgccatgaaggagactttagagaacacgaaaaatgtccacctaattcaagacgaggccgttgatttttacatggaagacggggaagtttccggcgttatcggaaaaagcggcgccatttatcaatcgaagaaaaccattttagccaccgggacctaccttcgtggccgggtctttatgggggaggtgaattacgcctccggccccgacggcatgcagccggccaaccagcttaccgccgccatcgagggattgggtcttaaaaccatgcgcatgaaaaccgggacgccggcgcgggtgcaccgtgattccattgatttttcgggcatggatgtgcaaaagggcgacgaaaccatcgtgcccttttccttctctaatttcgatgtggattacagtgacaagaagcagattgagtgctatttaacctatacgacccctgaatgccacgagattattcgggaaaatatccaccgctcggccatggccatgggggacatcgagggcatcggcccccgctactgcccttccatcgaagacaaggtgacccgcttcgccgatcgggatcgccaccaggtgtttctcgagccggaggggctaaacaccaaggaaatctacgttcagggcgtgtcttcttccctgcccgtggaggtgcaaatggccctttacaaaaagatcgacggtttggagcattgcgaatttatgcgtccggcctacgccatcgagtacgatgccattgacgccacgaaactgaggctaagccttcaggtcaccgaatcgccgaatctttacatggcggggcaaatcaacggctccagcggctacgaagaggcggcggctcaagggcttatggcgggcattaacgcggccctcgccatcgaaggcaaggaaccctttattttggggcgggatcaggcctatatcggcgtcttgatcgacgacctcgtcaccaagggcacccgagagccctaccgcatgatgacggcccgggcggagtatcgcctcaccctgcgccaagacaatgcggatctgcgcctaacggagcggggacgcgaaatcggattggtcggcgacgaacagtacgaaaagttcatcgcccgacggaatgccattgaaaaggaacgggcgcgcctcgcatccattcagatcaatcccacggacgaaaacatcgaaaagctggatgaactcggttcggctacattgaaaaatgccacgccccttttgaatctcatgcagcgtccggagcttacctacgataaactggctgtttttgatcctgataggccccatctgccccgccacgtcatcgacgaggtggagacggacatacgctacaggggttacatcgaaaagcaggcggcgcaaattcaaaaatttcggaagatggaaacgaaattgttgtccaaggagttggactatgcggccatcggcggcctcaggaacgaagccaaggaaaagctgtcgaagattcaaccggaatccgtgggacaggcgagccgcatcagcggcgtgagcccggcggatattaatgtcttgttgatttatttagagcaaaaacacagggaggagagcaatgaactggcagacgcgtaaggactatctgaagcaatttcccgtagaaattcccaccaaggccttcgaccgctacggcgacatcctcctcgactggaacgagcgcatgaatctcacccgcatcaccgacgaagacgaaatgatggataaacatttcatcgactcccttacccccacgctggtttcggcctacgagggcacgggaaagattttggatttaggcaccggggcaggctttccaggcatggtcctcgccatggtatcgccggagcgagacgttcatttaatggacagtttaaataagcggatcacctttttggatcacgtggtggaggaactggggcttacgaatgtaagcactttccacggccgcgccgaagaggcagggcgggagaataagtttcgcgaacaatacggcctcgtcgtctcccgcgccgtggcgcggctaaatatactggcggaatactgcctccccttcgtacgcttaggcggccatctcatcgccatgaaaggcgctgaaggcgtggaagaggtggaggaagccaagaaagccatcgacattttaggcggaaagattgaagaaatagtcgacctccggctccccgggggcgacgaacgccacctggtggtcataaaaaaagtgaagggaacgccggcgaaataccctcgcggcggcggcaaaccgcgaaaggatcctctgtagtatgattttctatataccggcccttatttttctcatctaccgtctctacaaaagccgcacgaagacggctgtggttctcattcttctgtgtttagtcagcggcgctttctatatgggggcggagaactatttcatcgagcccgtccacgtgattttccccgccgtggccattgcctcttccctttacttgatctatctgtcccgccgggaatacaccaatgccagaagcgagtacttaaaggagcggcgcatggctcgggaggcagcggagcacgaggcggagataggcgatgagcatgagcgcatcgtcattacaaacgataagtccgacgaagaaaaaataatctacttaaaacgaagtgagaaaaatgttccacatggaacaattggcgagacgaaacaaaacgaagaagaaaattgagcggaaatgttccacgtggaacactccgctctttttatttgcccgaagctttgatactatagtggagaagggagtggcactatgacaagaagtattgccgtatttaatcaaaaaggcggcgtcggtaagacgaccactgtaataaacttagccgatgccctggcaaacaagggccatcacgtgttaattttagatttggacccgcaaggtaacgccaccagcggactaaacatagaaaaagatcgagagagcatgatttacgattacctcttaggagcggaaggcgacttcgccgttcaggtgaaggataatctgtccattatcccctccggtgctacgctggcaggaatcgaaatcgaatttgctcgaagagacaactggcagagtgtgctgaaagatcgcatcgccgaattgaaaggctacgattacatcatcatggactgcccgccctcgcttggcattctgtctattttggcactcactgcggcggacgggattttaattcccgtacaatgcgaatactatgcgttggaaggcctctctcagctcatggaatccattcagctggtgcggggcggcttcaatcccgacttagccatcgaaggcgtgctcctcaccatgtacgacggacgcaccaatctcagcatgcaggtggtggaagaggtaaagaactactttaaagacgccgtcttctccacggtgattccccgcaatgtgcgcttggcggaggcaccgtcctacggcatgagcattatggattacgacaaaaacagtcgcggcgccaaggcctacgcgtcgttggccgacgaagtggaaaagaggaggtcctaatggaaaagaaacgtggtttaggtcgcggtctggataattttttcgggccccaaacagaagaggaaaaagtggctgaaactttggccgtggacgccatcgtcgccaatccccatcagccgagaaagtacttttccgacgaaagcatcgaggaattagcagagagcattaaagccgtaggcgttctacagccccttttaattaaaaaagacggggacaaaaacctcttaatcgccggagaacgcaggcttagggcggcgaaaaaagccggtttaacggaagtgcccgtgcgcttcatcgatgtggacgaagaaaaaggcgatcgaatctctcttattgagaacatccagcgggaagacttaaatcccatggaagaagccgaggcctacgacacattaaggaagaaatacaaatacactcaggaaaaaatcgcaggcctcgtgggtaaatcacggccctacattgccaatagcctgcgccttttaaagctggagcccgtggtcatggaaatgctacgcagggaagagctcaccatcagccagggcaagctcctcctctccgtaaaagatggaaacgaacagattaagcaggcgaagcgcatggtggaagaaggccaaaccattgccgaaagcgcggaaaatacgaaaaagaaatcgaaaaaaacaagcggccatcagggctactacggctatttggaaaacgcccttatggacgcattaggcacgaaggcggaaattaaaggcaatcacgaaaagggaaaaatcgtcatcgattattacacggaggaagatttgatgcgcctctgcgacattattttaggagaagacatcgatggttagagaatacagatactttgttgctgacgcctacacggatcgctcctttgtgggcaaccccacgggcatcgtcctttcagaaggcaaaatgaccgacgaagagcttctaaaagcagctcgggagctgaagcacgcggaaaccacttgcgttcaacaaatggatacggacatttaccacgtgcgctacttttctcccgtgaaagaagtgtccctttccggccacgcggccctgggaaccttctggatcctggcggaattaggctacatcgacggcagggacgacgagcaccaaattcgccagtatacgaaagtcggcccactgcgggtaaaaattcaatttcatgaagaaaaagtcaccttcgtacaggttgaaatgccgaaaatggcaatcggcgaagaaatcgaagctgtggatgaggttgcggcggcctttaagctgacgcctgaggagttggacggcacattaaagcctgtcgtcatggacgcgggcatgaaggccatgattattgccgtaaaaaatcgggatctgttgaaaaagatggagcccaagcggcgacgcatggccctgctcacggaaaaatacggcgcccaatgcttccacctcttttactacgacggcaacggcgccgtccatcaaaggaatttctcccccgctgtgggcacttgggaagaatcgggcacaggcaccgccagcggcgccatgtacgcctatttaaagaagcaaaaccgcttggctcaaggaaaaatcacctgctaccaaggggatgaaatcggccgtccctcggaaattgtcctcgaggaaatcgacggcgccatttacgtcggcggcaaagcctgcgtggttatggaaggaattatgcgcctatgaaattagtggatatgcgtttgaccgattatataaaaaaggccgaagacaagacctcggtgcccggcggcggctccatcgccgccctttgcggcgccctctccgcctcactggccgccatggtgctgaatttatccggcgccgaggatgcggcgaagaactacgggaaatattccgaggtgcttcaaaaaaacatcgacgacgacagcacctccttcgacgacgtcctgaaagcctttcgcatggcgaaaaccacggaggaagagaaaaaaatccgcagcctcgccattcaagagggttataagcgggccatcgacgtgcctctttccaccatggaagcggccttgggcgtcgtcgaaaccttaaaagcccaggaagcattgatcggcgacgaggcattgagcgatttgtacatggcggcggatttggcccttaccgcctttaacggcgccaaagacacggccatgatcaatgtggccgcattaaaagacgacgcgacgcgcagcgtctacagcgaaaaaattcaggccatgaccgagcatatgatcgagattcacggtgacgtcgcagcatttcaccgggcatgaagacattatttatcttaaacccccgattaaagcctgagaaaaagaaggaagtcgaaaacgcggcgaatgcctgtctaaacgaggactacgactttttaaagggagacattcgcgactacgacgcccgagccctgaaggactacgatcatttcgtggccgtcggcggcgacggcaccatatttgccgcggttaacgccatgatggagacgtcggcgcgaaagctgaccatcgtgccggcgggaagcggcaacgactttgccagatccttgggaatcaaaggggatgtattcactatattgaaagaagcgaaagaggccgcgcctcgccccatggatctcgccatgtggaacgatcgctacttcatcaatattgcatccgtgggctttgatgccgatgttaatgccaacaacagcgattcaatgaagcgcttcggccccttcagctacacattaagcgtagtcaaaaccctgtttacctacaaagcaagggccatcgaaaaagaaggcattccccttacgcgctggaccctttttaccataggaaacggcggctattacggcggcggatttcccatttttccgaaagcaagcccattttccggcgagctcctcttcttgggggcgggcaagagccgattgaaattcatcctgccctttttaatctgcctctttgcggggaaagatcatctctggaaaaaagacatggtgcaccaatcctttcagtccatggagtttaccttacttgaagaagccaatgtgaatttagacggggaaaacttccgagaaaaaggcccggtgacggtacgcgttctgccgaaagagctcctttatgtagggccgtcgaatcagtaaagacatcactctattgatagaattggttttaaaagccctttcgatgaaagacaaaggcgaaaattttccgcaaaaaaacagccccattcataagaacagggctgttaaatttaccgactgaaggtgcgttgatagccggcacgctccgccgccatggcattttcaaacattaccgcattttgcggcgacaccttgttgtaggatttgtccgaaggcaaatgatagatcttgctttttttattgcccttggccgggccctcctttccctccacggcccaaatgccgcggacgtggtccatggcgacgatctccccttcgtggagcagggcctgatacttggtgttgggctcgtaggcccgctctctggcgtagccggaggccaccaattggtaattatagagaatctcttccttgggcctctcgctcgtcctcgggtcttccgtccagacataggccagggtgcggccgtagtgatcctctttttcctcgtcgtattccaaaaagacggcctttcccgtgagagacttcttcgagaaatccgaggcctcttttccccaaggctccacccgaccccgaggcttcaccgtctccggcgtgtccacgccgatgaggcgcacccgcgtgtcctgtccatcgtcgagaaccagggtgtccccgtccaccacccgcttcaccatcacgccggcagcatccggggcgggggaaagacttcctttggcggtaaaggtcgccgccagagccagtacaatcagcaaaaatgttcgtaagcgtttgtttaaatgtttcataccctcagtataacagaaagaaggaaagccatggccattcaaattttcggcacgaagaaaaacaatgacacgaaaaaagcccaacgtttttttaaggagcggggcgttaaatttcaatttattgatttaaatgaagtagaaatgtcgtggggcgaattcgattccattacatcatccatcggcggattggacgtatggatcgacgaaaattccaaagacgcagacggcctggcctatgtgaaatacgcgaccgatgaaagcaaagaagcctatattatcgatcacccgagcattatgaagctgcccgttgtcagaagcaaaaagcgggcagtattgggccatgcgcctgacgtgtggaaaaaatgggccgaagaggaaaagaaataaggcacgctgaggggcgtgcctttttctctggtaaaacccgtgccattaggtgcgaatggtggggtccatgtgaagaatcataaaggagacggcgagaaaagcggcggaaagccaaatggtcttaaggcccaaaagggaaaagaacagaccgccgataagggcgccgataaaaaagatacatacgataaaaagcacggtgcggctcgtgtcccggtggacgaggcctttggtgtggtggtagcccgccaaattgtgcataatggtgcgcacattgcccacgcacatggtggtggcggcgttaatgtctgcgaattttctgaaggtattcacctgcatgccgcaggagaaagccatcatactgttggccaggctgtcgaattcgccggaaagaaagccgacgacgatgagaataagaatctccacggccaaaatccgctgcttaaagtgcaggcccatgcgccttttttcagcaaaggccacgcggccggagacatagaccccgagggcgaaggatgcgatttgaataaagtagcggagcatggcggggaaatttccctcggccaagttaaaagccatgagcaccacattgcccgtaagggcgttgacgaagaccttcccccgaagggcgtaggaatagccgtcttgcaggccgccggccaaggtgagaaaggtggcgaagaacagggattcggaccaagctttatttttcataaatcccacgcatcctttcgattaaatcttcgtatataggaagcatatgggcttcggagacaaaggtgtccagctccctaaccgccacccacttgcgattgtccttcacttcaagcaaggtgtcgtcttcgtggcccacaaagccgtagcaaaaattaatgtggaagtggctgtccacggcttcgccctttcgaatgtgggcggaaacgggcatgagctccaaggccagaggcccttctgagaggggcttcacatagagaatccccgtctcctcgtaaagctcccgaagggcggaataaaagagatcctccccctcctccacgtggccgccgggccaggagaaggatttgtaaatgggatgataaatcatcaagagcttatccgcctcaaaatccataaccatagacgaagtggtgtagtggtaaggggcgtcgcgattggttgcaataagggagggatccagccgtagcaaatgggccctgtcctcggcttctttttcatttttcggttcgtaggattcaatccattccatcaatgacctccagtgccggcgcaaaggccgacggtatggcgtacacagtttcaagtgcttccttcgtggcccagatgcgggcatcttccgcggcaaagagggactccacatgggcgtaatagacccacacattccatatgcggtgggaaaagatgtggcggtaggcggccatcttttttgcatcattcacgacgaaatccgactccgccaaaagcttcatgacatcttcctgccgaaggtgcccttcgatggtgggaaagccccacatggacgccaagagcccgccggtgcgcttctcgataaaaaagcggccccccagatccaaaagaagcaccgtcacatcctcttctttttgcttcttcttcggcgtctttttcgggtaatcttcggcgcagtttgcatcataggccatacaactgtccccaagggggcagtggccgcaggccggggatgtgggggtgcagattttattccccaaatccatcatggcctgattaaaatccccgggccgatcccgggaaatggcctcgttggccagattaaaaatcagccgcttccccgccgacttgtcgatcttctcatcgatcctataaaggcggctgaaaatgcgcaaaagattcccgtccaccgccgccaccgcctccccgtaggcaatggatgcaatggctgccgccgtgtactcgccgatgccggggagggcctttaagccggcaaagtcccggggcatgccatctcgggccacaatctccgccgcggcctttaaatgcttcgcccggcggtaatagcccaggccctgccaaagctttaaaagagcctcctcctccgcccgggccaaatcctttgccgtaggaaaggccgccataaaacgctcgtaatagggaatcaccgtgttcgcttgggtttgttgaagcataatttcagagacccaaatggcgtatggatctttcgtttttcgccaaggcaatccacggtcctccggtgcgtaccaatttaaaattttactcgaaatacacataaagctattataacaaaaaggccgaaaaggtctatattgacggtatttcccaaccatgttatagtaaaaaaggatatcatacagaaataatcggatataggaggaaagttgaatagatgaatgcattattgaaggtagaaggcgtacgcgcctctgcaggagaaaaacaaattttaaacggcatgaacctggaggtcaacaaaggcgaagtacacgtcattatgggccccaacggcagcgggaagtccaccctggccaatgtcattatggccaacccggcctacaccatgaccgaaggcaagatttacttcgaaggcgacgacgtcaccgacgaatccacagacaagcgcgcccgtcgcggcctgtatttaagcttccaaaccccctacgaaattccggggatcagcgtggaaaactttattcgccaagccctcttggctcgcggcgaaaaaacatccatcgtgaagtttaaaaaggccctggaaaagaaaatggagcttctggacatgaagccggaatacgccggccgctatttaaatgtgggcttctccggcggtgaacggaaaaagacggaaatccttcaactcttaatgctcgatcccaaactcgccattttagacgaaacggactcgggcctcgacgtggatgccgtcgccaccgtgagccggggcttaaaggaatacctggacggcgaaaaatccgccattattattacgcaccaccgggaaatcctgaaggaaatccacccggatttcgttcacgtcattaacaacggccgcatcgtcaccgaaggcggcgacgaaatcatcgatcgcatcgaagaagaaggcttcggctggattaaggatgggcaacatgcgtaagaagacagaaattcaagacatggaccgggggatttacgacgaaagaaatcccttcacctatcgcaaaaagacggaacaaggccttaacgaatccatcgtgcgccaaatttccgccgagaaaaacgaaccggcttggatgcttgaaaagcgtctggaagccttaaagatctttaacgaaaagaaaaatcccgactggggaccggatctgtcggaagtggacatggacaaggtcatcacctacattcgtcccgacgcggatttggccgccgattggaaggacgtgccggaagaaatccgcagcaccttcgacaaattgggcattcccgaggcggaaaaagaagccatgctttcaggtgtcggcgcccaatacgactcggaagtggtctatcacagcattcaacaacacttgttggatcaaggagttatttacacggactttgaaacgggcctccacgaatacgaagacatcgtgaaggaatacttcggcaagtgcatcaacccgaatctgcacaaatacgccgccctgcactacgccgtatggagcggcggcagcttcgtctatgtccccgaaggcgtggatgtagacgtgcctctgcagtcctacttccgcttaaacgcgccgggggcgggccaattcgaacacaccctcatcattatcgaaaaaggcgctaaatgccactttatcgaaggctgttccgcgccgaaatacaacgccctgaacctacacgccggggccgttgagctcttcgtcaaagacgacgccaccctgcgctactccaccatcgaaaactggtcgagaaatatgtacaacctaaacaccaagcgagccattgtcggcaaaaacggcaagatccaatgggtctccggctccttcggctccaaggtgagcatgctctatcccatgagcgtcttagtaggcgacggcgcgcaaaacgaatacaccggcatcagctttgccggggccggccaaaacatcgacaccggcgctcaagtcattcacgcggccaacgacaccaagagctccattcaatcgaaatccatttcaaaaggcggcggcatcggcgtctaccgcggactcgtgaaagtggcggatcatgccaagcacacgaaatccaccgtctcttgcgaatccctcatgctcgatgacatgagtcgtcaggacacgattcccgccatcgacattcacaacagggacgtagacttcggtcacgaagcaaaaatcggccgcatttccgacgaggtcatcttctatcttatgacccgcggcattcccgaagaagaagcgcgggccacggtggttcgaggctttgccgatcccatcgccaaggaactgcccctggaatacgccgtcgagatgaataatctcatctccttggaattagaagggagcattggctaatgaaggcacacaagggaaatattttagaatacaaaacttacgactatttaaatgtcaacgaaaccgacgtggcggcacgggaatccgcaggcgttaaaaaagccgaaggccaatcggttttcgacggctacaattacggcatcagcccggaaatgattcagctccacgacaaccacgccactgtctaccggaaaatcgtcgccgaagacacgttggatatgggcatcgaaagccttgaaggcacgaaagatgaagtggttaccatggacttcattgtggaagaaggagcccacatgaccggctgcttcagaagcaaaaaaaccggcggctaccgctccttcttaagccgtattcacgtgaagaaaaacggcgtcgcccgcctctacttcgtgaatatcgatcagacggaagtggacaactacctgtccatgggtgccatattggaagaaggcgccaagctcgacgcctacgtcttccacttaggcgacggcaacgaaaccagcaatgtgaaatgcttcttaaagggcgatggttccctgggaaacattcagtccatctacctgggtaaaaagggccaagcctacgacttcatttacgacatgattcacgaaggcaaagacaccaccagtaacctcatcgtcgacggcgccttaatggaagacagctacaaagtctttaagagccgcatcgactttttggaaggatccaaacacagtcggggcaacgaagaagaattcgccattcttctggattccacggcccggagcatttccgtgccggccctgttgagccacgaagacgacgtggaaggcaaccacgccgccagcgccggcaaactggatcaggacatgctctactacttcctcacccgcggcttcgacgccgaaacggctgagcgcatgattatcgatgcgaaatttgccccggttatcgacgcggtgatttacgaagaggaacgcaaagccatctacgaggaattggaacggattatggggaggcgacatcatgttgcaaagtagtgaaatcagagaaatccgcaaagactttcccttcctggaactgtctacgaaagaaaaaccgctggtctatttagattcggcggccacgacgcaaaagccgagacaagtcatcgaagccatgaaccgctactacagctatgaaaacggcgggccccaccgcggcgcccaccgcctgtccatggcggccacggaagtctacgaaggcgcccgggaagcggtgaaaaactttatcggcgcaaacagcgtggaagaaatcgtctttaccagaaacgccacggaagggctcaacctcctcgcctactgctggggccttgaaaacctcaaagcaggcgatgagatcgttctgtccattatggaacaccacgccaacctcgtcacctggcagtacgtggcggaaaaaaccggcgcgaaactggtttacctctacattgacgaaaacaaagagattcccaaaaaagaaatcgaagaaaaaatcacagccaagaccaagcttctggccattacccaatcctccaatgtgttgggaaccatgcccgatgtgaaggccatgatcgcccacttgagaaaggtgagccccgacgccaaggctgtggttgacggcgcccaagcggcaccccacatgcccgtggatgtgaaagatctggactgcgacttctacgtcttcagcggccacaaaatgctcgccgccatgggcgcaggggtcctctacggcaagctcgacaatttaaacgccatgaagccctatatgtacggcggcgacatgatcgagtacgtctatgaagatcactccaccttcctgagcgcccccggacgcttcgaagccggcacccaagacgtaggcgccgcatcgagtttgcccgtggccatagactatttaaacgccatcggtctcgacaaaatccacgaatacgaaagctacctcgtggactacgcttatgaggccatgagccaaatggacgacatcaccattctctcccgccccaccaacccgagaggcggactcattacctttaactttaaagatgtccacccccacgacgtggcatccattttggattccaagggcatcgccattcgcagcggccaccactgcgctcaacccctgcacagaagcttcggcattcatttctcctgccgggcaagctttgccgtctacaacaccattgaagaagtggactactttattaaaaatctcgacgaagtaaggaggttgatgggccttggcactcgatgatatttacaccacactgattatggaagagtctcgctcgcagcacaacaaaggggatttggaaaacccggactataaagaactgggccacaacccgagctgcggcgacgaaatcaccttgcagattaaaatggacggcgacgtgctgaaagacctgtcctacaccggcgaaggctgcgccatctctcaagcgtccacttccattatgatcgacaccgtgcgtggcaagacgcgagatgaagccgtgcacctggccgacacctttatcggcatgattaaaggcgtctcccttacggaagaggaagaagacgcactggaagacgccatggcattcgagggcatttccaaactgcccgcccgcgtgaaatgcgccgtgcttccctggtacaccctgaaaaacattttggaacgatgatttgagccgccaggtgcggctctttttttatgcaaagggttataaaacgacagaaaaatagaaaaacatggaaaaataattaaatattgtatttaaaaatgtaaatatgtggtataatctcactaactacctatatcaaaaaggtgatcggacacatgctctttcgggtttgtgcagttagttaacacgaggaggcacctatggaatccagagaatttttatggtcttattggaatttaatcaaagatgcgtcggatacaaaaatcgccctaacggaattcttttcaaaatcctatgagcttacgcaattgcaggtgctcgtcatgggccaggtcgactccctcgaggacacctccattcgctccatcgccaagtccctgcaccgggatcacggcaacatttccaagatctgtaccgtgctggaagaaaaaggcttcgtttaccgtgagcgttccgatgtggacagccgtatcgtgaacatcaagctgacagagcagggtcaggcctatgtgggggaatttcgcagcatcgtggcgcccttcatcgaaaaattaggcgactacctgacagacggcgatttgcgctttattttaaagagcatggaaaatgtcaacaaactaattaacgagtcggaggatgtgaaggccattcggagaaaagaaatgcccctcttgcgacaaaaacacgagaaataaacaggcctccgcttcggtgcggaggttttttaaatgtgtcaaatccaagtcatcgttaagagcggggaaaaatcctcggcccatgatttataatagaaggagaaaggagagaacatgaagaaattttttaaacgcagcatctttctgcttatttttttaatggcgatgattcccgcagcggcccaagccaaaggggcccaggcggtgaaaagcccccaggcccttcgcatcgacggcgagctgacgaaggtgcggggctataatatcggcggctacaaccactaccgcctccgggatctggcccgcgcccttcaaggcaaggtggatttcgaccttgcgggaaacagcaaacagatcaccatcgattgcaccaagacctacacccccatccccggggatcaaatcggcggagcgcgggagcgggctttggggcggcaaatgcagctcacggtcatcggcgcgcatcccgcggagcttgtggaaaccgcctataatattaaggattttaactacttccgcctgagaagcttgggcgtgattttaggcttcgacgtaagctacgacgcggcgagaaatgaagccgtgattacgacgaaagccgcggaaaaaaagccggtgcctgcgccgaaaccgacccctgaggcgcctcgaggccgggtgattttaggcaacgaacggctccttacggaatacaacaatttaatcgacaacaagcgggtgggcctcattaccaatcaaacgggggtcgatgccaatggcatccccgtagcggaaaaaatcaaggcctatccccgcgcaaagctcgtggccctttacagtccggaacacggcctcgacggcaagcaaagcgccggcgcctacgtggcgagctacttcgatgcgaaaatgaacctgcccgtctacagcctctacggcccgacgagaaagccctcccgcgacatgcttaagggcgtggacgtcttggtctacgacatgcaggacatcggcgcgaggacctacacctacatctccaccttgcaaaacgccatggtcgcggcgaaggaaaacaacattcccatcctggttttggatcggcccaatcccctgggcggcgaaatcgtggaaggcttccttcgggagacccgcttcaaatcctttgtgggcatcgacaaaatccccatggcccacggcatgaccgtcggggaactggggcagttctttaatcgggaaatcggcgccgacctcaccgtggtgcctatgaaaaactggacccgcaccatggtatggcaagacacgggcctgcccttcgcccaaaccagcccgaacattcccaatttggaaagcgcctttttatacatggccacgggaagcggcgaggaaaccggcatcggccaaagcgaatacttccactgggtcggcggcagaaacatcgattccaacgaatacgcccgccggctcaacgcatcgaatttgcccggcgtcacctttgttcccgcaccgaaaggcgcaaggggcggcgtacgggtgaagatcacggatccccaccgatttaatccggcccgcaccgggatctacactctggctatggccaatcaaatgcggcccatcaatgtgcccgcctgcaaaaagccctactccatgttctatctcattcagggatcggaagaaatcgccaacctcttccgggcgagaacctcgccggaagccatggtgaaggcctatgaaaaagatgtaaacgcctttagagcccaacgacaagcctatttactttacaaataaaagaagcctccgaaaaatcggaggctttttacatggcattaatcgtttttcacggcatcttgcaattgccggcgcacgtccttcaccggcgccataatcacccggcccgtgcctcgataggcattgaccaggccttcgccgctggcggcggagccgattaagcttttgccgcttcgttccacggtaaattccaagctgttggaccaggccagggccaaattgccgtcgattttcagcacgtcgtccacgagatcgatgacgatgagctcttccctcggcacaggggattcgaggcacacgacgccgttgcctttgaggctcagattaaagaggcccatgccgccgaaagcggaagagacattggtgcgtgccacgactttttgctcgagttttccgtcacaggccataaaaaggccgtcttttaagatgatggcgccgttccaatcggccaggtcttccagcaggatatacacatccgtgggctcgaggcacaagcgtcccgtgcccgtgtattccggcttaatggcgctttcgccggagaggctgccctttacggccttgccgaaaaagtctttggcgcccttaattcccgtggtggcccttacatcccccagcatccattgcatggctccgggttggacggtgacatcgcccttggaaagatcgcagtacacttgccgcttccttacattcatttgagaagcgaagtaggcctccatggcttcttctctgcgcacggaaagatcccgcttgtattccagcacctgaaaaggtcctttttcttctacaatgcgaatgtcgtcgttgtcggtaaaattgtggatggtaaacatagtcgctccttatctttggaaatagcgattcagggcccgcaatatgcctaaggccatggcctcttggtaattggggtcgttgagttttttgtcttcctcgggattggacatgtagccgcactcgatgaggctcgtgggcatatgggcgaaattggtgcctgttaaatcgtctcttgcgatggccccgcggggcttcgccgaggtggcggcggccatttcgcttaaaatcagctccgaaaggcgcatggatgcgtcgcttaaatggcccacgtcgggattatttttcgacggataataggtctcgatgcctgcgaccgccctcggcccgccgttggcgtgaatccttaaatacacatccgccccggaatcattggcgatggccgcccgcgcctgattggaaagatccacgtcgttggaatcgcgaatcatcaccacgcggtagcccgccgattccagcttttgcttcaggcatcgactgaaagtcagattaaattcatattcgtagatgcccgtggccacgccgcgggtgccgtcagttaccttcgccttcatttcattggacgagggggcgatggtttctttctccggattgccgtgggcctgatggccggcgtcgatggcgacgatggggcccgtgcctgcaggaacctgcgtttgcgcctgaggcggattctctttcggcatctctgccggggcaggcggttcttttttcacttccttcggcggcgttttcttcgccgcttctttttttcgggcttcttctctttcttcgcgccgcgcctgttcctgttttacctggcgggtaagggccgcttccgtttttgcggcataaattttcaggcccacggccgtcacaagaaggagaaggatggcaccgataatccattttctcataaatcgctccttttctctcattttaccatagatctttggaaaacttttgagttcctcgcctcttcatttggtataatgtagctttgtaaggaggcagtatgaagaagacatccatcgccaaatccacggtgctcattattttattttcccttatcggaaaaatgatgggcttcgtccgtgagtccatggtggccgccatattcggggcaggttttgaaaaagacgcattcgtcgccgcccaatcggcaacgtcgacggtgagtatgtacatcgtcatggggatcagtaccgtttttatccccagtttacagtcggtcttttccaaatacggagaagaaggcaagcataaatttaccaacaacatcttttccatcgtaagtttgcttacgattttaatcatgattttaggcattgtgggggcgccccttctgaccatgctcgtcggcccccgcttcgatccgcggaccaaggcccttacggtgcagctcattcaattgggtatgcccgtcatcgtcttttccgcatacgaggggatcttcaccggctatttacacttccacaaccgcttcggcatcgccgcatcggtgcccatttggttgaacctggtgtatctgggctaccttatgatcttctccacgaaattcggcatctacggccttaccatcgtttccgttctcgccgtcgtggcggaatacatctgcgtttggtacggctcccaccgtgtgggctaccgctttcagcccatgctggatctaaaagacgagcacacgaagcagaccctgctcttggccattcccgccattattacggtcagcgtcaacaacattaacaccttggtcaaccgggcattggcatcgggcctcgcctccggctccatgagtcgcctggactacgccaacaagctcaatgtgctcgtgatcgggatctttattaccgccattacctcggtgatctatcccgccatgagcaaggccttcgacgaaggagaaatggaaaaaggcaagcggatcatgaacggctccgtgcgctccgtgctcctcatcaccattcccgccatggccgggcttatcgtcctggcgcagcccattgtggaactcgcctttatgcgcggcgtcttcacccaagccgatgccgacgccacggcaatttgcctccgcttctacaccttggccctcgtgtccatctccgtgaacaatgtgcaaaaccgggtcttctatagcctggaagacacgaagacccccttctacctcggcgtggtcaatgtgctctttaatgtgggatgcaacttgattttggtacgcaccatgggcatcaacggcctggcactttccgtgtccatcgcccaaaccgtggtcacctggttctccttcaccatgctgagaaagaaaatcggccacatcggcatgcgaagctatgtgaagatcaccgtaaaaaccgtcatcgcctcggtgattatgggggccttcgcctactacttctatttcggcggcctcggccttttaggcaatgcgggcaacgccgtcaaactcattctcttcaccctcaccgtggccctttcctccgtactctacttctttatcctggatctcttgggcttaaaagaagtaaaggacattaaaaaaatcgtggccattaaattcatgaagaaaaaaatcgcataaacagaaaggatacccatgaaagcaaccagcgcccgcttaaccgacgccgccatggcctatgtaaaaaagaaaaacatcaccgccctctccgtggatacgccggagatggcctgctgcggtgtcgccgatgtcatgagcgccaccgtatccaagggtctgccgaagaaagatcccatcgtctacaaaaagtgcgaggatcgcggcgtggacgtgtactacccctactacaccgaagtggagggagactgcatcatcatcgatgcggaaaaattcttaggcgtgacccggctctttgtgaccaacggcgtcatggaaatataaattgcggcacctgcgggtgcctttttttgtaccgctcgggagaaaaaagataccgcttgtcgaaaaacagcggaaattatccgtcccgtccattactataaacgcaggaggtgcgacatgaaggtcgaaatcattttagacgacgcttacgagcagccgtcggtgaaaatttacacccggaccatgacggaagaagtggaaaaactacgagaggcattaaatacggcagccatcgaaaagctagtgggcatgaaggaagaagaggtctttcttcttgattacggtgataccctgcggatctatgcccaagacaaatcggtttacgccgtggcggggggcgagatctaccgcctcaggctgagccttgccgcttgcgaagagcgcctcagggcccaccgctttttgcgcatatcccgcttcgacatcattaatttagattacgtgaagaaattggatttaagctttacgggaaccatcgccgtggaaatgaaaaacggcgacgtggtctacgtatctcggcgaaacctgcgggcatttaaagaagccctgggactttaggaggtctattatgaaaactttaagaaatgcgatggtctcttttttaatcggcgtgggcatcggtgcccttatcgaagcctttgtctccatcagactgggcatgaacatcgtcggcgtatcggaatttgtcgataccgcggcccccggttatgcgaaaatcattcagtgtttctgctacggcggcttcggcctcgtgtcctatctgtgcggcgaattttgtaaaagcaagaaaggcgcattctaccttatgcatggcctgcactttttcatccttctcgtctactttgtcttcgtgggattttacctaaagtggttcacagacccgacctcggtcctttattccgtcctttcctttgctgcgatctacttcatcatttggatcgccatctactttaaggaaaagcgtatggtggaaaaaatgaatcgacaactgaaataaaagccgccgccatgacggcggtcagactgcagacaaacctcgataaaaactcgaggtttgtctcttttttatggcttgaattgtcaagccaagtcaagtgcaaatctagcatgaggcaatcttcggaaaaaagcttacatagaatgccggttatgataatatctatcaagaagctaatcgtagcaaaagggtctgatttaaggccactactattggcgtcacttagcaggtattagatcggaggaaatgacatgaaaggcacttaaaaatttagcttatattttgctagtttcatgggcagcaattcgcataaagcgccaaggcagattatttataaaaaggaggacagacatgagaggcagactatttcaacgcatagcgtcatttataatatccttgttacttatatttacatctatgggatcagcaacttttgcagatggggagaaagacacatttgaaaaagatggaataacatataaagtcataaaagataaaacagaggacactcctggggccgtccaagttggtaatggaaaattttctatgactattaacaaaaagagccttcaaataccagaaactgttaccaatgataaaaacgaaacttttaaagtagtagctattggagacaaagcctttgataatagtacagaggaaaatagcttaggtagcgtgacaatacctgcttcagtgacttcaatcggcaaatctgctttttcagatttaacatcattgagcgacgtccaatttgcagaaaatagtcagttacaagctattggagacaatgcatttgacactacatctattaaatctatcaatatacctgcttcagtaaagacgataggtacgtcagcttttacgaagtgtagtaaattaacttctgtagtcatacctgaaggggtcacttccctcggagacgaagttttctcacataataagcagttaccatctataactctaccggccagtttaactacaatgggaaagaatgtattcaacaattgtcctagcttaaagaatatatctgttactcaagggaacacactctatgccagtgaaaatggagtggtgtactcagcggataaaacgacagttataaagtatcctgaagggaaaaaagatacagactttactgtcccggcttcagtaaaaaacataggggattatgcattcgcgaacaatagcaatattcaaagtgtgaaattaccggaaggagttaaagtccttggaaagtatgccttttccaaatctactggcttgacgtcactggacctgggtaatagcttggagtcaataggagacttggctttttggaattgttctaggcttgaaacattgaccatcccaacctcgttgcattccattggaagaaatgccttttatgggtgtagtgatcttaagtttgtggttgcttctgaagaaactagaacgctgttgaaatcctctggcatcgctgacgataacattacgctatcagcaccaattgccgagccaacatttgtagtcaatggtgtgatgtacaaggtgttgtctgaggcgaatgacggtcaaaaaggaacagtccaaattggggatggaaaaactttagcaaccgatgctaatggaagcctttcaattccggctaatgtcaagagagatgaaaaggactatactgtcgtatccgttgctccctatgcatttaaaggttccaaacttacttcggtgactttaccggaaggaattaaaaccatagggaaaagtgcattccgcggagcgcaattaacatcttttgaaatgccttctaccgtagaacaaatagacgaaagctccttttgcatggccagcaacttgatgaaaataaccctatctcccaagttaaaggttattccaaaagatgccttttcctatagtggtctaagaacagttgatcttccggagggcattacagaaattggcgagatggcttttagcagttgcagcgatttacaaaaggtgagtttgcctgcaagccttacaacaataaaagaacaggctttttggtgtgatgaggcacttcgagaagtcgtgatccccgtggggagtaggctaaaaacagttggtaaaatcgcatttcaatggtgcaatagtttaaagggcattcaactgcctgacaccttggagattattgaagacaaagcattcaataactgcacggcactaaaaagcattggcttgacaaaaaacaatcaattaaatagtttgggagagaatgccttccaatctacttcgatcactaattttcattattctgcttctctaaataaagttggcaagcggcctttagaaggctgtaatggtttaacagaaattactgttgcgaacaataaccccatgtttaagtctgtggatggggtcttatttaataaagatgggacatcattattgcaatatccggccaataaaaaaggctctagctacacaacaccggcgggcgtgaaaaaaatttcgacttatgcgtttcaagggacatcgcctaaattgagagagattgttattggaaaaggcgtagaaaacattgaatctcttgcattccagcaatcgaaagtggaaagtatttcaattgccgattctgtaacatcaattgaacgactcagtttttacaaatgccccaatctggaaacattgaaacttccttccggcctaaaaacaatggtcacatatttaatatgggattgtgagagcttaagcaatttacaaatccctgcatctgtagagaagattgaaaactccgccgttggtaaatgccctggcctttcttccattgaaattttagcaacacaaatgaattctatggcaaaaggtgcattctctgtaacatcacccgatttggttgtgacagttactaacaatgctataaaaaacatggttgtagctagtggtattagtgaagcacaagttaagataaaggactcgccactacctgtaccaagcggctctttcacagtgaatggtgtcttttataaagttcttacagaaccggcttccggagagaatggcactgttcaaatcggtgatgggtccaatgaaattaaagcaaaaggtattgttacgattcctgcgactataaaaaatgaagacaaatcctataatgttatctctgtggcatcaaatgctttgctaaatagccttgttacggaatttcatttaccagatacggtaaaaaccatatcagatcatgctctctacaaagctccggagttgacaatgtttgaaattccttcaggcgtggagacgataggggttaatgcgattagcggttgccataagctaaaagcgatcacttataaacccggcagccatttgaaaaagctaggaaatggagccttaagtgataattccgcacttgagacaatttctttaccaaagacggtgaaggatattggaaaatgtacgatgttctttaactatagtctgcgtgaggtaaattttgaagaaggttcttcatggacggaattgcctgaaggaacctttgcccgcgattccaagttggaaagagttattttaccggccaccgtaacatcaattggcgatactgcattttggaattgtaatgcgctgaaagacattgatttgacgaaaatcagcaacataggcgagaaagcgttctttcattgtactgggctcaattccattgagcttagcaacgacattgaagtattaaagggcggaacttttgagggttgcacaggacttagaagtattaaattaggaagtggcttgaaggtattgggcgacctaattcaaaaggatgaagatgaattgaccggcgtctttgagggctgtacttctttggaagaaattaacattccggaaaaaacggatgttattggtaaaaacacatttagagattgtaataagctaagaagtattgttatcgaatcaccagcattatcaaaggttggagcaaatgcattctatcgaatggcaagcgactatgtcattacagtccaaaacgaagcggtcaaaaataaactggtctccgaagcattggttgacggctctcatatacgagtaaaaaatggcgagtcattagaaacacccaccgttaagcttgtcgctcaaggaaatggaggattaggtaaggtggctcaggttaaggtttcaaacatgcaaaatggtaattatctgttggttcaaattacgaatccctctggtgtaaattccatttacgcagtgcccgtaccccaaaacggcttaatgaacctttcttatgccaaagataatcgtgtgactgtatggctaacagaacgtcaaccaaaaatgaccgccgaaacaccaaatgcaggtggtagaatctttggatcggcctctctgtagtcaatgggggatatctatgaataaaaaacgtaaaagaatatcatctttattggcagggattctattatcatttattttagctgtgccagtacatgcagcacagcctgaaataaatgcttcttatgatgcagcaagcggaacagttatagtggcctcgacaggtcttgatccgaacaagttgtatcatctgatttctattcagaaagaagattctgttattgcgttaaaaagtggggattctaatgccgagggaaaaatgaaagaaaaaatcccgacgggaaaattggaaaaaggttcttaccatatttatatttatagtaacgatgacggttctgtggttgtaagtaatacgttcacagtaggcggcgggtcggacagtccaggaggcaccgtcaagccagaagatccagataatccaagcggaacggttaaacctggtgggcataataatcctgtaggcccaggaagccccatcaaaccggaaaaaggaacaaatgcagggtccggttcttctccagggagtactccggacgcatttagtggaatggttaatcattttacagatgttccgtctggttcctactatgaaaatgcggtcacttgggcagtcaataaaggcgttaccaagggcacgtccaccaataccttttcacctaacaaagtatgtactcgtgctgaggctattacattcctatggagagcttcaggtagtccgacttcaaatacgtctattaagaagtttaaggacgttacgaaagatagttattactacgacgcagttgcatgggcagtagaaaaaggtatctgctttggtacaagcaaagatacatttagcccgaataaaaattgcaatcgcgccgaaatagtgacatttatttggcgagaacaaaagtctccggaggtcaatgtaagtaacccgtttaatgacgtggcgtcaaacgcttactactcaagagcggtaatgtgggcagttaaggaaaatgtaacaaaagggataacagaatcctcatttggtccgagtaacgattgtactagagcacagatcgttactctcatctggaggacaatggggaaaagataaggaatgccaccggcagaagtggtgcaagatcattagaattatccttgcccgtaagtctgtaggcttattatgaaaatcaaatgataaaaggagctacttcagaattgatttgcttaaatctatagtagctccttttaatataatctaattaatatatattattttagagttaatataaattacggcatctgtggtgaaataaagccgccgccacaacggcggtttttttattgcgaagggtatgaatctaaaaagaggtgaaacaatgaacagccacgacgcatacatgacggcccgggattttttccgctcgggaaagacccggcccctcctttatcgaaagaaacaactctacgccctccttaaaggcatcgatggtttccgcggcgccatcgacgccgctttaaaggcggatttaaacaagtcttccagagaagcctttctcacggaagtctatctcgtaaaagaagagatccgccacatgattcgccacatgaatcgctacggccgcacgttgcgcccccttcccgggatggcccaattgccgagtactctcgccgtttgccgcaagccctatggggcggtgcttattatcagcccgtggaactacccctttcagctaagccttttgcccgtggtgggagccattgccgcgggaaacgccgtggtggtgaagccatcggagtttgcgcccgagacggcaaaggtgctcgaggccctgtgccgtagcgtgctcgatgaaggcctggtgtctttcgtcttcggcgaggaagcggcggcgaaagccctactggccgagcccttcgacaaggtgttttttacaggcaatagcgatgtgggccgcgcggtgatgaaccaggcggcggcacacccctcgcccgtcgtcttggagcttggaggcaagagcccggtcattgtcgataaaaccgccgacattcccatggcggcgaagcgcatcgctttcggcaaaaccatgaacgccgggcagacctgcgtggcgccggatacggtctacgttcacgggtcgcaaaaaggggccctcatcgatgccctcgccgatgcctttgaagaagcctttcccacggaagattactttattaacgaaaccgtgcgcatgaaccaccggggccgctacctacgcatgaaggagctggcgaaggagggggacattcgcacgaaacacgggcgcattttctacgacgagagcctccacgtctttccctgcgtcgtggaaaatcctcgggggcggctcctcgaggaagaaatctttgggccccttctgcccgtaatcgcctacgaatcggaagacgccctcttcacagaattaagggaaaaagacaagcccctggccctttatctcttctcaacggacgaaggctttattcgccgcgccatccgcgccgtggacagcggcggcgtctgcgtcaacgacaccctcatgcacctggcgtcaaacaaggcgcccttcggcggcatcgggccctcgggcatgggatgctaccacggcaagtggagctacgaggccttctcccgcccccgcaccgtgctgaaaaaatccccccgcttcgatctttccctccgctaccatcctttttaaatctgagcatagaaaaagccccgaaactcaattcggggctttcataatagacgattagtcgtttgcgtagttgtcgaaatagccttgaaccatgaccaccggcgtacccttgtcgccgctgccgctggttaagtcggcgagagaacctaaaaggtcggtgagacgacggggcgtggtgcccaaagtttcgtctttgcctaccaagttggcatctttttcgtgaattctgtccacgatggccgcttgcatttcttccgtgctcaaatcttttaattccgtatcggcgagatacttcatcttcagctcgctgggcgtgccttccaggccgtcggtgtaggccggggagaccaccgggtcggccagttcccaaatctttccgacgggatctttaaaggcgccgtcgccgtagatcatgacttcgaagtgggcatcgaagtattcgttgagacgcttttgcagggcgtcgacgaagatttgtccgtctctcgggaagagcttaatggtttccgggccggccatgttgctgcccagaacgccgtagtcggcattgtaaccgtgttcggtgctttccttggccaaaacatcgtccagacccagaaccttatttgcgccggaatcttttaattcccgcttaatcagttcccgggtgtgaatgcttgccaccaacacgtccttggtgtaggagaggatggtgcgggggtcgttggagaagtagatttcgctgttcggggcaatttccttgtagagcttcacatagtcgatgcccgtgaattcgtgttttacttcttcgccgaagtgttcccggtattccgcttccgtaatgacgtcgcggtaggggttgatgcctgtgccgtagagcttgttttcatccattaagtggttgcccacttcgtcggagggaaaactcagcaagatatggagcttgcggccgctctttgccagaccctttaagatcgtggaaaagcggttccgtgataagatcggaaaaacaacgccgaaggggccgtcgaaggattcggcgacgtccttggcaatgtcgtctaccgtggcgtaattgccttggcttcttgcgaccaaagattccgtgacacagataatgtctctgtccttcggttcgatgttttccgattcgatggcttttttcaccgaatcaaaaaccacgtcgaccaggttgtcacctttctttacgatgggcagtcgaatgcctcgggttgtcgttccaatgtaacgcttcataatacgtatcgcctctttcatattcaaaagtaaaaatgactatcctattctaccatacttcgccaaaaggtggtatgatgaacatcaaagagatggaaaaggagggcggccggtggaaggcgtgtatcgacaaagaaacaattttttccgcaaccattgggtgatgcttatcattgtttggttgcttttttttgagcgcctgtggatgctttcccgtttaggcgccgcctacagccttaaaagcgacgacttaagctacatgaaggcgggcattaccatgtaccgcaccgccaccttaaccatgcacggcgtcgtaagtgcccagatcatgcccgggcttcccgctctcatcgccttattcgccaaggccttcggcaccggccgcgggctatggctcgccttaaaagtggcctggtgcttcatgggcaccctggccgcctggtttacttacctcaccataagagaaaaagcccccacctacgccgccgtcctgcccaccctcatgtactttacgccggacttcgcctggcaagacaacttgattttaacggagaccccctacctctttctcgtgaccctctacctctacggcgtgattcgcatgggcaacagaaaagactgggcgggcttcattatcatggccctaagcgccttcttggcctttctgctcaaagcccaggccatttgcctttttttcttgcccctgccttacttgtggatcaagaaatacccctccacccgcctctacggtcaggcctttatgatcttcttggccctcttggcctttatgctgccctggagcgtgcgcaattacaaacaattccgcgcctttattcccaccacctacggcatcggcaatcccctgctcttaggcacctatcagggcgaaggctatccaaccgatgaggaagtggatcgggcacccttcgatgaaaaagtgcgggaagaacacgccttcttaaaagacaaagacggcaaattttccgcgaaacaccagcgctacctggagcttttaaccgacgaaaaactggcccgcggccgcatggtctattggtggaaacacgaccgggattccatgctgaaaagttatttgtggctcaagcccaagagcatgctcttcgataccttttattgggacgaagtcattcccaaaacgaaataccccatcatccacctgcggcagatcgactttaccctggccatggccgcagcggtggcggtgcttctcgcgaaaaaaaccgtggcggaaacctacttcgtgctcttcgcctactgggttcaggtctacatgtacgcctacgcctacgtcttcgatcgctacgcccaaaccttattgccctaccgctacgtggccatcggcttcttgattcccgcggcggtggacatcttccggcgcctgcggcgctacattcgcggcaagcgggcctatcgggaagggctgaaaaagcagaagatggaaaattaatttcgagcaaaacaaaagcactcggatgcgtccgagtgctttttctgtgaaattaataagcctttgcgtagtagaccatgtgcttggcgggtttgccgcagtggacacaggtgtctgacaggtgttcttcttcgaaggggatgcagcgaatggtggcggtggtttcttctttgatttgcgcctcgcattcttcgtcgccgcaccacatgcctttcaggaagggattgcctgcggccattttttccttgaagtcgtcgtagtccgtgacggagaaggtattttcttccatgcgttttttcgccgcttcaaacatttctttttgaatggtttcaagcatgtcgtcgatcgtatccgccaggttgtccatgggaacgaagattttttcgttggtgtcgcggcgcacgaagaccacttggttcttttcgatgtctttcgggccgatttccacgcgtaggggcacgccttttaattcccattggttgaatttccaacccgggctgtattgttcacggtcgtccagttccacggtgaaacggttctttaagctgtcgtagagatcttgggccttttctttgacaccttctttatgcatggcgatgggcacgatgaccacttgggtcggcgccacgtgaggcggcatgaccatgcctcggtcgtcgccgtgaaccatgatgaggccgccgattaagcgggtggaaatgccccagctcgtggtccatgccgtagcgagcttgccttctctgtcttggaattgaatgtcgaacattttcgcgaagttttggcccaggttgtggctcgttcccgattgcagggccttgccgtcgtgcatcatggcctctaaggtgtaggtggcatcggcgccggcgaagcgttccgattcgctcttcttccctaagatgacgggaatggccatttcatcttcgatgacttggcgataaatttcgtgaatgcgcagggtttcttcctgagcgtcttcgtaggtttcgtggaccgtgtggccttcttgccacaagaattctaccgtgcgcaggaaggggcgggtggtcttttcccagcggaagacggagcaccattggttaattaacaccggcagatcccgataggtttgcacccatttggaatacatggagttaataatcgtctctgacgtggggcgtacgattaagcgttccgccagttcttcgtcgccgccgtgggtaacccacaacacttccggggcgaagccgtcgaagtgttccacttctttttgcagcaaatgttccggaatcagcatggggaagtaggcgtttttgtggcccgtggccttgaagcgcttgtccgcttcttccttaattcgttcccacacggcgaaaccgtaggggcgaataatcatgcagccgcgaaccggggcgtagtctgccatttccgcctttaaaaccacgtcggtgtaccactgagcgaaatcatcgtcgcgggctgtaatctctcttacaaatttttccttgtctttagccattttatcctcctagactataaaaaaaccacggtttctcagggacgaaaaaccgtggtaccacccaaattcaataccctcatcgggtatcctccatgtcgtaacgggacaagcggtccgttttgcggacaactccggagcgggattccgcgggcggccatcgtcgaatcttgcaatcgatgaattcgactccctgagatttagccacgcgtacttttctccatcgaagtttttaatacatccattatacagggacgaggggtcttgtcaagtgaaggggcgtcgatttcatattttttcccgggcccctctatcggttcttgacattgaaaattccttttactattataaaagaaaacaccccttgcgccgcgagggtcataggtttttttatattggttatctttcgagagaaccaattttttctattttaggagggaatatggatctagacaaaaaattcggggaaatggcgtttaacaagcgcatgatgcgggaaagattgccccacgccatttaccaccgctggaaaaatgccgtcagaaacgaggcgccgttggatcgggagaccgccgatgccatcgcccacgccatgaaagaatgggccctggaaaagggcgccacccattattgccactggtttcagccgctaaacggtcttacggcgaaaaaacacgacgcctttttggaccgcacggacaaatacgaagtgattcagcggttctccggcaaggaattgattcgcggcgaaagcgacggatcctctttccccaccggcggcatgcgcagcaccttcgaagccagaggctacacctattgggatgccacggccaattcctttattatcgaccggattttatacatccccaccatcttcgtttcctttaacggcgacaagctggacaaaaaaggccccttgctcgcctccatgggcctcattagcgagtacggctcccgggtggtgaatctctttgaaaaggaagaatacacctaccgcatgaagccgaaggtgggcctggagcaggaatttttccttatcgacaagcgccactacgacaaacggagcgatttaaaaagcgtgggccgcaccttaatcggcgccggcgcccccaagggccaggaaatgggcgaccattacctgggtggcattcccaagcgggtcatggctttttacgaggccgtgaacgaaaagctttgggaactgggcatcttcgccaagacggagcacaacgaagtggcgccctgccaatttgaaatcgtggctctttttgaaaatgccaacatcgccgtggactacaatcagctcattatgagcatattaaaagaaacggccaccgactacggcctggtctgtttgctccacgaaaagccctttgccggcgtcaacggcagcggcaagcacaacaattattccctcaccaccaattacggtaaaaatgtcttcgatccgggagacaatccgaaagaaaacctcaccttccttttattcctcgcggccatgatcgaagccgccgacgactacgcacccctgtttcgcatcgcatcgggcgggccgtccaacgacaggcgcttaggcgggctggaagcgcccccctcgattatttccatcttccttggaaacgacctggaagaaattttaaaagacatcgcccacgaagagtaccacgcgaaaatcgaagccctgccggaaatcaagatcaattccctgggctacacgccgcgggattccagcgaccgcaaccggacaagccccttggcttttacgggcaacaaattcgaattccgcatggtgggctcttccatgaccggggccgatgccaacatcgtcattaacacggccctgggccacagcttaagaaaaatcgccgagcgcctggagccctttgccgccgacgaggaaaccctcagaaaagaagcctacaccgtcatcgcggaaatcatcagagaccacgagcggattctctacaataaagacaattacgcccaagcctggatagaagaagccgagcgccggggcctgccccattaccgcaccttctttgaagccattcaagccttaaaggacaaagaattaatcaagatcttcggcgactacgacatcctgagcgaaagcgaagtcgaggccatttacgaagtgggcctggaatccgtgtccgtccacggctttttggaagcgagaacccttatgaccatgctcacaaaagacgttgaaccggcggtggtggcggaattaaacgacattttaaacgtcaccggtcgcttggaaaatgcggcacttaaagagcgcctggaaaccttaaatgtgctatttgaggaactccttttgcgccacaagaaattaaaagccacctacgccaaggccaagaccctggaaggctacgcccgggcggaatttttcgaaaaagaagtcattacccaattcccccacatacgcaaaatctgcgacgaactggaaaatcgcatttccagaaaacactggacgattcccacctacgaagacattttcactgaactcaactaggaggcattatgacgaagtatatatttgtaaccggcggcgtggtctccggcatcggcaaaggcattagcgcggcaagcatcggccgcctcttgaaaaatcgcggcttcagcgtatttatgcaaaaattcgatccctacctgaatgtggatcccggcaccatgagcccctaccaacacggggaagtgttcgtcaccgccgacggggcggaaacagacctggatttgggccactacgaacgcttcatcgacgaggagctcaccaaagccgcctccgtcaccacgggaaaaatctattcccgcgtcattaaaaaagaacgccgcggggattacgacggcgccaccgtgcaagtcattcctcacgtcaccgacgaaatcaaacacgccatctaccgcgccggcaaagaatccggtgccgatgtggtcatcaccgaaatcggcggcaccgtcggcgacatcgaaggccttccctttatcgaagccattcgccaaatccactcggaatgtgccgtggaagacgtgctctttgtgcacaccgtgctcattcccgtgattccgggaagcgacgagctgaagaccaagcccacccaacacagctttaaacaactcatgagccaagggatcaaggcggacatcatcattacccgaagcgacggcgccatcgacgcctccattcgcaagaaaatctcccttttctgcgacgtgcccgaagaaaatgtcatcgaatcccgccacgtcgacttaatctacgaactacccaatgtgttcagagaacaaaacctcgacgaaatcatcatgaaccacctgaagcttgagcccaaggcattaaaagccgacgattggcgccacatggtggaagcctttaaacaagcggaaggcaccatccgcatcgccctcgtcggcaaatacgtgcagcttcacgacgcctacctctccgtcacccaagcccttttagatgcaggctacgacatgggccgcttggtcaccatcgactacgtggatgcggaagatttggtcgatgaaaaggccctggacgaggcattaaaagacgttcacggcatcatcgttcccggcggcttcggcgagcgaggcatcgaaggcatgatccgcgcatcgaaatacgcccgcgaacacaaaattccctacttcggcatctgcctcggcatgcaaatcgccgtcatcgacattgcgagaaacatcgccggcttaaaagacgccaactccacggaattcgacgtcaacgctccctacccggtcatcgaccttatggaagcccaagtaggcgtggaaaacatgggcggcacccaacggctgggcaactacccctgccacttaaccgagggcacccgcgccgccaagctctacaaagaagcggacattttagaacgccaccgccaccgctacgaattcaacaacgaattcagaggcatgcttagaaacgccggcctcaccatcgccggcatcaacgaagacttggatctcgtggaagtcatcgaattggagcaagacagctacttcgtggcctgtcaattccatccggaatttaaatcccgccccaaccacatccaccccttgttccacggctttgtcgaagcagcgggaaagcgagccttggtgtgagcgaacgttgggatctctacgatgaagccaatcgccccaccggcgaagaactccgccgaggcgagcgcatgcccaagggccgctaccaccgcgtcgtggaagcctggatccgcacccccgacgggcgctacatcctgcaaaaacgctccatgaacaagaaaaactaccccggctactggtcctgcaccgcctgcggcagcgccatcaaaggcgagacgccggaagaagccatgatccgcgaaatgcaggaagaaatgggcattcgccttcaagaagacgaactgatcctcgatcggatcattacagaatttcccgcccactactacatctatcgcatcgaaaaagaactcaccgaatccgacatcaccatggatccggaagaagtcgacgacttcatcttccttgacaaagacgccatcatgaactgggtggaaacaagacacatgaccaaactgtcctactaccgagaattcttcgaaaaatggaaataaaaaaacagggatctcaagacccctgttttttcaaattcgaaggcggtaaaaacacccacatagacagacacggctcccggtgttcattaaaaagcgcataccgggcactgcggtcgaaggcaatgctgtctcccgcctcgatgggatagagcacatcgtccaccatcaccgtgaggcggcccgccgtaataaagccgaaggcttccccctcatcgtcggtggtaggaagcacatccttcctgtccgtggtttcaaagcgcatctccaccacctcgtagtggcgccggccttcaggcgacaaaaggcgcaccctgcggtccgcggcaccgtcgtccaacatcatgtggtcgccgctgtgaataatcgtgggcttcttcttcgaaggtacatcctcgaaaaattcccccatggtcgtatgtaaagcatccacaatgcgcaacatggcattcaccgaaggcgaaaccaaatcccgctcgatttgactgatcagccccgtggacaaattggccgcctccgccaaatccttaatactcatgcccaaagccttgcgcatggttcgaattttttgtcccgaaaactttccggacatacaacaccccctgcatttaatgtaaaaatatatactgaacatagtataccatacattcttcgaaaaattgaaaaaacaatgcggccgcgcgggaaaaagaccggcgccgaatatgctataataaaagccgaaaaggaggttttccatggaaagagaaaaaatactggtcatcgacttcggtggtcaatacaatcaactgattacacggcgcgtgcgggaaaaaaacgtctacgccgaagtcgtgccctacaaaaaagccctggaggccattaaaaaagaaaagcccatcggcctcatcttcacaggcgggcccaacagcgtgtacgacgacaaaagccccgacatcgatcccgaaatactgaacatgggcctgcccatcttaggcatctgctacggcatgcaactcatcgccaaaaacatgggcggtaccgtcaccaaatccgacaagcgagaattcggcaagaccaaaaccatggtcgatcccgcctcgaaactcttcgacggcctggatgtggaacaaagcacctggatgagccatatcgactacgtcaaagaactccccgaaggcttccgcaccgtggcatccaccgacagctgccccgtggccgccatggaaaacaaagagaaaaacatctacgccattcaattccacggcgaagtcaatcacacagaacacggtcacgaaatcatcgacaacttcctgaaaaaagtatgtcacgccaaaggcgactggaacatggacgacttcgcaatcgaagccaagcgcgccatccaagaaaaagtcggcgacaaaaaagtcctcctcgccctctcaggcggcgtcgattcctccgtgtgcgccaaactcctcgtcgatgccatcggcgaaaacctcatctgcatcttcgtcgaccacggcctcatgcgcaaaaacgaaggcgacgaagtggaagaagcctttaaagacaccggcatgcacttcattcgcgtcgatgccaaagaccgcttcttaaagcgcctaaaaggcgtcaccgaccccgaacaaaaacgaaaaatcatcggtgaagaattcatccgcgtcttcgaagacgaaggcagaaaaatcggcgccgtcgacttcctggcccaaggcaccatctaccccgacatcattgaaagcggggcgggagacgccgccgtcatcaaaagccaccacaacgtcggcggtctgcccgccgtcgtcgacttcaaagacctcatcgagcccttaagagacctctttaaagacgaagtcagaaaactgggcgaagccatcggcctcgatcccaaactcgtctggcgccaacccttccccggacccggcctcgctatccgcgtcatgggcgaaatcaccgaagaaaaactcgacattctaagagatgccgactacatcttccgcgacgaaatcgccaaagccggcatggaccacgacatcaaccaatacttcgccgtccttaccaacaacaggagcgtcggcgtcatgggcgacttcagaacctacgactacaccctggcacttagagccgtcaccaccaccgacttcatgaccgccgattgggcccgcatcccctacgacgtgctggacaaagtcagcgtgaggattgttaacgaagtggagcacattaaccgaattgtgtacgatattacatcgaaacccccggctacgattgaatgggagtaaatttttggtgaaaatggcgaactagactcgtttcaaaaagcccgcgctgcggcgtacctgtgtacgcctcactgtgggcttttttgcacttcgtctatttcatctatttttcctcaaaaattaatgtttagtcgtggagcgggaacaattttaagtaaaatttgaaaaacgataagctataaagagaatgaaaaatggctactggtactcaaatggtaccggaagtaaaaaagaatacacgaaataatcgttccaaatggtttgcatttggacaaaatcagaccgtagtgagctgctacggtctttcttttgcttagatttataatctaagtcgaataaagatgaaatcttagacctgtaagaagttttaggctatgttataatagggatagattaaatttcgattcaggagatttaaaaggagaggaatttatgcagaattttggaaagattatttttaaaatagacaaagttttagaagcgaaaaatatcagcaaaaataaattagaaaaagaggcaaatcttcaaaggacgcaacttaattcttattgcaataataaggttaaaaggatagatttagaaaccattgcaaagatttgttatgttctagaatgcgatgttaaagatatagtggaatacagtaggtgattgatgatgtataaatccatagacctatttgcaggaataggaggaattagacttggctttgagcaagcctttggtgaggagatcaatactgtcttcgtatccgaatgggataaaaaagcgcaggaaacctatttagcaaatttcggagataaaataaatatttttggagatattacaaaaatcaatgaaatagatatacccagtcacgatattcttcttgcaggatttccgtgccaagcattttcattagcaggtcaaaaaaagggatttgaagatactagaggtactttatttttcgatgtagctagaatagtaaaattgcataaaccaaaagttgttttttgcgaaaatgttaaaaacctagttaatcatgacaagggtaaaacatttaagataattaaaaaaacgttgaatgaacttggttatagggtttttcacaaagttcttaatagtaaagattttggagtaccacaaaatagagaaagaatatatatagttgcatttagagaagatatttcacccaatagctttatattcccagacaaaatcgatgatacgaaggtcattgccgacataatggaagaaaaagagacatctcccaaatattatttatctgatgtatatcttgattctttaagaagacataagcaaaggcaccaagataagggaaacggttttggttatgaaataagagatgtcaattctgttgccggagccatcgtgtgtggaggcatgggaagagaaagaaatctaatcatagataaaaggttaactgatttcacgcctgtaactcatataaaaggaaagataaacagagaatatatacgaaaaatgacaccaagagagtgggcaagattacaaggatttccagataaatttaaactggttgttgccgatactcacttatataagcaattcggaaattctgtaacggttccagttattaaagcgattgcagaaaaaattaaaaaccagctggagggtgttataattgatgatctcgctcaagagaatgagtattatgaacaattagagtttgcgtggaggtaaaaagtgataagagggaacaagggtgaatggtccgaaatatatgttttgttaagactcttagctgacggaaagatatatgcagccgacagtgaattgaataaattggagaatgtgtactttcctatcattaagataataagagaagagaacaaaggtgaaatcaaggagtatgctacaggagagatcatatccatatacattaacggttcaaaagtgaaagaattatctgcgaccgagtttgaaacgcagtccgaacttctgttaaatgaaattaattctaaaacttcgaaaggagcattttctgtagaaaaaacgcagaattttatggataaaattttgtgctataagttgtcggcacctgcaacggacaaaagcgacattacaataaaaataatcgatataaataccggttacagccctacggtagggttttccataaaatcggaattgggctcctctcctactctgttaaatgctggaaaaaccacaaactttatttataaaatcatccacagttatcccgacttggttcgagaagcaaatgaaatatatatcgtatcggcgggtaaaaatcacacggatgttagaggacgtatcaataaaatcattgatgaaaacgggcgattgaaatattggaaaatgaataatcggacttttagcgataatttggtattgattgacagcaatatggataaaattattgccgaaactcttttatatttctatagggacgggatcagcaattgcgatgaaatggttgaaaaacttgaacaggtaaatcctatgaactacggaaatgttaatgcttataggtataagttcaagaagttcctgaccgccgtagcattgggaatgaaacctgctacggtttgggacggtgtggatgaagcaactggagggtatattgtcgtaacgaaagaaggtaatattcttgcatatcatatatacaacagaaattactttgaagaatatctattgaagaacacaagatatgaaacggcatccacttcaaggcatggttttggagaaatatacagcgagaacggggaagattttattaacttaaatttgcaagtgagattcagataatgaagaaaaagaagcctatgaccagaagtcaaaatatggcaagagtgaaaagtaaaaatacaaaaccggaacttttcctgagaaaacttctgtggcataaggggttcagatatagattaaactataaggagttgcccggaagtcctgatttatatattcccaaatacagagttgctatttttgtaaacggttgcttttggcatatgcatgaaaattgtaggtattcatccattcctaaaaacaatcacgatttttggaaaaacaaacttgaaggaaatgttgaaagagataagcaaaactacagcaaacttgaaaacatgggcattaaagtaatcgttgtttgggggtgtgaaattaaacagatgatgaaagacaaggaattagtacaaaggagactggataacttagttcatgagattatacgcattgttgaaaaagaatgaaatgtcaaaactgttgagcataatattgatataatttaaggaggaagttatggatataaatagtttaagaactaagctgcaagaaaatgatttagaattcaatctattctttactagaaaattaagaaatggaaactatgtgagcttttcgcctaacattgatgcacaaatctatgacgatttaattagtttaataatagtttacattgataaatttgcagagaagttgagtgtagattataatccaacagggtacagagatgagactatagaaagttgtaaaacatcctatataaatgattattgtagggttttagaaagttttaataattcagatcatgttgaaacagaaatagatcctgacaattatagtttttatacttttgagataactaaaaatgatgatcaatttcccaatataaaaatatttagaagagtaaccaaatttaagaagttgcattcaagagggattattgcaagatttaatggaaataccttaaataaaattgaaagtaaattaattggaatagatggagaagtagattttatagctgttaatgatgatatactaatattatctcattattcattagagagaatttttaatttagacgatcaatttagagatacagcatcagattttttaaatcaagagggattaagtgatggcataactaactttgaaagtttttatgaagattgtttaaatgatgggcgttatagaaaaactcttacaaaaatgaccagtgaaaacataaatattaataaaacatatgaaaattatgaaaatataaagaaaactatagatatgtttaatttagagataaattataacgaagagccttcattttcaatagtgtatgaagataaaactcagataatggatattttaagaatattgagagattcatattatagaagtatcattaatgagcaaataggggtagatgataaataaaagctggtgttttatgaataatagaatggataaaatttataacataataacaagaactattatgtttatatcatcctatttcccactttacattatgattataattctgtacctccctaaaatagaaaaagggttcctgggaaaaaatatattaataataatatttgctgcattgacgttgatcttaatatttatttcagttataagcgtgattttattgaaactcggaaaaggaactcaagaaaaagttattaacaataatcttgaaaatcctgatgatacagtattaagctatattatgacatatataattccactcattactaatggagatagctcaaaagaagtttatatagttgacattcttttgtttatcttaattggatatatttatttaagattaaacttaatatatttaaatcctttgtgggctatgtttggatatattatatatagagacgccaataaagagattgtaataaccaacatttctagagaagtgttaaggcataaagaaagattaaaaggatactatataagtaatgatatatttattgctcataaaaaagacaattagttttctcgtcttaataaatcccaatgatataaagaatgagaaactagagaggagcgttttctctgcttgcaatatgcttgcaaaaaatcagataaacagaaataaaatggataatagaactaaaaccgatataaaaaaccttgattttatgtcgttcatacaaaacagtatcaatggacatatcgaatgggaataagtgaaaaacaaaggataggcgcgtacctatccttctctaatgcgtatctgtatgaaaagcaccggttttaaactgcgtatttgcaagtaggtggttatgtgaatcgtaaaagctgcgacagattgctgagatcgcaagaaatttccggaaaaaagattttgatcccatcgactctttttgtgtcacttgcgggaaggtttaaaagaggcgtgctgtgcatgtccttctccagggccgtttttttcttccgtctcttttcttgcatcatcccaaaaatttatagttgccgtaaaacatgacgaaggctgccacgaggataaaaatgtgccagatcgcatggttgtagggaattttcttaattgaatagaaaacagcgcccagggtatagaaaaggccgccgagaaccaaaaacagaatgtagctcaggccgatggccctatagatctgatagataaggagaagggaaatccaccccatggccatgtagatcgccatggaagccttgcctattttgtcttctttggccgtggcaaaggcgatgatgttcatcgcgatgccgataagtgccagaatccagatgagaacaaagataacgatggcaaaagaggacctgagcccgattaagataatcggcgtatatgagccggcgatggtcaggtaaatgaccccgtgatcgatggcccgaaagatggtccgcgccatgggccgggtcatggcgtgataaaggcttgaggataaaaacatgacggcgatggcgataaaataaacgagccacgccaaaaatccaatcacgtctttgcctctgtacgcttcgacgatgaccggtagaaagaaaatcaggcttaagagaaagccgataatgtgggtggcaatatttaaagcctcttcagacttgctgtatttaatgattctcatttttcgcctcccgaaaattttaacacgttttaatcaatcgatgaaagatccaatgggctgtaggaatcgagtaaacgatttgtctccattatatccttcatggcgccgtgcgtacaacacaccggaaaaaacaagccaaaaacaaaaggacccccaaaggcgggagaaaaatccatgcttcgggggtcctttatgtgcgtacgcgattcaagatatagggggcgtttttacaggcccaagaggcgaatcaacaggggcatgaccatggatgcgataatggcgtgcaggccgatggttaaaccgctcatggcgccttccacttcgcccagggtaatggcgtagctggtgcccacggcgtgggcggcggtgccgatgcccaagcctttggagacagggcttttaatgcgcgcaagcttgatgcagtagggcgcgatgacggcgccgacgatgccggtcaagataacgaacataacagtaatggagacgatccagcccattttgccggaaatttccatggcgatggcggtggtcacggatttcggaatcgacgccatgagtacctcttggggcacggccagaacattgcctaaaaacaccacaaaaagcaccacaaagacgcagcccacggtgaccgacacgaggacgggcaccaggtatttaatcagggtgtctttttgtttgtaaaggctcacgccgataacgatggtttccaccggggaaatcaccatttgaatcatggagccgccggcctggtaatttttcaggggaatgtcgaagacggtaagcacgagaataatggcgataatggaaaacaaaaggggattcaaaataggcgcatttaagcgggtgctgagcttcgaaaacaaaataaagaagagaagggaaagcaccagcccgaaataaggggtttgggtgatgagatcaagcatcttttttacctcctgtcactttttcctgcagcgcgatcaccacatcgctcactttgcccgtcaccatcatggtggcgccggtggtgatgacgatgattacgacgattttaagccacacgtccagagaaaattccgagaaatactccatgacggccacgccgacggggataaaaacgatggctaagtacttgtttgaaagccggatcacgtctttcagctgatccaatttgacgattttgaactccagcaagagaaacaaaatcaacgcagcgataatggtactggggaaagggaagggcagaaggccggagatgatttggcccaaaagtgccgtcccgaacatgacgaataattggaataacacgttttcactcctcacttagtttattaaataacatagcgcctctaatatataaaacaaaggagtttattacaagagataaattaaaatttgcggaaatataacgtatttactgcacaattatacaaagtactgaattttgcgggcggaaaacggcgatttggcgagaaaacgacatggcggtgaaagaaacgacatgaaagaaagaaaagggttttttcaaaaaatatagggtatacatgagagcaatatgaagatcctattcagtaagggaggcaattatgaaacgtgaatccaatcgagaaggcggcttccactacgcctgggttattttaattgtggccatgatggtcctcggggtctatgtgccggtggtcaattccctgtccaacacctggcagatcgccgtcaccgaagacttgggcttttccagaacggcattttcttttaccggcaccatcacccaggccgtggggatttttctcgggcccgtcgtctccgtgtttctcacgaaatataatttcaagcgcatatggacggcggcggccatcgcctttgccgcggcagtcttcggttattcccttgcgcaaaatcaataccagttttacgccctgggcctcgtcgtcggtgcagcctacataaccacggcgcaaattcccatgatgatgctcattaacaactggttctcggaaaagaaaggcctggccacctccatcgccgtctccggcatttccgccggcggcgccctgttgagccccctggtcaacagcctcatcgccaatgtgggctggcgcatgtcctatcgggtctacgccctgattattctggcattggctgtggtcttcggcatcttcttgatctacctcaggccggaagacaagggcatgaagccctacggctacaaagaatccgacgacctgcccgcagatcccacaaaggacaccaacaaatccttaaacgtcggcctttccattgccgcatccctctcctgcagtttctttatcttcctgctcttgggttcggtgatgaacggcctggccaacggtgcgtccctgcaatttccgccggccctgcaagaagcggcgggctttaaaacggcgggcaccgtcgtatccatttacctgctcctcggcgtcttcggcaagctgctcttgggccgcatcgccgataaatacggcatctaccacgccctcttcttcggcgcagccaccttggcattaagcttcgtggccatgctctttgtgccctttgcgtgggggccctggctcgtggccgtggtcttcggcttcggcctggctttaggatccgtccttccgcctctcgttaccgcctccatttacgggcgggatatgtacggcgaggcctacggcttcgtgcaatccgccacccaagtgggggcggccttcggtcccttgctcgtatcctatatcttcgacgcctcaggcagctactacatggcctggatcattaacatcggcttcgccctgctcatcgccttcctgtggctcctcgcccataaaaaggccgagcccttcgcagggaagacagaaaaataaaggagataaccatgaaacgacaccttcagattttaaaagagctgattcaaatcgaatcggtcaacgacggcgaagaagccgtggcaaattacatcgccgatttgtttaaagactacgacgccgtaaacaccgagctcatcccttcctatcccggcagggccaacattctcgtgaagctaaaaggcgcccgccccggaaaaatctttgccgtctccggccacctggacgtggtggaggccggcgaaggctggacgcacccgccctttgagggggtcatcgaagacaacaaaatgtacggccgcggcacctgcgacatgaaagccggcgtggcggcggctttggccatgatgctggatctcgccgatgaaggcgcagatttcgccggagaaatttggtttatcggcaccgtcggcgaagaagtgggcatgcaaggcgccctggatttggtggaaggcggccacctggataaggtcgacggcatcatcatccccgagcccaccaagcgcgacggcgaaaaccaagccatcttcgcctccaaaggctccattatgtacaccatccacggcgaaggcaaagccgcccactcctccatgccggagcttgggattaacgcaattatgaccgcagcggaatttattcaaagcacccaaagagaattcgacgaggttacaaacaatcccgactaccacaacaaggagctgggcgtcacactcaatgtcttttccgtcatcgaagggggccggcaatttaattccgtccccgatcacgtggttataaaaggcaacgcccgcaccgtgccggaatacgactccgcccgcgccgtcgagctccttcaacgtgccgtggacaaaaacaacgaagatcccgaaaaggccaccctcaccttggagttgaaccaagtgctggatgccgctgaggcgaaaaaagacacggccctgatccgcgcattaaaagaagcgggcaaagacaaaaacattcaggttcgcccccttatcggcacctgcgaactttcccgctacatccatttgcctcaggacgtggatctcgtggtctacggcccgggccttacgaaaatggcccacaaagtcgacgaatacatcgagctggacgaatacgaagacaccatccgcctctttaaagacacggcgaatctatttttgagcggcgaataaaacagcgaataataaagcgaaggcacgggcagatagcccctgccttttttgctgcaaaaatatcccgcaaaaggcgaaaagagagtggcgttttttccgcggggcgagtaccatagaagggaagaaaagaaagggaggatgctatggaatttgccgagggataccgcctcttgtggctgttttttgtctattccttcgccggctgggtgacggaagtctttttaaaattcttagaatacaaacgcttcattaaccgaggctttctcatcgggccctactgccccatttacggcaccggcgccgtcatcatcaccatgggtgcaggcctccttctgcccgtggatcgctcctgggccatgagctttctcatcgccttcgtcctctgcggcctcttggaatacatgacaagctacctgctggaaaaatacttccacgcccgctggtgggactacacccgtcggcccatgaatctaaacggccgcgtgtggatcggaaacctcatcctcttcggcatcggcggcgtgttaatcctaaaagtctttaacccccgcctcttcgccctggccgcccacatggagccgaggcttttcaccgccctcttaaccgccctaagcatccttttcgtcgccgacggcatcacgagctacttcatcatgaacctcctgaagcaaggcgtggaaaaaagccgggccgacaagagcgaagaaatcgccgccgaagtccgctaccttctggaaaaccgctccgtcttccacaagcggatcctcgatgcctaccccgagctcaccttccgtaccgagaaggtgaaggcccgcctggagcgcattcgaaacgaaggcgaagccattcgccaactcgccgaagaaaaagtcgaggccatggaagcctacgcccgggaagccgcttcgaaaaacctcacccccactcgaatcctgcagcgtgaaatcatcgaaaaacaagacgccctcatcgccgcgttaaaagacggcggtgacgagaaggaccttgaggcgctggaagaagccattcgtgaaaacaaagaaacactggaaaatagagaacgccgcttgcggctcatgcgggcggaataagaaaaggcacagaccgtgatgtctgcgcctttttcattgcatagattttcgaaaaacagcctacttcatcgcctccgccaaagccccgtcgtaaatggccttggttttttcgtcgaagagcacccacatcacatccatggcgtggtcttccacaaattcaagggcccgcgccacggcaattttcgccgccttctccgtggggtagccgaagatccccgtggaaatcgagggaaaggcgatggatttcagcccgtgcttttcggcgagggccagggatttgtcgtagcaagaggcgagaagggccgcctcattcctctcgccgccgtgccacaccggccccaccgtgtgaataatataatccgcataaagatcaaagcccggcgtgatcaccgcatccccggtggcgcaatagccgatttcgccgcaggcctcatccagctcgtcccctgccgcccggaaaatggcgccgcagacgccaccgccccgaagcaggtgctcgttggccgcattgacaatcacatcggccttggccttcgtgagatcccctaaaaccatggtaatcgtacctaacatataaaaccccttttcttatcatcatcgaatccattcttcccatagcctatcgaagcagcgcgaaaaatgcaagaaggcaaaaaggccgctcaagcgaccttatttcttcaccttttcattggcgcggtaatattccatgcagcggtattggtgcaccatttcagacagcgacgggttgtcgtcaatcaattgatacttcccgtccttacgaatatagggtgtatgaagcaccgtggtttcgggcagatactcgtcctgcaccgccatcatcccgtcgtggggccagcccatggtgtcgaaaagatagcgcatcaagaggcatggactcagatccggaccctcgccgacgaaatccttgcccagcttctttttggcggcgtcgttggcccaaatcacataaggcgtggtgtaataattcatctgcccctctaaagtagataggtcgatgtcgattcccatgctcttgtagccgctgtccccttcgccgagggcgggcttgtggtcgccgaaaaagatcagcaccaccggcgcgggattttttctgaggctttccaccaaatcccccagggcatcgtccgtggcggcgatgttggagaggtaattgttaaacatggcccagtcctttacgtcctggccttccattcggtccacataatttctgtccgccatattgtaatcggcataaggcccgtggccctggtaagtgagggcgtaggaaaaataatactgccccttggccgccgcatcattcatgcgcttttccacttcagggaaaaagtgattgtcccgcgtgtagagccaatccgtgtcccctacccgctcttccacctcgttgaagtaattgtcgtaagagagaaacgcgtcgaagcccaagcggggattgacattcttccgattataaaaccagccgtaaatcgggtggagcgcctcggtgacgtagccattttccttcagataccgcacgtgggaataggtgtcgctcatcatggccgtggattccgcatagcccgtgccggaaaagcccgttaaaaagccccgctccgtgtttaccgtgccgccgccgaaaatatcggcgatcatgcggccgtgcaccgattccttttgaatggcgtggaaggaattatacacgtcccggtgaatgggaatgttgtcgaaaaccgaaaaatccgagaaagattccagcatgatcgaaatcacgtgcaccttcttctcctcgggcaccttcggctcctttaccttctcccacaacatggccgaaagcttcttgtcgtagttttcgggcttgttgccgctaaactttttagcactcagaataaaaggatacaccagcccccgggccatgtaattttccgtggcgtttaaagtattgatcggcgcattttcgccgacgcaaatagaaattttcggcgaaaaatacgggccgctcaccccctgaaaaataaaaagagcagccagagccgagccaattaaaagccgccgccgcgctttgcccacccaaggctcgcgatgctgcaaaaacaaaaagacagtcacagaaaccatggcaatgaggccgattaaagtcaagggattggaggcgaagatcgatatattgtaatggcccttcatcatcagcgattcgcggaaaagcaaaatctccggcatgacaaaaggctcctcccgatacatgagcttaaattgctgcaccacggaaagcacaaaaaacaaagccgacgtcacggaaaagcccagccacatcctgccgcttaaagcatagagaaagaccaaagtgcaaaagaccgggagaaaattcataaacaaaagcagcgggttatgtaaataactgctgaacagcgcctcgtgcatcgggccggtgccgcaggcgtaatgcaaagtaaacaacgtaatcaagccacttgcaacgaccataaaaagaagaggccgccaccaaaaagtttcacgcttcatgcagacatcctttcaaaaaactttacacacagtttaccacaaataggcgccgcccttacaaaaataggtagaaaagaaaaatgcaggcaacaaaaacttcctttatattaacaaaaaagaagagaccctttttggcaaaaagccgtgggaaaatagtaaagcccaaaggcaattgcaccgccgccatcggcatatttttgcgaaaacagagaaatataaaataaaaacgattgaaagccttcaaaagacttgctaagtaaatgaaacaaggatactattaaaaataaggcactgtatgcaattatattttcctgcccggcaaaaagcggccggccgacagatgaaatagatagacatagaaacgaggagggcatatgaaaaacattttgaaacaactctgtctctggacattgatcctgaccatggtactgtccgggcccatgagcgcctatgccgaggcgttgaacgtaaatcacaacgacatcgccggcgacaaggccaaattcgtcaacagtctgaccccggtgcaaattgcacggccgggagaaggcaagacggcggcggacctcgtaaaagcgcccgatctgccggccatttacaccctgcgcaccgactttaaggcggaaaagggcgaaaagtacagcgtcaactaccagccctatgtggccagcgttggggcagcagcgacgccggaagaaaaagccaaggtcaacaagaaaatcgacctgcccaacatggcgggctacaaaatgcccgtgggagaaacatcctttactaattcctatgacgccattgtcgatgcggcaaaagatggccacgaaaccacggacaacgggaagaaatacctggccctcaaggaatacaagtacacggccattcaaaacaacattcaagtcaaacacacgttccaaaacatggaagactttaacaagtttaccaacaaagacggcaccatcactaaaaatgacggcaccgtcatcgaaaaagacggaacagaaacaaagtatgatctcaaagatccggctcaaaaggaacaataccaagaattcgtccgcgaccacgaaaccatcaaaatcctgagcggcaacaccgggtctaccctggaagtccaacccctgcaagaaaatgaacggccgggctttgaaccccaggtagaaaaattaaagacccaagtgccggaagacacctcggaatttaaaatcgagtaccgctacaaccgggcggcctacgacgtggtcttcgacacccaagacggcacccccctgcccactcgcacctactactacgaccaagaaattcccaaaatcgatgaaaacagcattcccaccaagatcggctgcgaattcctgggctggaaaccctcccgcgacctggagggggcagacggaacaaaatataaaaaaggcgacatcattaaagatgccaatggccatgccgtcgtcgacctgggtaacatctactacaaaagagataatggcaacaaacttgtcgtagaaaacggcgatcctgtaaaagaaaagaatgccacagacattcaactcaaggtgcccgccatgaagctgggagacggcaaatccatccccagagaaaagctcaccttcaccgccgtgtggaaagacaaggaaaaggccgactacgccatccaattctgggcggaaaaggcagaccacccggaaaatgcctccctcttaaataagtacgactacatgggcacccgcgtctatgaacagcagcctacgggcaaaagacctgccttaaaagacgagaatccgggtccggtaacgattgaagtcaatggaggtacaaaaactttaccgggattaaatttccccgacctggacaaaacgcgcttacaaaaaatctggaacggcgataaattcaatcgtggcagagacctttatctaaataaattctttgtctacaatgaaaaattaaccgacgagcaaaacaaagaccctaacaaaccaaccgtgacaaaggccgtatccgccaccggcaaaaccgtctacaacatctactacgaccggcaggtctacgatctttactttaccaagtccaatgtacaacctgagaaaaataccatctaccccgaaatttggggatacgatccggcaaagggagaatcggtgatgttaggcggccccggcaatccctaccactacaaggccagattcaacgagatgatgtataagtggcccaatgatgccaagcaaaccaagggcttcactctcggctatcaaagtttcggttggggccccaactatactacgcccaactggccccttcacttagatacgcccccctatcgacttaatgccgatgagttcctcgacatggaaaactacattaaatggggcggctatgtgaagcacatagacaagggcgacggcacaaccatcgatttagatacactcgattttacaaccctttccttcggcatcaaacaggatcatccttccatccctcaccacatggacttttggatggacggctttaagaaaggcgaaaccatcatccgttacgacttggtgcggaccaaggcggacaccgccggtctgggctatggtcaccggtaccccatagttacaggctttacccctcgtgactatgatcctaaaaaacaatggccgacaattgaagagggttcgcaggaggatggccgtgtggatgaagatagaattggggaactaaacgacgaacgggacgaaatcacccccaacaccagtgggacgtactacaacaaccagggcgtcaaattgcccatcggccagctgaactttatccgcgttttctttagcgatgccgatgaatttggcgacaaaattgaaggcggtcaagaatttacagaaaacggctaccttcaattccattacaaacgcaacaagtatcccctaagatttaatacagaccccaccaagatcaaggacgacagtgagtttagctaccctgtgaaaggtggaactggatttacaaacgagaaggccaacgccctggaaaccttctaccaattccctctaaaagttttaagtcccgatttagttgatgataaattagctagagaagatagagagtatttcaaagaaaacccgaaaaacctcctggacaatccggacaatctatacaaactgggcctgtacgatctcttgcaaagagataaaacggatccgaagaaatttgcccaagacaaaggcaagcattatagaatcaaacgaccggaaggcctttccgaccaaatgatctttaaaggctgggccatggaccctgccggacaaaaaatggtctggaaaaacaaggacgaaaccatgcccttccacccgatgaacctctatgccatttgggacgaaccggactacaaatggaaggtcaccgtcgatcccaatggcggcacacttagcgccatagatccgggtagcctcaccaccgagatgaagaaaatcaaagaaggggacatcggtcgtgaagaagaaaacacctatcccgtagcaggttatgagggagaaacggccaaggcgggcacccaagtctttaccgtagtccaaaaacaaaagctgaaaaaccttccgaaaccggaacgctacggctacgacttcctgggttgggaagttgtccgctacaaaacagataacctcggtaactacaccaatgagcaagacaattcctaccgcgacaaatacaaggtgcccgagctctactccttcggcaccgatgtggtatcccccatttacctcaaggccatttgggtcgaaaacaagcgagccagagtgaaagtcttgcactactacctgaagaacgaaaaaaccgagaacggcgaaaagctcgtcctggatacatcgaagtaccccaacccggaacccaacgacctcgccttcaaacgcgtcggcgactacgtgcccgccacaggggaaaaacaagacgagcactggatcctggccgaccatggcgagttaatggaaaaactcgatggcacctataaggatggcgggaaagaccatgccttaaagccggaatacgaagcctacaacgatcgtgttaagctaaacaacaccttcttccaatcctttagggtgcaagacaatataaatgtaggcaccgaagataatccgatctacgagcccaatccagaaaacatcttcagattctactaccgccccttccgtactcggaactacaaggtcaattacattgacgaacggggcaagaaggcagttgaagacttcttcaaaggcttggatcttacaaataccgcaggcctaacagacgatgcgctcttagaggcaaatactgcaaacaaggcgaagtttaaagccaagagagcagaactggaaaaaatcctcggcgactacaaagtcatcaacaaggaaaaagtgaccagtcaatgtcgtcactacgatgcccgaaactaccggcccattcccggctggaccttagtcagcgatccccaacaacaacttttctacgatgtcaacgaaaacaccaacgaatttttgggcatcaacggcaccggctccaacgaaatttacttctattataaagacgcccgcgtcatcgaagtaaagaaccccaaggatcccgtacccgacggctacgtccgcgtcacctttaaaatcgacgacaagcacaaaggcggcgtctttaaggacaaagatggcaaagaagtgaccgaactccactacgacgtcatcaagggacttaagtccaacaacctgccccaccccgtcatttgggaaggcggcatggatgcccaaggcaacgaaaagaaaaaagaagcaaaccgctattacattacccccgaccaaggcaagacctttaaaggctgggataatgaaaagtggctcaatgccgaaaccgaaatcaacaaaaactacaccttcaccgcctacttcgactggtccggcatgtccacaaaatccaccggtttggtacgcaccgaagcctatacggatccgaacggcaaatggaccaatgactttgctccgaagctggacgacttgaaagcgcaacttgtctggaaagaagggaatgaggttaaagacattcccgaaggcacggatatcaaattcgtctataaggataaagctggaaaagaaacagaaatcaagactgacgaagacctctttaacctggtcaaagaaatgaacgtagaggataaagatcaaaccgtccgcgtcctcgacatcgtcgccaaggtcacctttaagggcggagatgcaaagaagccccaagagcttcccatccccatcaccgtttacaaaaaccgctacgaagccttgaacgaaaaaggcgacaagcccaaatacctctccgatgcggaaggaaaagaagcaaaagacggcgggctgaaagactatttaagcgacactgtatcgaaagcttatgtcaaggtcaccgtgtcgccgacgaaagacttgaagtccaaagacaaaaaggtctactacgtcaaccccaaggcttgggtggaaattcctgaaattgacacgaaagacaattccagatttaccaactggacagcggataaagatgctcaaaatgaagaaggcaaaaaagagggcgtcttcgactttaagaagcgtcataagtttaccgaagacaccgtcatcacaccgggctttgccggcgatgtggtagaacaagaaaaaggcaaagacaaacccaatgtgccggaaagctacgtgaaagtcattgtgaagtctacggacaaggcgacgacagaattcgaaaaaaccttctgggttaaccccacgacggaagtggccattgaggttacgaaacccgaaggcaagtcggatcaagaagtagatttaccgaagatcggcaagaagaaagtcaactacgtcttcaaccaatggcaaaaggtacaagctggcgaaaaggaagacagcttaacaaaagtagatccggcagtaaaaatcgacctggccaagaataaatacaccgacaaagtcaccgtcatcgaagcatcctacttcgaacgatttgccgccacaccgattctcaagcccattaaggttgaaaaactcgatacccctgaaggtaaagaaatcaccgacaaagacttaatcggtaagattaccccgcgtgaaggcaaggaaattgaatcgattacggttgtcgaaaaacccaatccgaacaatccgggcaaacaagaagccaaggtcaccatcaaatacaaagatggctccaccgaaggcagcactgacaagcccatcgtcattcccgtggaagttcacaaaaacatcattccggaaacgccggatggtaagaaacctagtgatgccatggccaactacgtcaaagtcgtctttacggcaggcacaggcggaaagctggacaaaaccctcaccggcaacttcacctactatgtaagccccgaagttgaagtggatatgaatgcaacggcaaatgctatcggcaagacaccggataccggctacattgctgacggcggcaagtgggtaaataaagacaataaagcattgaaaggtactttcgcagacccagaaacggtatttaaatacgacttctttaaatccgaagatatcgtagagaaaaccgacaaaaatcccaacaagccggatggttatgtcaccgtcatatttagggcggatacaaacggtaagctcgaaggtggcattacagaaaaaacctacttcgttaaccctgacgccgacattaagttaaaagtattaggcgaaaatgaaacagcaggtcaaaaagaacttgcagtaccaaaaacgagccccgatgctaattacagtttcaaaggctgggtagaacccatcgattccaaccccatcaaaggcgatcaagaacacgtagccaagttcaccaagaacgacgtcaccttaacctacgacgccggcggaggaacgggcactgtacccaccaagcaatccgcaccctatggaggaacggttgtccttgcaaatgccgacggtttgacgaaagacaactccgtctttaccggctggaagattggcgacaaaacttatcaagcgggccaagaagtaaccctaaacggtgacacaaaagccatcgcccaatggaaacccgtaactcataccgtgcggttcgacaccaagggtggaagtaacgtagacattcaagaagttgtacacggcgaaaaaataaaagcattcgatccgccgacttacgaaggtaaagtctttatgggctggaaagaaatcaagaaggaaggagaacaagatcccttcttcaaactcgaccaagccattaccgaagataaagtcctcgtcgccatttggcaagatccggttcaaaagattaaagagagcgatccggttgaagaccaatttgtcaaagtcatcttcaaacaaggtgcacacggacaactagcaggcggtgaagtgacctacaaggttgccaagggttatgacctggtacaagcacaagccaagggcctcgtcgttcccgaaattcaaccgaacaaatactacaaggcactagacgctaatgccggatgggataaagcactcgacttaaccctagctcaaggcgaaacagaaaaagtctttacggcgaaatacgcaccggtcgccgacctcatccccatcgacccgaagcaaacggatccgaaaatcattgataaagaaaagccggaaggtatggttcttgttcaatttgtcgtcgacgataaaaaagcctttatgctggcacccagcaaattctatgtggcgccgaataaagaagtcaccattacgccgccgacggtttacaatcgaccgggtgcaaataaatttgaaggctggcaaaagataacactcgatgaaaagggactcttgaaagaaacctatactgcagacacttcgatttatgccattggcttagcccttacggaaatggaaatagtgtctccggaggcaggctttgattttgtcgatgttaagagagaaagcctggcagaaggcgtagtgggtcatctggaaattattcgcgacggcaaaaaatacagtgccgaacctgctcaggaatataccaacacaaaaaaaatcggcaaattcaaagtaaaacaagtgaagttcggatttaagattcctgcagaagtaggtaagttacaatccggagacttgattcgtcactgggcagaaaacgacaagttgaaatcaaacatcaaagagatcaccattaagtaaggagaggatactttgaaaagaagatatacagcatttatgctggccctgctcatgctggcgcaagtttttgcgccggaagtggcacgggcgaaaacgagtgaaccaacaaagaaaacgacggttcagctcgtgaaaatgggtgcattagatcccaaaacgtatcctaaactggataaaaaggcgatcttagcaattcaaaaacaagcaagaacaaatcaaagcagatttagaacggggcgtagcggcttcttttcagtaggaagcccctacctgcccggacaaaatccgacggacaatgaaaaggcggcggcttacggtaatttacgggtagaatttgttaccgaaggtttgaaagacaagggagaaccaaaacccttccaatggaatgaaatattcggcacagattccaatggcaatccgggaacggccaatatttacttcgttcaaagagatgccaagaccaacaaggaaattaacacctttaaattaaccgtcgataaggcagggaaatacagtttaaaggacctctacggaaagcccgccaagttgcccttgtactccaaagccttagagccctataagtacgaggtggaactggaaacaggcgtttcggaaaaaataaccctattaaccatgaatttatcaaatacgggtagtgaaacctcctcctacacaacggatagcgagggaaatcttgttgccgacattcccctgtatttgaaaataggccaaacagcttcgacaaagtttgtgtccaaatggaacaccaatgtccaagaagcgaaacggccgaaagtcgtgggtggctttaacaacaaaactgcagacgactacaactattttccatttccaataaatgacactgacgtattaaaaatacgtagggaacagtttgacctagataaggacgaatggccgggttatatgcctcaaacaccgatccagttaagagaggtgcccaaagttaccgtcgatgaggataagcttgaagatccggagacctataccatcgacaaaaatgccaagcgcattacggccaatgacaaggtctacaagtatgacctagagtacgacgtcatcaatggtggtaagctcaccatgacggagatcttgcccgtgacctttgatgctaatggtgggaagtttgcttccattactgatccgaatgcagagcaaaagattaagaaggaagtggactacgacggcacgctgacggacaaggcggaaaagcccacgaaggatcgtgaaacttttaaaggctggtcgacaaccgaagacgggaaaacccctgctaccgacgcagactttaaaaacattacgaaagccaaaaccttctacgccatttgggacaacaacgccattgcggcggaagaattgacggttcatgagtcttttaaagctgatggagcgacagaatatactaacgactttattccgacacttgaaaccttaaagggacaagtgacgattaaagacggaaatggagatccacaagcattagcaaatgatgatatctttgcaatagttgacggctcaaatgaatataaagctgacggcgatgacttaaagaattatctttatgacaaattaaaagaagaggacactacagaagtctcccgtaaggtcaccgtcaaggccaaagtcacccacgcaaacggcacgagccaaaccgtggacattccaattaaggtcgtcaaaaacatttacgaagccaagaccttaacggataggccctactatgtaccgactgattatgtaaaagtcattgtcgatcccaccaccaaggcgaaggatcctcaaaagacctattactatgtcaatcccgaagcgaaagtggttatccccggggaagaccccacgggaacggacggtaaccaatttaccaaatggttaatcaagggaacgaagacggaatacaaactttccgagcatccgagatatcaatttagtggcgaaaccaccatcgaagctcaatacgtttccgatgtcatttccccgaatgaagatggaagcaaaccggatacagttccgaagaattatgtggaagtgaaattcgttcccacggacaaggcgacggatgcaaccaaagcggaaaaaatcttctgggtcaatccggaaaagaaagtcaccattcccgtggccaatcccgtagggaaaacctactacacctttaaggaatggaaggtaggggtaaatgcggaaggtgcagtttataaacctaacgaagcacaaaagtttgaacaagccactaccatcaccgccacctatgatgaatcgaagaacatcatcccttatgatccgagcgcagcagatcctatggtccgcccggagggttatgtaagagtgacctttgcggcggatccgggcttaaagctcaaggaacaaaaagcctattacgtcaagaaaaacgcaaacattaaacttggcgacccgactcttgtaaaaccgaaatacgaaccagaaaccggctacaagtttaaagagtgggataaagacgacacaactccaattggagcaaatgacatcgtcgtcacagcaaaggcgactccttttgatgaatttatccctcaaaagaataccgacggaacagataagccgaaaggctatgtaacagttactttcgtagctgataaaaatggcgagataagggacaatggtacaaaggtagataaaaaagtttactatgtaaacccgaacaagtttgtaaaattaccggcacctacgccggtaggcaacacaggctatgatttcagcacatggaagagcgacaagtctcaaagtgattttagtctagcaaactttgtaaattataaagaaaatacagttataactgcaatgttcaaccaaaaggatgcagtgtatccaaaactggatggctcaacaaagccggccggctatgtagaagttacttttgcaatttccggcataggcggtaagattgctgacagtgaagttaaaacttactatgtggatccgacaagacaagtatcccttaaagcacctaagacgatggccggcacaggatttatctttgataaatggagactgggaacgaaccctactgacccaataattaatcctgctgaccaaaagcaatatacggttaacacgaccatctatggcagctttactaaactgaaagacatcataccggcaacaaatcaagacggaacgccgaacctacaaccgatagactatgtcgctgtcttattcatcggaggagaccacgcgaacagtgtggatggacaaatcttgtattatgtcaatccaaaggctaatcctgcgaaaactattagagacttgacaaagcctacggtaaaacctgacacaggttggaagcatacaggctgggatgtacaagattccacagttataaacgattatacatttgtagttgcacaatatgaagcaattgacgatgtaataccagctcttaaagatgacggcactccaaatgaaaaaccggcaggctatgtaacagtaacatttaagtccggagacaatggtaagatccaagaaaatagcaaagatattacagaaaaagtttactatgtaaaccctgctaagtatgtaaagcttactccaccaacaccagttccaaatacttcctatgagttttcaacttggtgcagtaatggtgaggattttatattggcaaacaatataaactacactaaagacacaaccataactgcaaagtttaatccggaaggtgatgttatacctgagacaaagccagatggaacagcaaacaataaaccagcaaactttgttacagttaactttgtaatagatccagctacaggtggaaagattgaagctggccaaactaccacttattttgtaagaccgaatacagatgtaacaatacagccaccaaagacaaaagcaaatgtaggctatgaatttgaaaagtggagtatagacactacagaagtaagatcatattctgatcctgtaacaactgttaaaggcgaattcacaaagctagatgagataattccgtctaaaaatcctgacggtacagtgaatgccaaaccgcaaggctatgtaacagttcaattcctaaagggaaaaaacggcgtgctagatggacaaacgacattctatgtcaatccaaatgctggcaagaagctaaaagaccttgatactagtggaattactgtagtaccaagtccaacttacaagtttgaagcttgggataagccaatgagtacacctataaaaggaccggacaatataaatgtaacagcaacctatactcaacttccaaatatcatcaaagcaggacccaaggacacagccccggatggctatgtagtaattatctttgaaaccgatggaaggggcacgataacaggcaatgcagcatacgaagataaaactaatccaaaaactaatgaaaatgagatagtttactttgtaaatccggacaagggtgttaaacttgccgctgcaaatgcaacagcaagtgatacagttttacctgtaccaagtaccgctccttatgacgctactaaatatggatttgaccaatggcgtgcagacattgacactgaaacacctatcacaagaggtagggtgcatatagcaatgtttaagcctaagcaagtaaaattaacttacgatgcaggtggagctacagaaggaacggcacctgctgaagtaaaagttgattacaacacaagcgttagacttgcaaaccaaggcgatcttaaaaagacagatgcaagctttgcgggctggacaattgatggcaaagactataaagtcggcgaagagattatcttaacaaaagatagcaaagctattgcaaaatggacaaatgataagacgatcattccttatgatccgattaagaaccctacaacaagaccggatgacacctatgtaagggttacctttgcggcggacccgggcttaaagttaactcaacaaaaagcctactacgtcaagaaaaacgcaggcatcacccttggaaatgctgagcttaagaaaccgggctatgaagcagaaaccggctacaagtttgttaagtgggacaaggaagacgctcttgtcatcgaagcatcggatattgtcgtaacagccaaggcggcatcgattcctgatttcgtagagaagaccaacgagcatccgaataagcctgatgacaaatacgtgacggtcactttcaaagcggataacagcggaaacggcaccgtgaaagaaaagacttacttcgttaatccgaataagtatgtaaccttaacgccgcctgatgatgcgaaaggtaacaccggctatgaattcggtgcttggagtcaagatgcgaagattcctacggtgtacgacaaagacaccaccatcaccgcttctttcaacggactgggagacgtcattcccaagacgaagaaagatgagtctgagaagccgcccggctatgtcactgtgacttttgaagccaacaaacaagggcagattcccgcagacgaaatcaccgtttactatgtcgatcccaatcgcgacgtaatcatcaatccaccgacagcgaaggggaacaccggttatgaatttgaaaaatgggacaaaaaaacgacaagaaagcaaaggtatgacaaggatacgacggtaacagccagctttacgaagctggatgacatcgtagatggcagtaagccaaaacccgccggctatgtcaccgtcaaattctataaaggcgaccacggagaattgtcgggtcaaacggtattctacgtcaatccggaggctaatccgctgaaaacgataggtgacattaaaccgacggtaacaccggaaaccggctgggaattcgttgggtggccagtaccagataagaccaagattgaccgcaattttgacatcacagctaaatatgttggtatcccggatgtcgtaccgaaggataatcctgagggcggggaaaacaaaattcccgacaaatatattactgtgaccttctcaacggaagaaaatggtaagataaaagacaccacgaacacgaagacaaaagtcgtctatgtcaatccgaacaaggccgtcgcgttggatacatttgctccggcagtggatcccaacaccggatttgattttgcatcttgggatacccaaatcgaaagagcaattcaatacaaggacaaagatgttatcaaagcgaaatacaatgcaaaggacgatgtgattccccaaggaaaaaccggcggcagcgacaagccggcaggttatcttaccgtcaccttcgacaagggcgagcacggaacgttaagcggcaagaccgtttactatgtcaagcccaacaaagaagtgaccgtccctgcgcctaccgtaacgccggcaacgggctttaagcaaaaagacggagcggaggcttgggataagcaattaacgcaaacatttaccaaagacaccaccatcagggctcaatacgattccatcaaggaggttgttcctcaaaagaataccgacggttccgacagacctagtggttacaaaacagttaggtttgtaggagaacatggtactttggctgtcgatacggttttctatgtgaaccctgaaaaggtcgtagatttcaccaatacagtaaatggctttacgaagacgccggacttcagttatacagatgtcggcggaacatggagttcagaagaatttaataaaaaattcactgacgataccaccttcacctttacctttaagaagcttggcaatgttattccgcaaaagaatccgaatgggacaacgaatgatcagccccagggttatgtaaaagtaacgcttatcccgacggcgaaggccacggatgacacgaaagaaaataaagttttcttcgtcaatccgaaggaaacggttgaaattaaaaataaaccgcaaggtaaagaaattactgcaaatggaagcaagtcttctttcaaatttatcggctggacagtaaccaggggttctattgcatcctggcccggcgaggctatttcaggtaaatttatcgaggaaacggaaattacggctaagtatgagtttacctggattaatatagtgaaagagcctattgcagaagaaaatattgttacggggaaaggtgacagacctaaacctgaagacttgattaaaaacaagtatgacaagaacaatccgacaaatacaaataacttacccgagggaacgactttcacttatgaggaagaacccaaggttgacaatgtcggaaatataacggcaaaagtgaaagttgagtatccgggtggggcaacgaccatcgttgaagtgcccattaaagttgtagagcatgtggttccccaaacgggcggcgaaagcggcagcaagcctctcgttcccgccagctacgtcaaggtcacggtggacaccacggacaaagctgcggacaataccaagttcgtgaaagtgttctgggtaaaacccaatgtggaagtcaagattcccggcatcctcgatcctacgggtaaattagaaacggatgcgaagggcgttacgctaaccaataatttcaaaaaatggaaattagaagacagtaatcccgaaatcacctacgaccacggaacggacatcaagggtatctttacggcaaaagaatcgaagattgtcgctatttacgggtacggtaagaatgtagatcctcagccgaacagcggtcaatggattcctaaaggaagcgttccttcgccgaaggatttcatcaaaaatccctacaatgacgacgacccgaacaattcgaacaatctgcctccgggaaccagatttgatttcgttccgggtagtgaaccgaacacgaatcaacccggaacgaataattccacgagcatcaagatcacctatcccaatggcgaaaccaagacggtggatgtcacttacaatgtcaccggcgatgtggtggaacaaaaggatcccaatacaaagcccgtcgttccggacgaattcgttaaagttatcgtcgataaaacccaaaatgcgaaactcgccgcaggcgaaagtcaaacgcaagtcttctgggtcaatccgacgaagacagtcacgattccggtggatgccccgacggcgaataaagaggacatggtcttcaccgaatgggacaatcagttgactcaacaatttacggctaaagaaacgacgattacagcgaaattctccaagaaacaaacgccactccccacagcgggttacgttataacggaacgaggggttcagcccaagccggacgactataaaaaagttattacgcctccggcaggcaagaccattaagcgtgtcgctgtagtgacagaacccaatgtggataagggaggcatgacgacggccagggtatcggtcacttatgaggacaacacgacggttcaaattcccgttcaggtctttgttcaaaataaggagcaaccctaccccacaccgcagccggatcccattccgcaaccctaccccacgccgcagcccaatttcgtgccttatcccgtccccggtgaaacgaagacggtctataaggatcgcacggtgcttcgccgcgaagtgcgctacatgcaaggtttcgaaggcaagttccgtcccgacgacggcttgacccgtgccgaagcggcgcaaattttggccaatgcactgaaggaagacggctatcccttcgatctccgctacaagcttccttataaggacacgacgaaggaaatgtggtataacgatgcggtaaggatcaccacccaagccgatgtgtttatcggttatgacgacggcgaatttaagccgcaacgaaagatcacccgcgccgagtggatcgccaccttgcgcaggttccaatacgtggataaagtgggcggcaattccctccacatgcgcaaaaaccactgggccattcccgaggtggaagcggcgtaccggagcggatggctttccatctacacggaaaagaaagccccctttaattacgatgaacccatttctcggaaggaagtggccgccgtatccaaccgcgcgttccgccgggtgcgcgacatggattacatccgtagaaatgacaagttcatgattaattacacggacattaacagagatatgtgggcttacgacgacattctctgtgcaagcaataccttccttcaccaacgtcaaggtgcctacatcgcctacaagcgcggcgacaaggcctacacaatcgacgtgaaggatgcgattatcgagcaggatctcttccaacggatcccgaggcatcgctagtgtaaagagaaaagacagcatcgcctgtcttttttcttttgcccgggaaggaaaaagtgaaaaaaccccctcgccccttatggtacaatcataggaggaggagggggttttttgcgcgacaaatatgccatagacgtagcgcctttagaggaagcccacgtccgcgattttttgacctggacggattacgaggacccgctctttagtatgtataattttatggaagacgaggacacggtgggggattggtaccgctggaagacgaagggccacagggatcagtatttcgccattttggaagcgggccgcgccgtgggctacatgggcctgaagcatatttccctcattacccgcaccgccgaagtgggcattattcttgaccgggcggtcatcgatcggggtctgggccgggcagccatgcgctggctcttggactacggcttttacaccttggggcttgagcggattcttctggaggtgcttccctggaacgggcgggccatgcatttgtacgcgtctttgggatttgaacggatgggcagggcttttcgccgggtggatttgccccaaggggcgttgtatgaagcggcctttgccccctatcgaaagcagatgcgcaccatggggcagttttgtgtcgtgtcggtgcatcaaatggaactcacgaaaggcaggtggcggcgtggaatttaaattggatccgccgaaattggatttaggggatacgcccattgaaaatatttttttaaacgattacatgccccaggccgacggggatttcgtgaaggtctatttggccgggctgcagctggcttcaaacggtggcgagggagaccacaaggcgttggccgatcgcctgaatctcttggagacggacgtgaagcgggcctgggattattgggaatcggaaggcattgtggagaagatctacgaaggggaaagctacggcattcgctttttacgtctgaaggagctttacacgaaagaggtctacagccccgaggacaagaagagtgatttcgtgcgccggctggaggacacggagatcgccaatcttttttccaaggtggaatattacatgcgcaagcaggtgccctatcagcaaaagctggacatcgccgcctggcgcgaggtgtacaacatgacgccggagatgattttggaggcttttcgctacggcaccgaggagaaaaacaagcgctctgtcccctacatcgaggggattgtgcggaattgggccgacgccaatgtgcgcacccccgaggctttggcggaaaatttccgcacccacgatggggcctactaccgctaccgccacttgcttcaattgatgggcttatccgataagccctacattcgcggtgagtccgacgccgtggcctcctatgccgaggaaatggacttcgccctgttggaagaggcggcgaaacgcaccgggggcatcggaaagcccaactggcggtattttgaaagcattctcgccgcgtggaaggcgaagggcattaaaaagcccgaggatctttccaaggatcaaaagcccaaggtgcttcgcggccatcgaacccagcccatggcgggctcggccacggccaaatacagcgccgacgccttggaaaaaatggcgcaaaggaagcgccggcaatttatagaggggaaaggacagaaatagatggcatccatcttcgataaaattcgggcggattacgacgccctcaggcgagcaaatgaacagaccctccgcgagcgccgggaggaagcctacgccatggcgccggggcttgaggcggtggaagaaaacatccgcgccctgggctttgaagcggccaaggccaccctcgtgagcggcgatgcgtctgtggccgatgcggccgtgaaggagctcaaaacctacgaagccatggcacgggccatgcttgtggaggcggggcttccggcgaattacctggatcccgtctaccgatgcggccaatgcaaggacacgggctatttggaaaacggcctgcgctgcagctgcatgaaccggcggatcaccgcctatctgcaccgctccagccacatcgagcggcagatcgaaaaaaacaacttcggcaactttcgcctggacatttactccgacctgccctttgccgacgagggcatttccccgcggcaaaacatggaagagattctcgccgtggcggaaaacttcatcgccaccttcgacgaggccaacgacatgaatctgctcctctacgggcccacgggcttgggcaagacctttctttcccacgctgtcgccgccgagcttatggcggcgggaaaatccgtggtctacgaaaccgccttcggtatggtgcgcatcttcgaagaaaaaacctttaatcgggatgcgacagacgaagtgaaaatggcctacgacagcttattttccgcggatcttttgattatcgacgatttgggcaccgagctcaccaattccttcaccaattcccaactctttaacatcgtcaacagccgcatgatcgacggcaaaaaaatgatcatcagcaccaatctgagcccgagagaactctccgccgtctacggcgaccgaatcttcagccgcatcttccataaatttgtacccatggcctttttcgggaaagatttacgttgggaagctgaataaagccacttgcgagtcgctttattcagcgagctacgcatagcgaacgtaaatgaattcaagttactttcttacttaaaaattgattcctacatggctctgagaccaggggaagggcctagggcgttgcgattcgccctctggcccttcccctggaccccatccccctccaccctaacgcttttctaatgtgcgaagccctggcgggcttcgattcctattgggctgtgtcgccaacgtgagaaagtgaattaggcaaagaattcttattagcgaaaaagaaacgtcgcccgacacacattcttcagtccgcggcacgcccaaatagcagaaaatgccgcaggcattttcatacagcttaaacgcggccaaaaaaggggtgggggccccgggggcggggaaaatgcggccttccgctctgagctcttttccctgcccccgggtctcgaaaccatggaaaaatgctgtttaaacgaaatagaaaacttgattccacaacgtaagctttgcaatttaaattaggtgcctcgctcgaactaacgccctttttccctcccccgggaccggtggatgaagacatagtgtgaaaaaataaaaggagatcatgcacatgtagtgcgctatcaaaagcaaaggataaaagatgggcgaatagaaaaaatcatgtgagaatgtcggcaaaataattccgggggctcaggggagaatctccctgccttcctcccttgagaaatcgttttatatccactataatgaagatagtcatagagaaagagaggagactattatgaaattatccaatcgtatcgagtccatgccctatagtgccattcgtaaactgaccccctacgccaacaaggcgaaagaagcgggcaaaaaagtttatcacctgaacatcggtgcaccggacgttgaaaccccgcaagaattcttcgatgccattaaaaacatcgacatgaaagtattaagctatgcaccctctccggggcttcccgaacttcgtgaaggcatggcaaaatactaccaacgcagagacacccccatgaccgccgatgacatcgtcgtcaccgcaggcggctccgaagcccttcttttcaccctgctcgccattaccgacgtaggcgatgaaatccttacctgcgaaccctactacaccaactacctttcttacttcatcgaaacttccaccacggtaaccaccttccccaccgtcgtagaaaacgacttccacctcccctcgagagaagtcatcgaatcgaagattaccgacaaaaccaaagccatcctcttggccaaccccggcaaccccaccggtgccgtctacacccaagaagaaatcgaaatgatcgccgacatcgccattgatcacaacctttggatcattgctgaagaactttaccgcgaattcattttcgacggcaaaaaattccacagcttcggtaccatcgaacgcatccaagaccgcttgatccttcaagactccatctccaaacgcttcagcggttgcggcgctcgtatcggtaacctggcctgcatgaacaaagatttcatcgccgccgccaacaaactggccaccgcgcgtttggcctgccccaccgtggacatgatcggtgccgcagccctctatgaaatcgacgattcctacctggatcaaatctccgaaatctatcaagaacgccgcgacgtcatcgtcgaagaattaaacaaaatcgacggcgtgaaatgcaacatggccggcggcgccttctacaccgtagccgacctgcccgttgacgatgccgaagacttctgccgctggttgcttgaagaattcgacgtcgacggtgaaaccttaatgatggctcccgccgcaggtttctatgaacacagcgaagactacatgagccaagttcgtttggcctacgtattaaacgtcgacgctttgagaaaagccatgcacatcctcgacgaaggcttaaaagcctacaaagcgagataagaaaaaccataagaaccacgggtgaaatcctccgtggttcttatttttttacatagattatcctgcgccgatgtgggaaggataaaaaaggccacagaaaaaatctgtggtctttttctgtgctggcctttacgacttcacttccacggtgctcacgtagtttgccttattgcctttttgccgcataatgggcacgtttctggttttgtggcgtttggtgatgcccagggcgccgtcgaaggtgttgaagcggcggaggtagcgggccatggcgtctcgatcgatttctttaaacgagggctgattacggaggccgagggaaacgctatttggcaggctatgttgaataagcgcagacagatcggcgcgcggtcctttacggaatatcttaaaaatactaagagagcgaagtgacaaacgcacaatagatgaaatcgcctcgtccatgtaaatcaagccaaaaaggaggggaagcgtggcgacaaaaagttttttaaagtcggtggcagttcgaaaacaaaagtaaaaaagagttattgcccgcgccatggcacaaaccgaagcctatgcaaagagcacgccttccaaagaagagcctgcacgaattctttatagaaatgagataaagcaggtttttgcgaaaaaagaataggagacggttgcgaaagtcataaggcttcctctcgaccgccgatagggcagacatcttcggaaatcaaatctccctcgaattcgagggggatttgatttctgtgggccgggtttcaaaaaacaacccacatcagctttgccctttgtcatgcaaagataaaaagtgtgcgaagaaaaataaaaacaacaaatcctctctcttttccattgactcccattatcattcatattatgataactttagatgacgcggaggagatcgtttatctacgcggaaaaccatttcctcggcgatcttcgtcgttctcgcggaggatttttctctcttcgcgggtgttatatggttttagaaaggagttattgtgaaaaagaggtatctatcggtccttctggctctgatcatggtttttgctcaggtgccgacgcttgtgcgggcggagggctttagcgatgtcaagggccactgggcggagcgcacgattgtgtgggccgcgaaggaagggtatttgaaggggtatcccgacggcacgtttcgtcccgatgcgccggtgagcaatgcggagtattaccgcatcgtcaatgaatttacgccgcagcttcacgatccggcgctttcgtcgaaggatgtaaaggtgaattattcggacgtgaaggaggacgattggttttatgccgaggtaaagaagggcgtacaggccggttacttaggatcgggtgaagggcaaagtctgaaatccggtgaaaagatcgagcgtcaggaagcggtgcggattttcgccgtcgttcaaaagtgggacgacgatgcggaagcggcccgtcagtttgcggattatgattccgtgaaggaagagctgcggggagccgtgggcgcgtcgaagacacataatttgattcaaggctatcccgacgggacgttccgccccgagggcagcatgacgcgggcggaagtggtgacggttctggccaatcacttgcatcccgatttgggtccggagcccgcaccgtcgccgtcgccttccggcaattggaattggaatttcatcaatgagccgtcgaatttcggcaagggctatcagattaattccgatgtcttgcagcgtgcggcgaagtttttcaatgggacggacgcccaggaaatccgtcgggccatgcggggcggctggggcggttcctgttacggctttacggcgacggcgggcctttataaggaaggccgcttgccggtgaataatctcaacgagcccgcgcgctcgacgatcggggatttggaagcgcaaagtaattacaaggcgcagtcggtgattaatctgcatcaaaacatgcaaagtacgcgtacgtttcataataaccgcaacaacaacggcattggctggctttgccctcggattaagaggaatacgcaggatctttcgacttacgccgcgaatttaaaggccatggtggatcaggcgaaggcgaagaacaccacggtgcagttggcttatttctgggaaatgggcggccggaatgtgggccatgccaatgcgatttacgattacgttcaagagggcaatgtgctgcgcctgaaggtgtatgacccgaattacatcggcttggatcaaaaggaagtcgtgatcgatttgggcacgaaccgcatggtcgccaagtctgcgacgacggcttccggcgggtccgggcggatcatggtggcatattcttatgccttccccacgaacacgattatgaagggggcaaatcctacgccgacgaatactcccacgcaatttattgtcaagggtaagcaaaaggttaccgtgaagagcggttccgaatcctgggtactggatcccaagaaggccgaagtggtgccggatgaagatacgtacatctatacggtaccggcgaggtcggtgtataaggtgtattcctttgccggagggaatattgccattcgcggcaaggactattatttagcctttgaaacggagcggcctaccgcgttggatgcgggcaagggcacgttccacatgaaggatcagacgggcaagtattgggtgagcatgggtgaagatgcgcccaataagctgtttaagtggaatgccgtggaagtggaaggcagcggcgagcgggatctgtatttgaataaggatcccttcggctattcgcttcgcggcgaaaacttaaagggcgcccgcgtcacggccctggacaagtttgtggccaaggaaaaaaccgtggaccggaaggccaaggtcgtgcaaattcgtcaggacaacgatcagttgaagtttaagtacgacgagttcggcaagtacgatcaaaagcccggcgaaggcttcgtgggaagctggatcggccacgattatttacgtagagtaagcattggagcgattcacaatgtagaagccactttccgtatttcgaaaaaccccgatgggacgtatttggtgcgcaaaaccggtcgtatcgtcgaaacgggagaatattatgtaggcgagtacaggaatgtacgcctgaatccctccaccggggaattggaatttcggcgaagcaattacgtgagcctggaaggcatctccactagaggggctgacaagggtccggagctggaaaacggacgcttggtgattcgttattccgaaaacaaggttgccgaatacacgcgctattaagtccctttgtatgacatgaaaaaagaccacagaaaaatctgtggtctttttatgtgccggcctttacgatttcacttccacggtgctcacgtagtttgccttattgcctttttgccgcataatgggcacgtttctggtcttgtggcgtttggtgatgcccagggcgccgtcgaaggtgttgaggcggcggaggtagcgggccatggcgtctcgatcggggccggcttggttcatggcgtcggcgataaggttgtaggcgtcgtagccgatggcggcgtagcttgtgggggcgcggtcgtattctttttcgtaggcttttaagaaggcgtcggaggcctggttaaaggtttcgtagcgggcgtagtgggcggtgaagtaggcgtcttccacggcgtctcggccgatttctttaaaggaggggttttcccagcggtcggcgcccataagggggacgcggatgcctgctttttttgcggcgcgaatgaagtaggcgcttgcggcagcgtctcccgggcagtagatgccgtcgacggggtattttttcaatcgggcgatttctcgtttgaagcgggtttcgccggtgtggtagtcgatggggtaggtgcggacgtagtcggggaggctttcgatgaaggcgtgtgccaggtcgttgccgtagcctgtttcggcgtccaccaccacggcgatgtctctgaggcccaaggtgtttgcggcaaaggcggccatggcgcgggcctgttcgttgtcgttcatggacaggggggtgatgcggtagtctttgttcagatcggcggcggtggagccggtgacggtggggattttcgccgctttgatgacggggcgggcgtggttcatgctgtcggtgccgaaggtgccgatgagggccagggcgccttcatcggaaaggacgctgacgccgttggcggcttccatggattggcttttggtgtcgtagagggcgaggtggatttttttgccgcctgccacggggcgcaatcggtgggcgagtttgacgccccgccaggtgtcttggcctgtttcgccgtagaggccttgttggggctcaaagacgccgatggtgacaccatcagttgttttttctcttgtgcagcccacgaggagcaaaaggacgagaagggtaaggagtcgtttcattctgcatctccgaaaaagttcgccagggcttccagatcccgctcttcgcagaggacgaggagttcgtcgcccccttccagggtggtgtccgcgttgggggtgaaggtaatgtcttcccgctgcacggaggcgatgacggggtggtgggggatgtggaggcttttcaggggaacgttaatgtagttggcgccgccggggacgaggaagtattgcatggtgtagtcgtcgtgaagcttgccgatgtctttttggaacatattgtcgtaaagggattcgtagatggggccgctctttaacagctgggcgatgatgtaggcgatcatggcggtggtggtgacggagatcatttgcagcatggtgccgctcatttccgagacgaggaggatggagaggaggggggcctgcaccacggaggagaggatggcggccatgcccaggtagaggaagttggcgtagtagatgtctgtgccgatgaggatgccgtggaggagggcgccgatgagggcgcccagggtgagtacggggaggaagatgccgccttgggcaccggagccgtatccggtccaaacgaggagcatgcggatggcgaagaaggcgataagggccttgccggcgacggtggtggtggccaaatgctcgatgaggtcgtggccgccgcctaagaggatggggttgtagaggccggccaaaagggcgaggaccatggcgagaaagatgacgaggtagcggggcatggggagttttttcgtgcgggtgcttgcaaagagcaggcctttgttgaacacggcgccgaagatgccgccgacgatgcccacgaccacaggcgcccagatcatgccggtggggagcatttctttcatgggaaaggagaaggcgggctccatgcccagaatgcggaagctgatccagttggccaccacggaggccacgacgcagggcacgacgaagaagtgggagaagcttttgtggagctcttccagggcgaagagggcgccggccaagggggcgttaaaggctgcggcgagacctgcggaggccccggcggtgatgaagtagcgcccttccatttccgatgcgcggaaaactttggcgaggagcttcgccaaggtgccccctaattgaatggaggggccttcccgcccgagggtgaggccggagaaggcggccatggcgccgccgaagaattttgaaataagggtaggcaccggggcgatgtcggctttacctaaaagctcgccgcgaatttgcgggatgccgctgccgccgcttaagggggaccaattaagtaaaaggtgcatggccacggccatggcgaaaaagagcccgagcatgagggcgatgcggcccagggtgatgttggcatagagcaacattctcgcgtcgtcgagcttgcctaaggtgaatcggtacaggacggaaatcatgcccgaggccagaccgacgacgaagccgccgaagaccaagtgcatgcgcaggcgattgtgatcgtaatttgtcgcgtggtgggtatccatgaaaactcctttcccaacggacgaaggatggcgtacataaaatgaaaaacgagacgaaaaaccgtctatacaatatattttgaaaaaaagctttacaatcgggggcaaaggatgtattataagtccatgataatttaccgtagtaaagcgataaacagagaaaggaaaccgatcatgaagaaaagactatttaccttgaccgcactgaccatgcttttgcttgtgggctgttccggcggtgcgaagccggagaataaagcggcaaacaatgcaaataacgccaaacaggaagccgcaggcgagctggacaagagcaagacctacgtcatgggcatggacgacaccttcgcgcccatgggcttccgcgacgaaaagggcaacatcgtcggattcgacgtagacctggcgcaaaaggccgccgaagaaatgggcatcaaaatcgaatgccaacccatcgactggacggtgaaggaatcggaacttgaatcgggcaatgtggacttcctctggaatggcttctccattacccccgagcgtcaaaagaaattgctcttctccgatccttacatggacaaccgccaaatcatcgttaccttaaaggattctcccgtgaactccaaggccgacttggccggcaagcgcatcaccgtgcaaggcgaatcttccgcactggaagccgtcatgaaagacgaagcttttgtcaaaaccttggccgaaccgccggtggaatacgccaccaacaacgaatgctttaaagacatcgaagcgaaacgctgcgatgccatcgtcgtcgacgaagtgttggcgcgctactacatgaagcaaaacggcgaagaaaactacaaggtcttagacgacaacttcggcgaagaacaatttgccgtgggcatgcgtaaagacgatgtggctttacaagaagcactgaacaaggcgctgaagacgctgaaagacaacggcacctacgacgaaatctacagcaagtatttcgccgactaatgggatagcaggaggcagttttggaagttctggaacgtttaatccccctattgggggaaggcatgaaagtgacggcgtcggtatttgccgtaaccatcgtattatcgtccatcctttgtatcccggtggcgtgggcgcgcttgtcccctaaccccattatatcgaagttggcggcgatttacatttatattatgcgggcgacgcctttgctccttcaattaatgttcgtgtttttcgggctgccccttttgcctgcgggcattaccttgggccggtttacctccatttttctggcctttgtcctcaattacaccgcctacttggcggaaatcctgcgcggcgggattcaatccatcgatcccgggcagtgggaagcgggcaaggtcttgggcctttccaaaccctacaccttctttaaagtcatcttgcccgtggtcatccagcggagtttccccgcctattccaacgaagtcattaccctggtcaaggacacctccttggtctatatcctgggcgtcatggatattttgaaagcggccaaatccgtttccaacaccatgtcatccatccttccctacatttacgtcggggtggtttatcttatcgtcgtcggtctgttgaccttgcttttgagatactcagagaggaagattgaagcgtcatgaaaattaccgtggacaatttaaaaaagagctttggcgaccgctgcatttggagcaacatcgacctcacctttacctccgatgagatcgtgtccattgcgggcaaaagcggccagggcaagaccaccttcctccgctgcctcaacggcctggaaacctacgacgccggcaccgtcgccttcgacggcaaagtgatgcctgtaggcaccaccgatgcgaagaaaatcggcatggtctttcaaggctactacctgtttccgaaaatgaccgtgtgggagaacatcctcctggctcccgtctaccacggcatcgaccgaaaagaagcggaagaaagggccgagcggctcatgaaagaactggaaatctacgaggaaaaagacaaatacccgagaaacctttccggcggccaacaacagcgggtggccattgtcagggcctgtatgcttgagcccgacatcctctgcttcgacgagcccacctccgccttggatgcggaaaccatcgacaagctggcccaaaccctggggcggctaaaagaaaaaggcatgggcatgatcgtcgtgacccacgatagggccttcgccgagcgaatctccgacaggatattgcacttcgaagaaggacaactgagagaagagattgtagcataagagaggaatgtcttttgtttttcctttgtacaccaccatgtttcgcaaaacccacgagagggcggatgagcccccatcgtgggttttttgcggtgttttttcttcgctcatcttttatcttcgcacacctttttttcttcgctttcatagcgctcactttttgtaattcgcgatcctattttctctttcacaatttatatcttcgtgattctttccgggggagggaaaaagggcgttagttcaagtggtagctccttttaaatgcgtagtgaacgtaatgaaatcaagttacttttttcgctttaaaattgattcttacatggctctgagaccaggggaagggcctagggcgttgcgattggaatggcaacacttttttggacacttttcttaaggtgtcaactttacatggcctttgtcttccgccgctttctttgcccggtaagcgaccggcggcatgttttcaaggcttgtgtgcacccgctcgttgttccaccaccgcacatagtcgctgagtttttctcttaattcgttcaggctttgaaaggtgtctctctctaaaaactcagttttgaaacttttaaatatgttttctgctacggcgttgtcgtaaggcatacccgggcgacttaaggatctcttgatgccgttcgcctctaaaatggctcgaatggtgttgttatcgaattctttgcctcgatcggtatgaaaatattcgacggcatcgagggggtaggggatggtgctaaatgcttcctgaataagggcagcgtctctccgaaggccacatgagtaaccgatgacttcgcgattaaaaagatcagtaatggcgcagacataggcccatcgctggttgattcgaacataggtcaggtcggatacgatgacttccagcggcctgcgatgactaaattctcggttgagaacgttgtgtattttctcttcgtttttctttgtcgggtagtgcctgtattttgctttggtgtagacagatactaagtgaagcttcttcatgatgccgcgaattcgtcgcctggaggcgacgatgttttctgcctctaacttgctttttatcctgcgcgcgccatagacgttgtggcttgcgcgaaagatggaacggactttgatctccagttcgatggcgtcatcagaaaggggccttggccggtaatagtaagcggagcggctgatgcctaaggctctgcaaagcgctgataccgggtatttgtgcttcaaacgatcgatgacgtatcgtttttctctgcaagtatcagcgcggcctgctttaaaatatcattctccatcttgagccgttgattttctttaattagggcgagtttttctttatccgaatcgctgaacgaatcggcttctttaaacgaaccggtggtgcgaaactggctaacccagcgatcaaaggcagaaggagttaatgcgtacttctcgatgatctcttgccgactcatgccctcctcgtataggtcaaccacatgctgcttaaattcattcgtaaagtgtcttctttttctaggtactttttgcatttgatcctccttggtgatcttaagatatcacaccttaaggaaactgtcctaattattgtaacctatccagggcgaatcgcaacgccctagccccttccccgggtttcaaaaccttgcgggaatggtattttaagcgaaatagaaaacaacacgaaatttcctacgctacgcatatcaatttttggggccacggggactttccctgtgagaaaatcccgaaaagatccgtcttttttaacagaaaaaagggcaagaaaaaagaggcttattcaaaagccccttttcttgccttattttctgttttttactgcattcacgatccacagcaaaatcacggagccgatgacggcgatgatcaggctgtagaggttgaagccggacactttgcccatgtggaagacgttgcttgcaatgaagccgccgatgaaggatccgacgatcccggtgacgatgtttgctacagcgcccatggattcgtctttgcccatgatcttgcttgcgatccagccggccaatgcgccgaaaattaaccaaaataacatgaaagatctcctttcgaatgagtcctaataatgatgttattttatacttacccgcgcttgtaaaaattattcagtgaggagaaaagtatttgcagttaaatttcttttccttcaaattggctgtggtagagtgcgtagtattcgcctttcttcgccatgaggctctcgtgatcgccttgttccacgatgtttccgtcttttaagacgaggattacatcggcgccgacgatggtggagaggcggtgggcgatgacgaagttggtgcggccgtgcatgaggcggtccatggctttttggatgagtttttccgtgcgggtgtccacggagctggtggcttcgtctaagatcagaatgtcgggatcggagatgagggcacgagcgatggttaaaagttggcgctggccttgggagatttccgatccggattcggtgatgatttcgtcgtagccattgggcagggtgcggatgaagttgtccgcataggtggccttggcggcggcgaggatttcgccttcggtggcgccttctttgccgtaggcgatattgtctttaatggagcctgtgaagagccaggtgtcttgaagcaccatgccgaagtggcggcgcagatcgtcgcgggtgaggcggtgaatgtccacgccgtcgacggaaatgctgccgtgatcgggctcgtagaagcgcattaaaaggttgataagggtggtttttcccgcgccggtgggcccgacgatggccacggtctcgccggggttcacgtggagggagaagtcgtcgatgaccacttggtttttctcgtagccgaagcgcaggtgatcgaaggtgacttcgccttttaattctttcaggacggtggtgtcgtcggtctgcgcctcttcttccccatcgaggacgcggaaaatgcggtcggcggcggagatggccgattgcagggcccccaccacttccgccatgccgctgatgggttgattgagttttctcgagtattggaagaaggcctgtatggcgcccagagtaatggcgccgtttaagaccaagaagccgccgaagacggcgatggccacgtagcccaagttggagatgaagcccataaggggcatgatttcgctgctgataaactgggccatgtaggcgttggcgtagagggcgtcgttaatttcattaaattcatggatggcgcggtcttcgaaggtgaagctcttcaccacttcctgggcggagatgatctcttccatgtagccgtctacccggcccatgtcgtggctcttggcgcgaaagtagcgctggctgaggccggcgattttcgccgtgacaaaggcgcttaccggaagtacgatcaaggaaatgatcgtgagccggggctcgatgtaaaccatcatggccaaggtgcctaatatggtgaccacggcgctgatgatttgggcgatgttttgccgcatattgttcaccacggattccatgtcgttggtcatgcgggaaaggaggtcgccgacggtgaagcggtccaaataggccacggggaggcgctgaattttttcggaaaattctttacgcagggtaaagacggttttctgggtgatcttcacgaggatgcggccccggaagaagtagaaaatcgaggaggttacatacatggcgaggaggatggccgcgatgcggtttaaataaccgtagtcgatgcccgcccccgccttcacggaatcgtagatgttcgtgatccccaggcccaaaatccagggcgtgaagatgtcgatgatggtggccgtggccgtaaagagaatggccaggaccatgggcagtttgtcttgatttaaatagccgatgagccgcttcataatgcggcggctgtcggcgcttcgaagactccgtcggtcccgctccgtaacgcctttgagtctaggcatagagcacctcctctcccaattgagaggcggcgatttcccggtacagggtggaggatttcataagctcctcgtgggtgcctcgggagacgattttgccgtcgtccagaaccagaatttcgtcgcagtccaacaccgtcatgacccgctgggccacgatgagggtggcggtgtgctccgtcatgggggccagggcgcggcgcagggccttgtccgtttgaaagtccagggcggaaaaggcgtcgtcgaagagaagcacctcaggcgctttcgccaacgcccgcgcgatggagaggcgctgtttctgtccgccggagaggtttttccccgtttgagacacgatggcatcgacgccctcttccatgccgtgaacgaagtccttcgcctgggcgatggaaaggtagcgatccgcctcttcgtcggttaagggcatatcgtgggataggccgatgttttcccgcacgctccttaaaagcagcatggccttttgaggtgcatagcccatgcggctgcgcaggtctttggcggaaaggtcttcgatgttcacgccgtttaagcggatttcgccgccggagacgtggtagaagcggtggatgagctttaagatcgtgctcttgccgctgcccgtgccgccgattatggcgactttttgcccggccttcacttcaaaggaaacgtccgacaacacgggccgctccgccccgggataggcaaagctcacgtggtcgaagacgagagaggtttctccgccatccggtagagaggccttcacattttccttggccggcggcgtttggaggacttccacgatgcggtcgtaggcggccttggcattggggtacatggcgaagagcatggcaaacatactgaggccaaacatgatttgcaccacgtattggataaaggccataagatctcccacttccatggcattggcatggatgcggcctgcgccgaagaagagaacggcaaccatggtaaaattaaagatcaaattaaaggcgggaagcatggtaatgaggtagttgtttacctgctccgaggtgcggcgcatggaccgattcacctcgtcgaagcggcgatcttcgtagctttccttgcggaaggcccggatcacccgaatccccgtgagccgttcccggaaacggagattgatctcgtccatgagttcgcgaatgcggcggaagcagggaatggatgcacgggcgatggccatgaccacggcgagaagcatgggggcgcagaacaaaataatggcggaaagcttcacgtcggtggtaaggcacatgtaggtggcgccgagaaacataaggggcgcgcgaaccagggggcgaagggccaccacggccatgcgctccagctgactgatgtcgtcggtggcgcgagttaaaatcgagggggcgccgaaggtctcgaaggagggaaaatccagagagagcacgtgggcaaagaggccgctgcgtaggtcgcgggcaaagcccatggaaatcttcgccgccatgagccccgccaccgtcattaacagcaccgacagtgcggcgagtccgatcatggccaggcctttatggatgattagaggcacatcgcctcgcaacaccccggcgtccacaatgtggctcatgagccgcggcaggtaaagatccgccaaaatactcagggcgataagcaacacttcgccgacaattaagggtatatagggtttaatgtattgtttcatttcaccatccttttcaaaaaaacgcttatctattatacctacccgaaaagaaaggtcgtacacatgaagaccctggccgccttaaaacacaaaaacttcatcgacgtagacggaggctacggcttcgatcaaagcctgcttcgagaaaagagcgcctacgcggcggatcgggcctgcggcatcgccgccttggccaaccttatcgcctacaccgaaggcaaacgacgaatagacagaggcgcggccctgaagcttatgggcgagatcctccgcttcgccccgccgagaccttggggcatcgccgccgggggcatcctcattagagccatgggccccatggggaggaaatacaaagcggaatttctaaaaccccgcgccaccgatgaagagatcaaaggatttctccttcgtgcgctaaatggtgattgccccgtggcccttttgaataccaatcacccccataaagcctttcgctatcattgggtgaccattacggagctggtggaagacgagggcgaggtgtatgtgcggttttcctcctgggggaggcggtataaaatgcggtttgaagagctgtttgtgcgaggaatgatgtataggaggatgttttttataaaatagtttttttcttttgttctcgcacaccgcttatccctgctttcagggacacttaaattttgcgtgtcgcgatttttttgaaaaaggtgtgcgagaagtgcgaggaaatgatgtgcctatagtgtaggtcacccaatctcagtggtttagaaggcatcggtcgcttgtagttttgttggtggtatgctacgctgatttcagtataaaggaggaatatatgaagaaatggtgtaaatttttggcggcgctcatgctggccacctctcttttgactccgagccctgtccgggcagagggtcgcaatgataagatcaatgtcctaaaaagtgaagggttggtgacaggctatcccgacggcagtctgggccttgagcgacccattagccgtggggaggtttccgcgcttttaattcgcatgacgggcaacaaggtcaaggggcacggggcgcaggtgtttaaggatgtgccttcgagccactgggcaagcggctatgtcgaagccgccgcccgcctgaaaaatccccaaggggtttcggccattatcggctatcccgacggcaccttccgaccggaaaaccccgtcaccaatgccgagatgatgaaaatgctgacggtggcggcaaagaaagggctgacgcaggcagatgcaaagggcgccgaatggcccatgtcgtggatccgctgggcggaagaattaggcatcgtcggcgcaggcagtgatgtcggcccgttggacgtgaaagcacctgccacgcgaggcgatgtgtttgtcatgatttacaatgcgggcgaaaaggtgaagccgcgcagtgagagcccctctcgcccggcgaccaaacaacccgcccccgcaaatcccccgcagccggcgaggccttcagcaggcaatgaatttgcttcctttaacagcggcaaaaccttcgaccacgaaaagtttaaccgagaatttatggcattaatcaatgcagatcgcaccaagcgtggcctcgtgccattaaaatggggcgacgacttaacccccggcgccaccgcgcgggtggaggaacttctgaaaaacggctccatcgacgtcaacggccaagaccacgtgcgcctcgacggaagcagttggaccacggcctttaattacattcgcccgaaatcgggaaccaccatgttcggtgaaaatttggctgaaatcatccacatgtccaacgatcggatcggaaaaaagagccgccttttcatgaccgacgaacaggcccttgcgaagaatttctatcgcatgtggtgggattcccccggccaccgcgccaatatgatggagccgacctttcgctacatgaatctgcaagttcgcgtcggcgactacgcccaacttcaaaaacccgggaaaaacaccgtgtacttcgtcgggaccacccatttccgcggagaatatcattaaataagggcggccgctttttcggaaacgagccataggccgcaccctgagatgagcagaaaagaaaacgaaacgaaacaaagggctgatttggaggtcgccatgtatcgtctttacgcaaagcagaaagtattaaaactcgaagatcactacgccgtcaccgacgagtcggaaacgccggtctactatattgaccaaaacctgaaatttttcggcttcgacgtccgcgtctcggacagtgagaaaaagccgctgttttccgtggaacaggagcttatgcacctgctgcccacctaccatgtgtatttcgaaaacggcgaggtcatagacatcaaggcccgcttcgccctcttcagaaagaaaatcgacattacctacgaggggaaaactctgcgcctcgagggcgacatcctttcttgggactttcgaatattagatgatgcggaccgagaagtggccgccatcgagaaaaaagtcttcgcttggggcgacaccttcgtcatcgacgtcatcgacgacgcctacgccgatgtggccgtggccatgatgatcgtcgtggatcatatcatcgatatggagcagaatagccattaggctatagccaataaagaaagtgagttgtgaacccgttgccgctttagcaatgggttcacaactctttttttgcaaaaaaagcaatgcagactaaaggttgcgaggcattacgacgccctatccgtttcgaacaagcaccggcgcctcgagccggcgcaagagggtatctgatcttccggcgacgcacctcgctcgtcggaataggttatgagaaggggatgggcctcaaaaccacgaaagaaataattttaaggaaatagaaaaaccaatctaaaatgatcggccgcaaaaaagcaataaagtatgaaagtaaaatcctgtagatcacatacaaatggcgtaaattcaaggataaaaggcaaaatggaggggcagatcgcttgacaggggaatggtctaactataatatagctatatagatttatttttcatcaaaccaaaaattaaaaaaattttttccttccctgtcgagggtaaagaaacggaggaatccgcggctccctatttaaagacagtgattgatggtttgattggaacatgacattgaagaaagatgaaaggagagggtactgagagcaaggagatcataaccaatcgcggagcacctatatagcaaacgttattacaatagcttatcaatgaaaggataaattatgcacgattcaatgagtacctactcaagacgcttacttgcattggttctggcaatggtgatggtgatcaccatgattccatttggcgttttcgcaaacggcaatacgggccaaaatcaagcaggcgacgaaagcgcgacgccacccaatacctcatcccgtgccgtggatgccgaaggtaaacccctggtagactgggataaaagtgccggagaaggtcgtgatgacggctcagcctattggtcgctaccgtcaggcgtgaacatcatcaacgcccacaactctccggaagtgataaacacttttggtttcacctacctaggcaaatacctagacgatcaaggacgtatcgtacttaagttcgacatcggacacagagccatggctgactccggtgtgtggaaaaaatatgtcatgcgcttcccaaaagaactttacaatgctatcgatacagatgcgtcgtttgttctatggaagcaaaccgaaacctatcgaatcgacaacttcgatagattcgaaaccacgaccgtaagagagcaaactgcctatacctatcagttcccatatagaaacttcggtgcccaatacggtcacagagaagtaaacgtcgttttaaagaaggacgtcaactgggaaaaggactttgcgggcaaatcacaagtagtacaacttagactatatagtgataacaataataacttgaagatgttctccacatcagccagaggcgcagacaaacagtacacatccttcggttacaacacccatacaaagacggcagttgtaggcgatctttcaaaacgtcctggcgaccttgtagaatcaactactgcatcaatgagaagtctttatgatgacgtattccacacagccgactcaacattgcagctagatagagaaaataaaaaagtaaggataatatataacgttgcaaagggatatactgatagtgcagactataagatgtatggtgaagatatcggcctacgtcaaacccttgacccggactttgtacgctaccttgatttatcaaaaccggatacaaagatcggtacctaccaacttttctatccaaacgaaaaaaatatggtgaacccattgatatctttgcaaaggacctaaatggcgttaaaaagacagcagatggaaaaattgagctagacgaaaataacaacccaatctatacgcgagaggacaaatcggtcttcatccaatttggcacaacagaattcaaagataaggaaaacccggattcgtcagatccaaactatatctttacgaaaagcaccgatgcccaaaacatttactttaaagccgaacaaggtgatggatgtttgggcgtatttgagtacaatatcgaccctagtcttattaacgcatctatgatcgagaagaaagagttctccaagaactttatgtttgacaccagatatataacatctaacaatgatggtgttcgtaagtacacaggcgttttagaagaagaccttgtatttggaccaaacagaaacaacttttacagattaagcacggagccttacgaatcaataactactggtatggtaggcgctaacaaggttgcagatattgtcttaaatataggtggaccaaatggaatctggaagtcctggaagcgtgaaggtgctgcttggtttaatgacggtactaacgcatatgcaatttcgccttatggtaaggaaatgcatttaactaagcacaacatgaccattggtggaacaatccctaaaggcacgcaaattacagtctatattcctaaatcctattcaagaaaagtagataaaatttactttgacttagtaacaggtgacaaacttggagctaccaagatccaactgactaatgccaagtcattaatgggcggtaagaagataacccttaagaaggaaaagaagaaaaacgggtctgacgtattctatccaccaatgtatatcaagaacaccgtttccacaatcggtggttcagcaatcagagagcaatatacacctataatcgatgaaattttcacagactctaaagactttacaggcattatgagaactgaaggtggtgtcctggcatccctttacaagcctaaaaaagaagataactcgactaccgaacacttcggcgaaaactggattgactcagaatccgataaagatggaaacatcactggctacgaaagaatagacggtaagcttaaagacaaggaaaaccctgaaactgtagatcctgacaaaataaaggaaaagagaacggttaaaggccttgatactaagaacaatgttgtagacaaggaatttgaaggtttaagatttaccatcaaaaagctttactttggtggcgatgaatttaaggatgccaatcaagaaacaaaagttgaagacatgggccttatcaaggaccagccggttatgttcaactcctttagacatacctctttaaaatctgcgccggtttacgaacaagttcaagcgaaagttaaattcatgctctatccgaagcaaaatgttgccctggataagatagtgcctctaaacacggaatactctatcgagcctgaaaaactcaacgaaaaaggacttgaagcagctgcaagacttgaaaccaccggcaagccgaacccgaactataaaggaaacggctttaaggcaaaagaaggcgaaaacaacattcgtgtggataaagaccatcccaccatttccgttaagagaaaatctctaacatcaacagacgcctttaataaggacaaagaagtaacctatccaaacttccttaaccacgatggctatgcctacggcgtaaacagctcggatccggctataaaagaaagagcagctcaagaattcattaagcgcctctatccggatgccgaattcgatgaagccttatcgagaaaagccgacgcttcaccaagaacagacggcaagacagttatcggttggacgaccaaggaacttaaggatacgcctacaaaggatgccgtcgaccaattctatgaactggaaaagaataagaaggttttaactgaccttagtcaatggaaagatgttgatgatgataaagaaaactacatcttcaacgaatactcaccggttgataaaaacagaacagtctatgccgtttggggtacaccgagcttagtgcttcactccaacaacactagcttagataaagaaactgtagtccgtattcctttcacgccggatgacgttacccatacaaacaagattattgatgctatgacatcggcaactaaggaaaacttaaagaacaataatgtaatcaaagaacttccgctggcaccttacaaatataggtccaaagctcttggagaggaatttgacccaagacttgaaaactttataatggaaggctccactttcgttggctggactctagaccgtcatacaaatgataaaaattctgacttcgttgcaggtaacaacaacgaccgtcttggcgaaatccaaaagggtgaaacgaagaatggcaagagtcttccaaagagaacagagtcaactcaatatctaggtcattttaaagatgcctatgttcccaacggttataactttgccgtatctaaaggctatgaagccttgatgaaggaaggtaaggacatccacctatatgcaaactatagaccttacttcgaaatcaatgttaagccacaatatatgaacattggcgaagctgatgcaaatcatcaatatggtaagtatgttgacgatgtagaagcagctaagaagaaaaacttagaaattgccctactatatagaactgctgtaactggttataaagaacccaccgtacttcaaggggcaacctataacccacttacagaaaaagacctacttccaaatgaccttgtcatcaaaccatgggatggaaataataataataaaaccctaacatggaaggcaccgggttacgaccgtgaaggtatgagacaatcctatgtagcaactgtagtacctcaaggaaagacagaagcctacaaaaaattcaagcaagaaaagccagatggcggaatctacgactggaactccctgggcattacaacttatgttaagctttccggccaatcagcagagctagacaagggggcgcctagaaacctacacgaaacaattccaaatggggacccatacggaatcggacttgccaagcaacaaagctttggtgtagatgctgctggcaaggtagacgcctttacctcggcaacatcgagacaagctacagtaagaacagctcgtggaaccaaagaagaagtaacaggttacaacatctcccttacaaacacaccgcagtccatgccgactcctgaatttaactcggtgaaggaaacagatacaactatcgacatcaactttggtcaaggccttatcaatgaaaagctaaaagctcttaagttaaagattcctacatcaacagatggaaagattacaacttataaagatttccgctttgaaatcggcaccgatggcaaaaccttcacggcacctaatggcatgacggccaccttagatcaaaacacaggaaagcttacaattggaaactttgacttcaaaggtcttccaatagatgaaccaaacagaacaatctacggatcctatgtcaaagaagttggcgctgaaggtgaaaaaacagaggtcgaaggcgacaagggcaaggtcgttatcaccagagtattaacttcacttccgattaaacaaatggaacaaatcgcaaagaaagatggagataaagccagactcaaatttgtgatccccgacgaaggcccgacagaccaagttgtatcaggtacaacctataccgctcaaaaatttgacaaaactcaaaacaagtgggttgatgtaggaacaacgactgttagaggaacgaacctaagaggatcttcaactgaaatgccaatcactggcgatgtagcagacggcgaccttatccgcatcaagtccaaggaacccggcaagctggaatcctactccgtaggcgatgccgacagtggagcatacacaccacaagtacaagatcctagtacaccaaatgtaccaccggcagatactggccactacgttaaacttgacctggtaggaccgacggtacaaggtgaagccaaggacgaacgcttcagacgctatatcaacatcgacgctactcttgatgaagttcccggcaaacaagttactattgaagtaggcactaagggtgaacaaggcgctaaaggtaacgcaatcttcacaggcgacaaggacaaagtcattaagttctacaacgaaatcgctcacaacgatgatataaccctacacggcgtttggatcaccgctaccgatgagtttggaaatacaaaaacaactaagttgacttatgaccaaacttatcaactagatatgagagttacaggacttagaccaggacgtaactatctaagacttaagtcggaaaaggcaaacacaagtgttaagcttaccttctacgtcaatggaaaagttgatcacactgaaacagttacgataaatgaagctaacaagtaccaaaaattcacactaagcgacggctacaagatgaaaaaaggtacagaccttgatatagaaggttcatgcgtagaaggcaataagacctacaccaccaatccctgggagatgcccatcgactaaattcattttgatggagatctgccatataatatagaaagaagttaactgtccttaggggagcgattgctccccaagggattattcctaaggaggaataatgagcaagaacaaatatctctcactgatcttatccattctcatgctccttcaaatagttgcgccggtgccggctcaagccctgtccatgggacaaagcggcaaggttcaaaaatcagaaggacaaagaataagtgatagatcagaagtgtttacattcaacaacactgaaaaacctaaaatgtcatggttttctagaggcactcagtccacatatggggccagaaatgcttcattaactaagacagaaaacttaaaaatcactacagaaacaaccggcctcgacgaaggagagtttaactggaaagcctttggagataaccaaaaatttacagcttgggttgaagtatcctatattggcgagaaagatgaaaacggcagacctaaaaagtacaaggtttccaaagatatcgagatcagccaagccggaacgattgaaactcaagttgaagtagatgcagaaaagacagttgacaaatattatttgagaactgagtatcaagattcggcaaacgcatttaagattaaagcattttttccgggagctccacagctatcaccaaaaggtggaaaagaattagtattcagcttggacatttatcaaattgtcagtacagagatagagtacaatctaatcgatgaatacggcaaagcaattgaccttaaggatgataaggaagaaaaaccacttttaaaggatcttaaaggcatcggtaaaatcggggacgatattagctttgacctaaagaacacaggtaaagaaattctttggcaagaacaaaatctagatgaatgggagttgatgagctcatctctagcaatgaccttaacaaaagataaaatcacttcaattgatatcgactacaagcttacctccacttacgatgttattaatggtggtaaagttactatccaaagacaaaaagatgtagtaacaccaaaagatccaaaaaatcctggaaatactccagatggctatgcaagaattaacctttcggcagatgccctaggtggaaaaaccgacggtacttttacaaaaggcgacccaaaagacactcaaagagttgttgacgtaagagcaggcaaagcctacaccactgcccaagcagaaatcgaaaaacaaggcaagccctaccccttaaccgccgaaaagaaagaagacaccggtaagacctttgacaaatggacaccagagttaggcacactaggaaatgccgttgcaaaagacacaaaaactttaaatgcaacttacaagtcaagtgataaggaaatcattccttaccttccgggtgaagaagttcctacaaaggataaggatggacttccaattccaactaattacctaacagttaccttcaagtcagaagacgctaaaaagggtaatgttagaattggggacaaggaaggcgaaacagtacttgcaaaagtaaaacctgatgtagatttatccaaaaaagaagaaatctctacaagaccggtaaaggactacggctttacaaaatgggaaccacaactaggagttccacaagaaggcagtgtatacacagcatactttattaagtcaggctcaaaagttggcgagaacgacccaataccagaaggctgggtgagagtttctgtaagccaagacgatgcatctataaaagctggaactgtaacgaagggttactacacagttaaaccaggagataaattagcaaaagaagcatttgttgatatttcagaagcagctaataaaggctacaaagacccagcatggtatgttggcactgaaaaagtagctacaccagaaaaccatgtaatctacggaccaacagactttatcgcaaaagcaactcaagaagcagcagacaagattacaaagaacggtggcttaaaggcagttgacattacagcattcaagggcgactcaacagaaggtaaattctggaacaagggtgttgcattaagcactgcaaacgaagaccttcaaaagctcttagatgcagccactgttaccgatgaatccggaagaaccacgaaagaagccggcgaaaaactaggcatactgaaagtgaccttctccgacggctccaccatcgaagtacaaaaccaaaaactcatcgtcaaggaaacggaagttaaaatcaacttcgacaaagatgccaatgatgacgccaatgcacctcgtgcaaaagaagaagtcgtaaaaggcaagatttccgcagcggatacaagcaccgtcgtcgccggggcaaccatcgtcattaaagataaagacgataaagtgatcggcagaggactcgccaacaaggacggcagctttgtcgtcggtacgagaagacccctcgtcgccggggaaaaacttaatattatcgtcacccttcccggcgtcgataaagcatcggcccccgtcgaaaagcaagtcaaactcaatcccgacgatttaaacaaagtcctccccgtaggcgacaagctttacgacaatctgaaaggcaagcccggcgttagcaaggcgaagctgaataaattgaaagaagcggtcgatgccggctatgcattagttccaaaagccgccgatgctgataaacaaatggcacaaaagcctgcagcatccgtggcagtttccgatgatggacaaaaatccctggacaatgcggcaaaggccattaacgacgccattaaagcattaaccgacaacaccgcgcccgtggttaaagggacggcctttaaagaaatctttaagggcgaagaccttaatttagaagccggcattaaagtgaccgatgcggattccacgcaaaccgaatccgacattgcacaacaaggcggcaaagacttcagctacaaggtttacaccaccaacagtgaaaatcaaaaagttgaagtaaaaggcgatgctctaaagaacttaaatcaaacaccgggcacctatgaagttgtctacatggcaaaggataaatccggcgcagaaggcaccttcaccatgaccttggtcgtcaaggacatcgtctacaccaagatcgccgttaccaccgatcccacgaagacgaaataccttgtaaaagataaggatacgaaagcgaagcccgactacaccggcaccgtcattacccttaccaagaacaatggcgatacagaaacggcgacctacgataaagcaacgggcaagttcaaaatcggcgaaaaagccattgacgagctgaccattgcgccgaaagaagtagccgttgcagaatcgccggcagtgattacggcgacctatgaagctggcaatacaaagttaacagccaatgcgggcaagaatatcattgttcaaatcgacagcgacggcaatggcgtggcggacaccgaagaaaacttcgatatcgccaaggccaagtccatggaaatcaccaatcagccgaccttgaactatgaacttgatcacaagaccggcaaggcaagcctggatttgaaatccatcgtcgtcaaagtcaccgacagtttgggcaatttcaaatacttcggttacgaagaaatcaagggcgacactaaatttgccctggctctgggaaccgatgcctttgataaagcggcggcaaaagaattaacgacagccgacaccggtaaaaaggtcaaggttaccttaacctacaaagaaaacaagaccttagacgcagaaacatctgccattaaagtagaagacaaacggccgagtgtgatcgaaaacccgaaaccgggcgaaacacgcgaaggctatgtctccgtaaaatttaatgcagacgcaaacagcggactcaatggcgtaaacaccttcctcgttaagaaggatactgcaagctccgaagtgaaggtgccgaccatcgtaccggcagctggctataaggtaaaaaccgacaacggcggatgggataaggccattccggcaacatttgccgcagactttgagaccactgcccaatgcgaattagatgacgcaacatctaatacgccaaaagccggctatacccccattaccttcgatgccctggacaagggtaaaattggcgacgcaagaacaaagaccatctacgtcaacccggcattggatgtaaacctgtctgaaaatgcccccacagtcacagccaacacaggctacagctttaaggcgtggaatcccgccatcgacacggcaaagaaatacaccaaggaagaaagaattctcgcaacctacaccagcgatgatttaatttccgacaaggaaaaagcaggctacattaaagtcaccttcgccaatggcaaacacggtaaatttaatgaaaccaaccctgcacaaaaaacagactactgggtaaaacccgacacccttgtagacttgagggaaaaagcacccaaggtaacggccaacgccggctacatccacacaggctggagccaagatctcgtggtgaacttcaaggccgatgcaggcaaccaaaccatcaccgcccaatacggcttggattccgactattccacgacagaaaaagccggctacaccaagatcacttttgataagggagccaacggcgaatttgcaaaagatgcaaagaccgagctttgggtaaaccctgcaaaagaattaaccttaccggcaccgggcatcgttccccaccccggctattcccacaccggctggaccaaggacaatgcagcggttaatttaagcaaaaaagcaaaatacacggaagccaccaccattacggcggcttacgaatccgacatttccgaaacggaaaaaactggcttcgtcaaagtctcctttgatgcgaacaagaacggaaccattgccgatgatgcccagaaagattactgggtcaatcccaataaagaagtcaacttgacggacaaggcgccggtagttacgccgaattccggctacctcttcatcaagtgggatcacaagctggttgctaaatttgaacagccaaccaccatcaaggcgacctatgcttccgccggcgacattaagacggaagaaaccgaaggctttacaaaagtcacctttgacgccggtacaaacggcaaatttgccgaaggcgcccaagtcacctactgggtcaacccgaacaaggaactggtattaccggaacctcgtgtcatccccaacaagagctttgaacacaccggttgggatcctgccttaaccccggcgaagcaatacaaagaagaaaccaccattacggcaacctataagcaagaaatttccaccgaaaaaatcgacggccaccaagaaattaaattcctggcaggcgacgacggaacatttgccgacggcaaaaaagcaatttccatttgggtcaaaccggacaccctggtggatttaagaaaatccgccccggaagtgacggtcacagcagaaggtaagaccttcaccggctgggacaaagacttagtcggcagctttgcaaaatccgaccaagcaacggaaatcaaagcccaatacgcaggttccacatctgaaacaccggttcccggctggacggaaatcaccttcaaggcaggcgaacacggcaatttcggaaccctaaacaagacacccatcgttgaaaagaaactatgggtcgatccgaaagccgacgtaaaattatccgacaaagcaccgaagaccattgacgaaaagaactggtccttcgacaagtggatggacggcgaaaatgccgctaccggcttggatgttgccggcaaatacaaggaagcaaaaacctatacagcttcttataagtctgatatatctgcgacaccacaagaaggtttcgtaaaagtcacctttgctccgggtacagacggtagcttcgcacaagatgctgttactgaaacttatgtaagaaaagacaaagaagtcgaccttacaaaaaaagcacctaaggtaacacctaagagtggcttatcacacaagggttgggcaattgataatgctcctgctgacctaacaaagattaaagtcagcacagacactaccatcaccgcccaatacaccaaggccatttccgacaagcccgtggacggctggacaagactccaattcaactccggtgaaaacggacgcttcgtcaaagacgccgttaccgtgaagtgggtcgacccgaaggtgaaactcaccttgggagcaatcgcccccggcatcactccggacaaaaactacagactgtccgcatggaacgacggaagcgccaatgtggatctggaaacagaaaagctatttgaagcacctgccacctttacggcacaatacgaaaagatttcctccgaaactgaaatcgaaggcttcaccaagattacctttaactccggtgaacacggaaacttcggcaccaaggaaaataacccggtaaaagcaaaggacatctgggtcaatcccaagtccgacgtcaaactatcggaaatcgcaccggagctggtcatcgacaccaactggtccttcgacaagtggatggacggccaagctgccgccgatatgaacacggctcaaaaattcaatgcagaaaaaacccttacggcaacctacgaatccgacttctcggatgaagccaagaaaggttttgtaaaagtagaatttaaggccggcgaccacggtaaatttgaacaagttggagatccaaagaaagatcaacaaacaattgtctatgtaagaaaagacaaagaagtcgacatgacggcaaaagcacccaaggtcacccccgaaaaaggctactacttcaccggttgggataagcctctgcaaaaagtttatacgcaagatacgatccacactgggaaaaatgaaaacgccattgcaacggaagcggtagacggatggacccaaatcacctttaacgcaggggacaagggcttctttaagccagacgcaaagaccgtcatttgggtgaaacccaatacaaagatcacattagacgatcaggtacccggccttgaaatccaaaaaggctactcctgcatcggctggaagaaagacaaagaaacaagcgtcacggacttaagtgttgccgcaagctacgacaagtccaccacctttacggctgcttatgaatccgacttctctgaaggaaaaaaggaaggcttcatcgaagtgaaattcaaggcaggggacaacgggaacttcggcaaaaatggtgaaacacctattaaagaaaaatctctatgggtaagacccgataaggaagtcgacctgacggatcaagcaccgaaggttacagctcatgttggctggaaggcaaatggctgggataaggaaataacaaaggtaactgttaaagctgatacggcagaagatgctagaactttcacagcccaatatgcaaaagattccgacacgtccaagacggaaaaacccggctataaaaagatcacctttaaagccggcgaccacggcaccttcgccaaagatgcggaaacagtggtctacgtcaaccccgactcggaaactgaattaagcaccattgcccccgaggtcaaacctgacatcaactattccttcaaggcatggaataatggaacggcagacgtcgcattaactgcaaagacaaaatatactcaagaaacgacctacacggctcaatacgaatcggatatttccgaaacagccaaggatggctttgtcgaagttaaattcgacgccggaaccgacggcgaatttaaacaagtaaacggtgcagaccaaaagaccaccttctacgtcaaaaaagacaaattggtcgacttgacggacaaagcacccacagtcaccggcaaggacaagaagaccttcaccggctgggacaaaccgttaaaagcagcatttacggatgcaaccaccattaatgccaagtacacggaatccatttccgataagcctgtggaaggctggacccaattagacttcgaccaaggtgaccacggtagatttgctaagggtcaaaagaatgtgaaatgggtggatcccgccgttgacttgaaactcgaagacatcgcgcccaagatcaacccggatcccaactggagcttaaaagcttggaacgacggcacgaatgatgtcgacgcaaaactagcacaaaaattcactaaggcgacgacctttaccgccacttacgaagatgcattctcaccggaagcaaaggaaggctttgtaaaagttacctttgatgcaggcgaccacggtaaattcgtgaaagaagcggtaaaagaaatttacgtcaaaaaagatgtagaacttgacctaagagaaaaagctccgaaggtcatgccaaataccggctacggtcacactggctggaccatcaacggcaatgccaacgacctgaccaaggtaaaggtgacggaggcaaccaaaattacagcatcttatactgaaggaacatttgatgcgacaaagatcaagaagattatggttgtcggccccacccaaatgggctacggcgtcggtgaaaaactgaacctcgatgggttaaaagtcatcgctattgacgacgcaggcttgcaaaagacctacgactacgacaatggcgagttggtcgataaaacaaacaacaatgccaaactaggtgcaacaattaaagttgccgataaagatgttacttttaaagaagaacaaggcaagaaagtcgtaaccacagaattggcaatggccgacaacgacaaacacatcgtcgtcaccaagggcgaagatcccaacaaggtaaccggtgaaaccatcacagccctgaagatccatgaaaacaaatctgccaaggcagaaaatgtcaaagccctgaaccaaaacgaagtggatggcaataacaagcccacggacaaggcgaaggcaaccaccaccgttaccggtaaggtcaaaccgggtgcgacagttaaaatcacttcggcagatggtcaaacagaccttacaccaacagacaatgcaaagcttactatcgatcaaaatggtaactttacagccgaaattaccaaacaaaatgtaggcgacaagattcaagtcatcgccacggaaaaaggcaaacaaccggctgaaccggcagacgccaccgtagcacgggatgccaacaacgacggcaaagctgacaaagatgcaaaccaaaaaactgcaacacctacagctaaagccttcaatcaaaacattgaagaaggcggcaaagtaacggacaaaccaaaagcgacgacgacaattatcggcacggcggaaaaaggtgcgaaagtcgttgccaaagtcggtaacaccatcgtcggcacaacgacagcagatgctcaaactggcgaatacactatcgaagctactaaagacggtcaaccaaatggtggcgtgattgatgtagacactgaaatcaaagtaactgctcaagcagataagaaactcgtctccgatcccacggcgacagtcgtcagaagagacgctgataacaacaaagaagatgacaagggtcaagactttgacatcaaaaaagcagccaaggtagaaatcgtcgaagaaccaactaagatggattatctagttaaagataagaatagtaaaactaaatttgaaacagctggactagtaattaagattactgactcagcaggaaaagaaattaaatacactgctagtgaattaaagaacatgactgacaaaattacggtagaacctgctgaccaagcagaaattggtgtggataaaaacaataccaaacttaaagttaccgtaaaaggttctgatttaacagaaaaaccatcagtagaatctactaaacctatcacagttcaagttgacgcagacgaaaatggtatagctgacaatgacgaaacaacaacaatcacatcagtgattgctagaaatattggtactggaactacaagtcctaagaaagctgcaactttcacaacaattgaaggtatggcagaaaaaggatcaacagtaacaatcaagttccaaaataatggacaagaagtagtcaagactgtcaaagcagatgaccaaactggagcttataaacttgaactaaaaggtgcgacagaagcagaaaacattctacttcctgctgatacagaggtttcagcaagcgctaagttcggcgataagaacccatcaggcgaaatcacaactaaagtatttgacgacctagacgcagatggaaaagcagataatcccaatgccaacaagaccgaacgcccctccgcattggcttacaactttaaagacgaagccaaaaccaccatcaagggcgaagcggaaccgggcgctaaagttgtagcaaaagtaggaaccgttgaagtcggcaacgcaacagccgataaagacggtaagtacgaaatcagcgcaacccaaaataacgcaaaactacccaagggaaccaaagtaagcgtcaccgccaccttagatcctaagggcacatcgcctgcacaagaaaccgtcgtttacgacgacctcgatggcgatggacaaccggacacttcacaagcctttgacaagaccaagatcagaggacttgaagtcgtcgcatcgccgaacaaaatggtttacaacaacaaagaaaaactcgatctcacgggcatgaaagtactcttgaccgatcaaatgggcaacaagaaacttgtcgaattctcagaatttgaagcctatgacatcaaagtaagccccttgaacaatatcgagctttccgataaaaatgttgccgacggcggtcacaacggtctaaagatcaaggccgaagtcaaagtggccatcggaaatagcgaaaaaacctattccggtgaaacacccacggcacttgaagtcaacaaagatcaaacggcgaaacccacagacgttacggcagctaaccaaggaagcgacactgcaaccaaggtacgcttcaaagctgctgacggtgcagccattaagatttacaaagcagatgatgcgactaaggcaaatcttattgtcgacgcacctgttgcaggaaccggtaaagatgtaggctacttcatcgccacattaaataccaaacttcccgaaggaaccttagtggaaatcactgctcaagaaagcggcaagaaagaatcttcccccgaacaagcccgtgtcattcgcgacaaaaattcgaattgggaaggtggcaagaccatcaatctttccgctccggtcatttcacccatccgtgaaaatgataaaaccgtaacggtcgaagcaccgaaggcggaagacaagattcaaaccattgtcgtcgaagatccgagtggaaacaccgtcacccttgtaaaagatacggcggataaaacgtggaacgttcaaggctctaatccggcagcgacagtgaaagaaaaagacggtaagattgaaatccccgtcgatggtaaacttcccttaaaggacagagaactgatcaaagtcaccttcaaagacggagaagttccggccaacgaagcctttgatcgcagagccgttcaaaaggcaagtcaaaaacccatcgtcgatcaagtctacaccggcgacgacaatgtaaaaattgccgacccgacccgtgcagacgaaacggccacgaccattaaggtaaaggttaataacaacgactcaatgaccatcgaaaaacaagacaacggtacttggaagataaaagaaaaaccgggtaccaaagtggaagtagaagatggaaaaatcgtcgttcccctcgatccgaaagctgtaaaaggcgacaagatcgaagtaaggacgatcaatgattcgaaagttgaatcggatccgacaaaaatcgaagttaaagataaagtcttaactacgaagcccgtaataaaagaggcaacaaaagataccaacttcgtaaccggtactgctgaaaagaatgcagatatcgtcgttaaagtgacgaagaaagacggcacgtcctctgaatttagaggcaaagccgacgaaaatggaaacttcaaggtaacgacagataccttagtagacggcaataaagttgtcgtaacggcatccgaacccggaaaagcagacaacacatccgacgaaaaaaccgttggcgtcgatacctccaagctgaaagaatccatcgacaaggcagataagattgttgcggaagatggcacgaactttaaacctgacacaaaccccgtcgataaagcattgaaagatgctttagataatggtaaaaaagttaaggaagccggcgacaacggcgatccgaatacggatcaaacagtagtggacaacgctaaaaaagaattagacaaagccattgcccaaaaagaagccgataaagccgtcgatcaagcaaaagtcgatccttctgatcaaaacatcaacgatgcccaagacaagatcaacaacattcctggtacggttgatgacaacccaatcaaaaaagaccttcaagacaaacttgacctcatcaagaaaatcaaagaaggcgaagaacggttgaaacaagacgacatcaaagataagccgccaaaagatgttcaagacctgaaagatgccattgacaaaggcaaaaaggcgatcgattcaaaagacagcaaaactgttaccgaagcgacgaaggccatcgaaaaagccatcgatcaaatcaacaaggaaagaatcaaagttggcgtcgaaagtttgggtcgaggcctagaaactttagaaattcggacctccgtaccgggtgccaccgtagtcattaagattggcggaaaaacaatcaaaaccattacaacaagctcctttggcacctactcgcaaggtttatcggaagggctgaaggcagatcaagatgtaacccttgaagccagcaaagtcggttataacgatggtatatatagtgagactgtagattaaagaagagaggtaattagtggaagtaactctattatttcctcatcccagcaaaatcttctcgtagtcaaccgtcgaatcgacctgacaaaatggttctaaggaagagacgatcttttgtaataagccgcataaaaatcgtgcaaaaaaaagagcgtctaaaatgcacggacccccaggggttggacaagtgatccaatccttgggggtcttttaatggcaaatttcagttataaaccaaacggagaaactgcttaggggccgggggcgaagttcgaaatggcagtccacccactgggaatggcgaggtagaggatcgtagcgaaagcatttaggaaacataagcattccggtgacttgggaagtggcgatacaaaccttgcgaaaagcccatgtccttcgtataatataaaaaaatagatagaataaagtaaactaatgtaattacggaggcactatgaaaaaatcaaaaaaacaaaaaaggaagtcattaaaggaacagctacttgagggcacaacgaaagaggaaaaaacaaaaatcccggaatcaagctatgttttactaaaaaatgcgttgctcaaaggcacatccgaggatatacgcaaattagtcaggaatacagaggatgtgtataaaattgcgggagagctagaaggctcctgcgaacaaagaaaagaaattgccaattcaatcgatatctacttgaacagtaatttctcgaagagctttagaccaatacttgtcagtacgatgttggcgtttgttgcaacggcaatgaacgatttgataaaagaaacaatcaaaacaggccttctactttttacggaacaggaatcggcgggcggcatcgaatttggtgtttctattggtacctttgtagcgatggcggcaattatcacttatttttgcataaaaatgttagatttatggaacgcaagcctcgaactaaaacgcgacctcctcttactcaaatccctattgaaacagaagtaaaaccggttttctaaccaaatttcaaaaacgaacacgaatcgtaaccagtcccctggagatgtagtccatcttcggggtttttttggccaaaagataaagaagtcataaaaaggctctaaaaatccatcgagtagagtaacctcctcaatgggtattttagagccggaattcatagaaaaagtgaaggtcctttgaaagatcaaggggtctttaatgcgtcctttaaaacagaccgaaggtacattactttaattccacgtaagaagaattagcgtgaacataaaaaaaggaaaaaagctttggaatttcaatgtttttcctaatgatctatgataaaatagcaatgtatatggaggcggtgaacaaatttcttgtcacaatttaaaatcagtcggttttaacaggtgtcaaccttttagaatcacctccatggcaaccaagaaaattcacttcgtttgccgaaagcagtttaaatcaccattcagcgggaaaatggagacgcagagttaaaggggtgatgtccggagagaatggatgtacgacaattaaagctaattgaagaattagtggaaacacaaaggaaggtaaaatgataaacaaagggatacttaaaaagcatttatcactgtttttggtgatagccatgctcttcagcatgatcccctacagcgcattggcggcagggggcacgggtgaggggactgaaacttcagacccgaccctcgatattgcaaacccgaccctttccacgaacctgaagacctattacgatgtccgcgggatggaaaggtcgaatttacggtatgccaatatcaactatgaaagcacagaagtaaaagatggggtcgaaaccatcacaatgaacttgtccaagtggacagactcaagtgtcggctttggtcacaaaagagatgacaagtattcaggtcaaatcatcctgaactttttcgataagaatttctatgaaaacatcgagaagatagagctctcaagaggtggctccactaggcaattaacaaaagacctaaagtataaaaacgaatcagaagttatccctaacggtgctcaatggatgattaaaatcacggacgcaccggttagctacgctctagtaggtgttgttacaaactctgaacttaaaatcaccatgaaatccggcaagaccttaaaagaccttggccttgaaggcaaggacattgccatcaatcatgtctgggttcttaataacggcaagattgcagctgaatctgtatccaatacgatgatcaacagcaacaaggaaactaccaatggcgagtttaaaaacaacttcctgacaggtaagccgggtatgaagattatctacagaccgaaagaaggcgttttacaaacggttcactctttcaagtcggatgaaaacttcctgcaatcggactacaactggattgtatatatcaaagaattagttcccaaagaactggttccgtttatagaaaatgttgcctgggtcaagaggactgatgaagtaggtaatgaagatagatttaccaaaggcaagttaagcgtcgaattgtacaccgacgaccaggggcgctatgtctttgacacatcaaaaagctccaatatttctattcgaacgacaggcaatgccaataaagataacttggatgaagctaggaaaaacttagaccataacgtcttctacggcgtcctcggtcaatcgagaaactacaccattgaatacaagcttaaagacgataagaccagcaaagagtttgttgaaactatcgttaagtacgttcaagagcacaaccaacaagttcaattcacatcttggatggaaggggactatgtaaaatgggctgaaaaaggcgatgcagaaccgcccagaaaactggaccgttccgaacacatcggctttatcgaatcgaccgactccgacggcgacggcttgttcgatatgctggagtggatctatgaaacagattacagaaatcccgacacagacggcgacggcgtgcccgacgggcaagaagttctgacggacaaaaccgatcccttaaaggcgaacagctacaagcccggaaaggcaacaacggatacgaaggctattccgcgcgacaaggcgattgctataaaaggaatggcaccgagaagcaaatatgctaaacctttcgttaaacccaaggaagcattgccggttgaaagcgatgatgcaggcggtcttattgtacgagctgttccctattctgtaaatgaagaaggaaagccggaaattaacgagaaagtcgtctatgccggaacgaccatctccaaagcgaatttagataagggtccctttaccttaaacatcagacccaacatcattccggatagcgtcaaacaaattgccattgtaacctatagccccgatggcaaaaatccggtgatcggcgatattatttcggtaggtaccgtcattaacttcaaccccaatggtggtcaatttggcgattccacggcgtcacaacctgtcatcatgaaggaaggcaaagttactttacctgagcaagcgcctacgagaaagggctacaccctattgggctggtctacaaaggccaatatctcagaaagtgactttggaaaattagccacactggcaaccgaagccgactgggataaagatagcgcgatgaaggtagatgccacttctccgggcaaatcgggagaaacggtctatgccgtttgggcacaagacacatttaaagtgcgccttcatagaaatcttagcccgacagatgacaaggttgtggaatatgtggctgagccggatgaagacggcaactgggttttaccggaagtcaacaaggacggctccgaattaaaagatttccacattgacaagtacacctttagaggctgggcagaaaatgccacagataaagtgccgaaggcaacgggaacggaaactttcaacaatccccgtacagggaagtctgtcgaaagggtaacctaccaattcgacggatccaaggtatcctttaaaggaaagaccaaaccctacaccatggacttatatgcggtctatgcaccttatgtaaaagtatctgcaaccaaaacctggcatgcggacgccacatcgggagcgacgaaatactcacctgccattggcgttggactactttacagaacggccgtaggggaagcatccgaccctgttatcgatgcgcaattggcagactaccgttactacccgggctcttaccaagagagtgcgaagaaagtttttgcagatggtgatgcggacaaatccattaagtttaactgggaagttccgggctatgacgccaagggacagagattatcctttatactgggcgaaatcgagccggagcaaaaagcaaaactcgaaaactggtcgggtaaatggtccgatatcaacatcgttattacagataacacgacctccacagacggcggcaagaaacaaattgtttacgccaaacgtgacagcggtcaaatcgacgcctactccggcgccacaactcgtagggttaaatcttatgtagataatggctatgagacctttaaatatgaaatcacagccaaaaacaccaagctcggcatcgaaccgccaagtctcgaagacattgtagacggagacaattacttcaccatcggccttccccaacaagatacagtggccaaggtcgacgtcgtcgtaaaggtgaaagacggcggcggaacgaagaagtacgtcatcaatttaatcaaagatgaacacggaaagtggaaggcacaagacggcaatgccacagcggaagccattgagggcacaccgaattatagaatcactttacccaacggcgtaacatttacggcgggagataaggtagaagcctactcaaaagtagacgcagccacttcagatacgataacaaagacggttattccaaaacctccaacatctaaaaccaaggcaccgacacaagccaagagagacgaaaactataatgtagttcttgaagccgaaagacctttcctcggcatttcctcatcgaacaagtacatccttgtggatgatcaagataagcccattaccacaaatgacggcaaggaaatagaaggcaagttctccaatgccgtcgaaggcgataaaaccattcgctttacagtacctgacggcgttttaaaagacggccaaagagtgaaggtaagggcttcagaagacagaaagacggatagcatctccgatttatctctacccttggtattaaacggacctgaaatcacagcgccggacatcgtcttaaccgtggatcaagatttaaatcaagcgatcacaaccaatagatatgcagatttaaccttggatacaaaaacgccactgccaaaaggtttcgatttgagaaaagacgatagaaaaacatcgacgctgcttggtaagtcgagtgaagtggtgaatgagacgacccttaaattacatgccgtagacgatttaggtaataaatcggaaaaggtctttacgcttaaggtaaatccattgccggaatccgctcaaccgaaagttactcaaatcgccaaaaaaggtgatgaaacggcaagaattgtagtagaaggtaagccaaatgcccaaatcggcttcaaagatgccgatggaaatgtggctcgtaccattacactggacgattccggtaagacggaattgattgtcaatccgaaagacatcgtagagggcaagattattgtttctcaaaaagaagaaaatcacagaccttcaaaagatgttccggtagtacttgatacggaaggtccggacaaaccgtatattgcaacagccaaagaaggtgcagataagattatcgtcgtgccgagggacaaggatactgaaaaagtaactttgaaacttcccgacggaagagtcttaactcaagaaaagaaagactttacaaatggcacggcagtctttgaaatacccaagggtgttgaagcagacactgctaaagattatgttgcagtcgcctatgataagttcaacaacccgtctgatgaagcgacggcaacgattatctctaaatcggctgatgcagaagatgtaaaagcatccaacaagggagaaaatccgacgacgacaactgttgaaggtaagacgacgccgggtgcggaaattaccttaaaggatgccatgggcagacccatcgaaacggataaacccgttattgcagatcaagatggcaaatttactgcagaaatcccattgcaagataagggagcggtcgtcttcgtcacagcaaaagaagagggcaaagatccgtccaatgcagttccgacgaaggtctttattgacaaagacagcgacggaattgacgacgacaaacaagcgtcaaaaccggctgaagatgttaaagctcttaaccaaaacaagacggagcccaatgcagatcccacaaggaacgatccgaaggataccactacggtaacaggtaaggcggtaccgggatccaagatcaccatccaagacgaaaacggcaaggacattacaccggcagacggagtaaaagtcgatgatgatggcaacttcactgccgaagttgaaaaacaagagcccggaaaaatcgtgaaggtcatcgtcaccgaaccgacagcgaaagacggaacggaaaagaaaccatccgagccggtcgaagaaacggttggcagagatgccaacaacgacggcaaggtggatctggaaaagacggaaaagccgaccattgaaacggccaacaaagatgaaaactccgtatccggtacggcagcaccgggtgctgaagtaacagtaaccgtcacgcctaaaggcggagaacccaagacctttacaggcaaagctgatggagatggaaactacaaggtaacgaccgatcctctagtagatggcgataaagtggtcgtaactgcatccgaacccggcaaggcagacaacacatccgacgaaaaagttgtcggcgttgacacgtccaagctgaaagattccatcgacaaagcggacaagattgttacggacgatggtgcaaactttaagcctgatacaaacccggtcgataaagcattgaaagacgctttagataagggtaaaaaagttaaggaagccggcgacaacggcgatcccaacacgaatcaagcagcagtggacgatgctaaaaaagaactagacaaagccattgcacaaaaagaagccgataaagccgtggataacgccaaagacaaagtcttagatcccgaagcaaccgatgatgctaaaaatgaagccatcaaggatgcgcaagataagatcgataagatctcgggatctattacagatccgaatgcggcagactacaacccgatcaaaaaagaccttcaagacaagcttgacctcatcaagaaaatcaaagaaggcgaagatcggttgaaacaaccggacatcaaagataagccaaaacaagatgtcgatgacttgaagaaagcggttgaagacggcaaaaaagcccttgagacgaaagataacaaaaccatcactgaagcgacgaaggttatcgaaaaagccatcgatcaaatcaataaggaaagaatcaaagttggcgtcgaaagtttgggtcgaggcctagaaactttagaaattcggacctccgtaccgggtgccaccgtagtcattaagattggcggaaaaacaatcaaaaccattacaacaagctcctttggcacctactcgcaaggtttatcggaagggctaaaggcagatcaagatgtaacccttgaagccagcaaagtcggttataacgatggtatatatagtgagactgtagattaaagaaaaggagaattttgatgaaaaaaatcatgaccttgctcctcgccctggcattggtcctggggacggcaatcttgccgtctccggtccttgcaaagggaaattcgaacgaatttaaagaggcggattacaaggtagaaaaggaagacggtaggatctacaaggtctatgaatttacggatctggttggaacgcagcctcgtaaagatttgaaaaaatcaggtggcgtgaataccttacggctgaaagcctttaaagccatgaaagccatgaaacccatgcaaactgcaaaccctgctctcggagaagaaacagagtacagtgtggatgttcaatggaccacctatgaccttcagccgggtgatttagggtttcctctttattttcaaattcgggataagacaacgagaaaattcattgcccaaacagataatataaccgccgggggtgtacacaagttttacaaactaccggcatggaatgattcggatgttagtcacgatccaaaaaattggaacatgcgagccttcgataattacaagtttgatgtccgattaaagacaggagctaatggccacttatctacctctgatatggcagcacaaattgttcaacgcagtaaccctatttaccgggcagagtattacacaaacaagaccaaccccaccataaaagttcaacggacaaataagaataacgaaacagacgaagtctctattaatagtaaaaatttaggagacaacgagtattattcttgggcaaaacctgtttccggatatgtagatcaatattacgatggtaagaaattggagattgctaaagagcattatgggaatgacactttgaattccttggaaatttctgaagaaattaccgcaggccgttgtaggatgaaaatgaaggctccgggaaaaaccgagtttgaccgtggtcccggcacctttgaggacaatggtacgccctatcactacgaagtcactggcgaccatataaagacccacattttcaccattcgccaagacttaaaggtgaattttgatgccaataagggtacgtggaaatccgggaatgcgccggaagcgcaaaccattggccactccatgaagttgggtgattcttgggcaggtttaggtcctattaacgttcctaaggaagctgatttaaaagcaccggctgttgatgctggcaaaccagaaaagaaattcatcggctggaacaccgatgcaaatgcgactgaagcactctttacagacaacacctacgccacccctattactaaggatgaaaccttctatgccatctatgcagaaaaggcacaaggcatagcgaaggttaaatttgatcttgatggtaccgaaaaggatgcatctgaaattgatgcgaagtacaaaatcgaaggtcaagattatccggcagaattaaagggcaacctgggcgaaaagatcgcggatgcagtctttgataaaacgaaggcacctaagtttatcggttataaaatcgacaacattctgtcgaaacctgtaccgcctgtaggaaaaactgcaaattacacggaaaatggcgaattcagggtcatctataagtacaaaaagcttgatcctatcatccctgctaaggatgataatggtaatgacaatcctaaggtaactcctgatgtaaaggcgacttacaagcctgtaactatcaaggttgatagcaataagggtaaattccaaaagaatagcgctgacgtaaccggaagtgaatttgtttactatgtaaatcctgttgaaggaaaaaatcttaatgatgttttaacagcatcaggtttaacagcagtagcagtagatgaaaacaaggataagattgatacaactaaaccttggaaattcgatccaactcaaactgaaaaaacaaaatccgatccggccactgactttgctcttactactgttgtaggaaaagacaatgttaaagatactggcgtcaccatggaagtcaacttcaaacaaaccactgcggataagtttaaagataaacttgaccatcaagacatcaaagtttgggttggagatacaatcgactggaagaagggcgttaagcttaaagaagctaacgaagatcttcaaaagattttagacaaagctgaaactaaagttactgacgaaagcaacagaaattctgatgctgcaaatcttcccaaaggacaaaaaggcgacttaaaagttacgtttgaagatggttcttctttagatgttaaggatcaaacactttatgtagcacctcacaagaatgacgacaacacgaatttaccgaaagatgccgtaaaggttgaatttaagatcggtgacggtgtaacaggtacagcaaagactgaatatgttaaaccgggcactgacgttaaaggagatgcacctgcagtaggtgcaaaagaaggatttaaagatgccaagtggtacaaggacgaagcaacaacagaagcaaccgccaatgattacaaagtaacagcaaatgcagtcttcacagcaaaggctaccggaaaagataaagttgttaaacttgacgatccggaaaatccgaccaacttcccgaaagatcctactgacaacagcaaaaaagatgcagactatgtaactgtaaaattcgttgctgatgctaacggtaagatcaaggaaaatggtactgtaaaagaaaagggtattgcttacgcagtattgaagaacactgagtgggcagacgctgttaaaggtggagtagtagttccaactgaatttgaaggtactactaaattctacacattcaaagaatggcaaaaagatggaactaaagttacagaatttgctaaagtaggcgacgctgatgtaacttatacagctgtatttggtaaagctgatgaattctctgtaacttacaaactaaatgctccgaaaggtttaacagtaggaggaaatgctccgactgatacagataactacctgaaagatgatcaagttacagtaaaagctttagcagctgacaacaagctagccggctacaaatttacgggttggaacactcaagctgacggcaaaggtactgcttatgcagcaggtgctaagtttgctataaaagccaacacagaacttttcgcacaatgggaaaagaccgcaaaagatgtcattcctgttgacaatgaaaatgatgaaaaaggcaagaacggcgaagaaattccgaccaactatgtatttgtagaatttaaagttaaagatacagatgcagacaaagccgaaatcaaagctaatcaacaagctaagttcaaagttgatcctaaggctacagtaacacttacagctcctgaactagtagttaaagatgcttcttacactgctaaattcaaccaagcagactacacgaataagaaatttgcacaagcaacaactatctgggcagtggttgctgaaaaaggcaaggttactgttaactatgtattcaaaactgaccctgctgataagacccttcctaaggctcttgcagatttaaaacctgaaaatattactactcctatttatgaagacaaggtagtagttccggctctaccggatgtatcaaaagaacccgaaaaatccgctcttgttgagtctgtaaacggggaaaaggtaggcacctggtcaatcgctggcaattgggaaaagtcaagcgcaactcaaggtagcatcacttataccttaacctggaaatttacagaaccaggtcgttccttaactccgagcatcaatcccgtcaagcctgatgataagaccatcaccggtaagggtgagcccggatcagaagttaaggtaacgatccccggcgtaaaagatcccattaaggtgacagtcgatcaaaacggcgactggacggtagaagtaccaaatgatatccacctgaaagacggcgacaagatcacggcaacacaaaagacgaaggacttgaaagaatcttatccggcagaagtcacggttcaacgtgcaagacgtggcggcggatttatcctctatcccgtcactccggtggaaccgaagattgaaaccgccattcacaaggcctacatctttggctacgaagacagcaccttccgtcccgaaggcaatatgacccgtgccgaagcggcagccatgctcgctcgtctgcaaggcttggatacctccaacgatgcaagacccgactttgtcgacgtacgcagcggctggtacaatgcagtcatcaatgccgtcgtcaacgccggctatatgaaaggctatcccgacggcaccttccgtcccgacggtaagatcactcgtgcggaatttgcacaaatgatcaaatccatcgacaaggccaacaccgccgatatgcccttcgccgatgcgaaaggccactgggcagagcccgccattgcgcaagcttacgccaacggtcggatcaccggttatcccgacggaaccttccgcccggacaaccaaatcacccgtgctgaagcggtgaccgtatttaacaagctttacgatcgcagcgtggatgcagcaggtctcgccaatgttagaagcagcttggttgacttcaacgacacgaatagcagccactgggcatactatcaagtcatcgaagcatccaacacccacgaattctaccgcaccgaaaaaggcaaggtagcagaaacctgggttaagattattcaaacttggaaagatcttttagcacgcggctaaagcaatgaagaagaaccgagaaatttctcggttctttttttgtgtaaagctttagacgttttgattatctcattgtcagcgaaagctttggctggcaagaggaaagcctttggctcatggtttccaaggtatttttccatggactgtggtcattttattttaataaaaaaagggaaaatttttttgtggcaatatattgaagcggcattcacttcattaaaacatgaagcaaagcggaaagagaaaaattttttgtaatcagacagaaggatatatttttatatccttgttatttcaaggcttttcagggtagggtcctttgttcgggagactcttgaagaaaagcgctgcaaaaaaactgaaaaatgattcagtatgaattccgtgatttcatattcattttttgagacggagcctcggagagaaggcttgatttcaacgtttagccgcctttaagtattgaattatctatgagaaaggtctataatgatttcaataaataaaagtatacaggtatagaatacctcatcgaatgttgtattttctttcgcctttcggtgaaagctgtggtatttggtgtttacgctaataactgttttatcatacatttttcaatgaaatgcgctatacgcaataaaggggtggtttctatggtttacttctcgggcacttaaatgtgccgaaggattgtctgaaaggattcccgactcggcgattttgtcggtgggaatggcacatatgctttttaaagcttgtgagaacgcattcacaaattagggaggttatgatgagaagatttttagcgacacttcttgcaatcattatggtgattactgcgcttccgctacatactttagccgcaagtcggcagtatacggcagagcgcactgaagctccggctttaaagacgaagccgagaggcaccggtgaagaggtagtcagcaaccaatggcctacgggcaattttccgctgatgccaaactacagcggtcagacgcctaatgccaccggctccaccggtctcaagtacggcggaaccgttcgcggcaatgatggtgagtacattaatgttcaagtcactcaagtcggcaaagtttacgacgaaggcaacttcagcgcgagcaacttgagcaacgctgtgggctggtcccacttgattctgcactttgacccggtgctttttgaaaatctggacttggacaagtcaagcattacgggtcctgcaggcaccttttatctgaaattcagagcaaagggcaatgccgatatttataagaccgacgattactcggtgtccattcccatgacgagtattttcaaaaaggactggacaccccaagaagatcaacgggcaacgatgaagttgtacctgaaagatggccacaacttagtcagcggcaccaattatttaattgagcaccgcaccatgggcaaaaccaatgatctctattcccaaatttatattcgagattacatcatggggatcgaaaacacagacgtccgagcctttgactcgccggcttatatgcaatacaccggcaacttgaatgttccttacaatacggtaagcaatccgccaaagtattcaagctaccggcaagatgtgatgtcaaatgcctactcggatgtctacatcgattggaatactaacgagctccacgttaactacgtttatgagacgacagaagatattagagcccatgaccgtacccaattcgtgcaattgttccctgaaaaattaaaggaagccttagcgccgcgaaacggcgtttacgccaagtttaaccacgtgtataaacggggtgacctggcttggggtaatgacagggggattgcctttacggacttgaattcgtttgcgggaacgaaagatggcctggccggttatcgtctgcgtattccgaacaatgtctccggctacacccacccctggacctgggttaccgaaacgacccaagcctacggaagcaatttgagtgccagcaatggccgctacatggcctactccaagacccatggacccattgccaaccacatgatttactacatcgatccggataagttcatgaaagcttttgacaatctggacgatttacaattcagctctttctttgtcacaagaaatgataatgaaattgaaggcggtgtccttaaaaactccgagtccatgaactctctcgccgtcacgaagaacatgaccaattcgccgcaaatcgacgatatttataccgacgatcagaagattaccggggacaccggctacaacaatgccaacagcaatgttttcgtcgtcgccaagaatttcaaagacccggcgaagaccaagacccgattggtcaactccgacggaaaaatcgaattctatccgcaaaactttgacggcgttttcgacaatatgcaaaaggacgacaagctctcctttgaaaccatttaccgttacgccaactactacaaatcccgtcccaccatcgaaaaggtaaaagcgcggattatcttcgacaagtacgacggcgttaaagacaaagccgtaaccgtaccttcctcggataaattcagaggcgaaaccggttatgtagaaaacggtctgggcgaagccaagatgcccgaaaaccccaaacgcgacggctacatcttcaaaggctggtccacgaaaaagaccaccgcaagtgaatttgccaaagcggaaaaactgacgaaggtcgaacaatggaacgaaggcaaggcctatcaatttgacggcaccgtacccgtcaacaaatcctatcgggtctacccggtatgggaagaagaaagcaagggcattaccatcgtcctccacgccaacgacggcaccaatcgcgaaaagaaaattgagctggcctacgacgaaaaattgccgactaaggcaaccatggacggcattgcatccatggaagaacaatacggcgaattggccaagggccactactcttccttagccaaactgccgaacggctatgcgaccaaagacggcgaacaagcagtcttcggcaagcgcgccggttacaacctcgtaggctggtctaccgttaaagacaacagcaatgtaaaaatcgaagatctgtactccaatatggggatgcttgccaaagatggagaaggtaaagacgggaagtactacttgtccaccgtccgcaccaaagcgcaaggcatcggccaagcggcggcaggtaagctctttaaacaaatcacgccggacaaaaacaatgaagtccatctctacgcggcgtggaaaccttactttgacgttaccctgtccaagtcttggtacgactccaccaaaccggaattcaaggataaaaccgtcaaggaaatcctgcaattcctggctcacggcaaccaacaacaaacgccgccgtcggatgcgtccttggcagaacccattcaaatcggtctcctttaccggacggccgttaccgaagccaacgacccgaccattaccggtcaagccaactactacttggtcgacggcagtctgcaagacttaccgaaaaacggcggtcccttaaaatggaacctgccatcctatgacgcctacggcaaacggctttcctacattgccgtagaatttgaacaaggtcaatccggtaaagacaagtacaacggattcggtcaaaaatggaccaacatctgggcctccgtagcggacaatctccacaaaaagcccggcgaagtttgggacaacgaatcaatttccaaagttcaaaccctggttgtgcccaagggcaatggcaaagtggatgccttctcaggcgccacggttcgtaaactttacgaagacggcacggccatcaccgaaactcaagccaataactccactgtcggcaccaagcccgcttatgtaaccaagttctacaatgtaaaagtcaacttggccaacccgatctttaagaaactttacaatgaagacaaagaagtcaccttaaaggcgccggaagatccccgcgtacaagttgtggaatttgatctgccggaagtcgctgaaaagattattttcaagcgggacgacaccgacaaaacgaaatggaatcgcgtcaccgtcaacaaaggcacgggtaaatgggatgcttcaaacgaaacaaactatacccttacggaaaaagatgacggcggcgaaaaagtactggttctcaagctggatttggaaggtaagaacagatacaaatatctgaaaacaggtcaagaggtaggcgcaacctactacagcgtgaccgtaaacgacaaatccggcaccgccgtcgaagtcgttcaagacaaaaaagatgccccgtccttaaatggtttggaacaagatgttcttgaaactaaaaacggggaagaatacgtggtcatcaaagccttggcaccgaccaaagaattggaacaattccaagccggcgccgtcctcaccctcttcgacgcttcggctgaaaagggcaaggaaaaggaaaaagcctacaagaacctggacggttccgacgtcaccggtacccgcgaaggaagctactacgtcttccgcgtacctaagtccaagaacccgggcttggtagacggcagcaacgtagcggcttacgcagagcaggaaggctacaagccctctcgctccaccattccctgtaaagtagacttaaagggcccgggcatcaccgccgataagcttaccgtctacgcaggggaagatgtgaatgtaccttccgccattaccaccgacgaagacgctttgcttacgagctttgaaggcttgccgaaaaccatgcgtttaaccaaggaacaagcgaccaaacttgctaccaagtggaaagccaccggtaaagccggcgacaccaagggatccagcacggtcaccttggtcatgacagataaattcggcaacaagacggaacaagattggaccgtggaagtggtcgaccgacccacctcggacaatgtaaatagcgccgtccaagtacccaataagattagcaaagactacagcgaatacagtcataagattaaaatcgcaggcggcaaagtaggtaccaccctcaaggtttacctggccgagccgaccaatgccacagtaacagcgccggtcactgtgccctgcactgaagccgatcaagaaatcttcatcagccaaggcgtgggtacgaacattggcgacaaagtttggattacccaaactgaaaaagacaagaaagaatccaaagccctcgtcgttcctatggacgtcaaggcaccgaattctcctacagtcgaatccttgccgccgggtgaaaaaagcctaacgctcacaggcattaccgatgacacgaccaagatctttatccgcgtcggcggacaagaaaagaccctgactcgcgataaagaccacaccgatctgtggaaagatgataagtttaacccgcttatcatgaaagaaggcaaactcaccgtcgaattcaaccgcattttcaatccggaggacaaggcgcaagtcatcgtcttggacgatatgctgaatcctcggtccatgattaagatcgttgaagactacgtcgcaccggatgcgcccaccatcgtcgctgaaaacaaagatgcgaacacgaccaccgtcagcggtacgtcgaaaaacccgggtgctgcggtaaccattttcgaaattaccaagattacagatccgaccacgggcgaagaaacggaaatccgcacgcccatcggcaccgccatcgtggataaagacggcaagtacaccacctatatccgtcctgccaagaaagttggcacggaagtaggcgccgtcgcaacccaacacggcaaggaaagccccttagccaagaccaccgtgacggaaaatgcgggcatcatccccttcgatcccaacgatcccaaaccgacacccaatcccgatgacaaacgttacgtcaccgtaaccctcgacgccaacggcggccaattcgcccaaggtatcaaatcttccttctacgtcttaaagacctatgtagtgaaaccggcagactttgaccaagctcgcctgggcctggaagcaccggccaacaaggcctttgacaagtggacggaagataaggaaaatacaaaagaatttaccggcaagacctttgctgaaaatgcaaccatctacgccggctacaaggccaacgacaacgtcattcctttcgatccgcaagatccgaacaaaccggacaatccggatccgaacaaatacgtcaccgtcagcctcgacgccaacggcggacatttcgctcaaggcaccaagtcttccttctatgtaaagaagacctacaccatgacgacaaacgactttgccgttgcggaaagaggactgaccccgccgaaagacaaggcctttaacgcatgggctcttgataaagaaggcaccaatgccttcccggcaggaggacagaaatttgatcaagacgcctctgtctttgcgcaatacagagaaggccgcgacgtcatcccgggcaccggcaacgacaagcccgatggctacgtcaccgttaccttcaaggccgacgcaggccaagctacgctggaaggcgaaaccacctattacgtcaaccccaagggcaatgtaaaactcggcggcattttggcaccgaaaatcgtgcctgttacaggatacgccgtcagctaccccgcctggacctactctgacaatcaaaatgcggcaagcattgtaatggcagataccacggcaacggcaagtctttacgacaaggataaagttatccccgttcaagatggcgtaaacgtcaccaaaccggcaggctacctggacgtcgtattcagcgcaggaaccaacggcaaattggaaggcacgtcgaaattctatgtgaaaccgaatacgccttcgaaagacgtaccggcaccgacgcccatccccaatgccggctacaaggtaaaggccgaagcctgggatcccttgattccaactgccttcgacaaagactttactaccaccgctcaatacgaagccctgcccgatatctccgacacaccgcaagccggctacgtcatggttcaatttgacggcggcgaacacggtaaagtagtagaagaaacaggcaagaagaccatcatcttcgtcaatccggaaaaagaaatcgctctggataaaaaagcgcccaaagtcgtggccgacaccaactggtccttcgacaagtggagcgtcgacggcgcagcagtggatctcgccaaacccgtcaagtacacgaaagacacggttatcaaagccacctacacctcggatatttccggcgaatccaaagacggcttcgtgctcgtggaatttaaagcaggggataaaggtagcattgcaggcggcaacgccaaggtctatgtaaaacaaaacaaagaagtggacttaaccgaaaaggcgccgaagattaaggccaacgaaggctacgtccacaccggctgggataaaccgttgaaagccacctttgcagccgctacggatatcaccgccacctacaacgaccccaaagacatctccacgacacccgtcgaaggctttaaacacattaccttcgccgacggcgaccacgtgaagattgccgagggcgccgtgaaagactactgggtcaacccggacaaagtcgtcagcctgcccgcaccggacgttaccgttgatgccggctacatgcacatcggctggaccgccaacctgactcaaaaattcacggcagacacgaccattacccccacgtccatggaatccacggacgtaacgcctaacaagaacgacaactacacggaaatcaaattcctggcaggcaaacatggtaaattagtgggcgtcgccgacaagacctactccctgtgggccaacccgggaaaagtggtcaccattcaaccgccgcaaatcgacgcggatcaaggatggcaactcaccggatggaagaacctggcaactggtgacatcgttaaagtcggagatgccattaagggcaaattcccgaaaaacggaagtaccccggttcaatatcaagcgcaatacagtgacttagccgacatttccgacaaaccgcaaaaaggctatgtagccatcacctttaaagccggtgaatttgccaagtttaaaggtatggatccgagtaagcgtgaaatcgcctactacgtcaacccgaatgccgataagactttaggtcaattgcttaccggcaacttcgccgaacccgaactggaatactacgacggttacaagcaaggcaagaccaagtggacgccggaagtggatggcgacattacggttaataaagcctggacctttgaagcaaatgttgtatccaagggtcaactgcccggcgatacgacaccggctcccaagaactggaagaccgtcgaattcagaatcttcgactacgacaccggtgtagcaacaatctccggcggcatcaccaagtatttggtcgatcccaaggaagaagtcaccttaacggcgccggatgtcaagattatgaaggcaggttactccttagacggatggaaccacgacctgaaagcaaaattcgaacaagacaccgtcatctacgccctcatcggcggcgacatttcgaccaagcccaaagacggcttcgtgaaagtcaccttcgcacccggtgcaaacgggaagtttgaagaaggcgcaacgactgaagtttatgtaagaaagaacacggaagtggacttaggcgctcgggcaccgaaggtcatcgccaacgaaaactacagccacagcggctggacattcggagcaaagacctatggcaccgaatctattaaagccaagttcaccgacgaaacgaacaccattactgcaacgtacaaccaagacatcatcgacaacccgaacacgccgcagccgccggcaggctacgcccgcgtcatctttaaaccgggcgaccacggcagcttcgtagccgggtccaaggccaacttcgatgttcgcatcgccgcgaaattaaccatcggcgatctgaacaaacccaaggtcaaggccgatgaaggattcttcttcaccaagtgggataagggcaacgataccctcatcactgagtccatgaacgttaccgctctgtactccggcgatattatccccggcaccgatcccaataaaccgccgcaagaaggcttcgtaagaatcaccttcgcccccggcaccgacggtaaattcaaggccggcgaacccaccttctacgatgtaaggaaggacgccaacaagaccttgaaagacctgggtaaacccgccgtcatccccaataacggctacacccacatcggttgggacaaggcagacaccaccaagctggatcaaaacatgatcgtcttggccctctataaacaaaccgtcatcaccaatcccgacacgaccaagcccgtccccgacggctacgttcgcgtcacctttgacccgacggataaagggaccatcacctccggcaccgccacgcaagacgtcctcatcgccgccaataagaccttaggcgatctgaccaagccggcggtccaaggaaaaggcagcaatgtcttctccggctgggatacaaaagatgacaccaagctggatgaaaacattgcgaacagagccttgacggtaaaagcgctctacaacgacgatatgaagcctgtcgacgatcccgactccgacattcccaaaggctacgcccgcgtggtctttaaggccggcgaacacgggaaatttgcccaaggcgaaaccaccgcttacgacgtcctgatgaagaaagacgttaagcgcaccttaggcgaagtgaagaagccgaaagtaacagcagctgacggctacaccttcaaggcttgggataaagcggatacgacggaattagttgtcaatgcgaaaacggaagtaacggcaacctataatcaaaacgtgattattaccgacgatcccaattcggaaattcccaaaggctatgtacgcgccacctttaagacagacggcaagggaaccatgacggcaaccattaacagcgtcgaaaagaccaacctttccgttgtctgcatggacgtcctgcccaagaccaaaaccgtcggcgacttgaaggccaacctgaccttgaccgccaaaggcgacaatgtatttgaaggctggtccaagcctgatgattacttggttgcaaacaatgtaaccatcgaagcccaataccaaggcggacaaaccaacaccccgacggccaccgccctcaatgtggggaaagataacttcaccaccattaaagggaaagccacaccgggcgcaacggttatcgccaaagtaaacggcgaaaaagtcggcgaagccgtagcggacgacaagggtaactacaccatcaaggctaccaaggacggcaagaaattgcccgaccgcacggaagccaaggtcaccgcaatcaaggcaccgatgaccgaatcggaaccgcaaaccgtcatcgtcctgcccgacgccaatggcgacggcatacccgacggcgacttgcaagctccggcacaaccgaagctggatccgccgcggaccaaggacacccaagtcaccatgaaagtgcctacggaaccggatgcgaagaagattatcgtgaaagtaaccgaggcagacggcaatcccgtcaccaccgtcgaagcaatcaaagacggcgatgcttggaaagtcgatggcaagcccctgaccgtagacgatacggacagaatttccatcccgctgccgaataccaaactcagggaagaccaaaaagtcattgccaatgtctacgatgagtcgaacaacgaatccgaaccggccatcaagaccgtcagcaacaaagatcccttggccaaacctgaaatcaacacgccgaaacaaggggacaagaccgtatccggtacagcccccggtgcagaaaaagtagacgttattattaccaataaagacggttcggaagctgaaaagaaaacgaaccaaagcgtcaatgcagatggaacctttaccgtcccggtcaatgacttgaaagacggtcaaaaggtcaccgtcaaggcttctgccaaagacaaagacccctctgaagcttccaagaaagtgggccttgaactggataagatcaaggaaactaagaaagaagctgacggcgtcgtcgataaggccaaacaagacggtaactggaagcccgatggcccggacgccaatcccttcgacaaaaacttgaaggataagatggataaggccgacaaagtcattaaagatgccgaagacaatagcgacgccaatgacccgactcaagacgaaatcgatacagcggaaaaagaactgcgcgacgccctgaacaagaaggacgccgacaccaaagtttccgtagtggaagataaagtcaagaagggcgaaaaaccgtcacctgcagacattcaagctgcacaagaagccatcgataagatcgaaggctccaccgatcccaaggctcctaattacgacaaagataagaaagacctgcaagatcgactggacttggcgaagaaaattgtggaaggcgaagaccggctgaagaaagacgacatcaaagataaaccgccaaaagacgttcaagacctgaatgacgctattgatgaaggcaagaaggccatcgacgctaaggatgacaagaccaaaaccgatgccacgaagaaaatcgacgatgccattgctaaaatcaatcaggaaagaatcaaagttggcgtcgaaagtttgggtcgaggcctagaaactttagaaattcggacctccgtacctggtgccaccgtagtcattaagattggcggaaaaacaatcaaaaccattacaacaagctcctttggcacctactcgcaaggtttatcggaagggctgaaggcagatcaagatgtaacccttgaagccagcaaagtcggttataacgatggtatatatagtgagactgtagattaaagaaaaggagaattttgataaaaaaaatcatcaccttactcctcgccctggcgttggtccaggggacggcagttttgccatttcctgtatatgcatggggaaagaaagaacctgttacgctgtgtaacaggttcttttggttctacatcaatgattggggagtttagtgaaaactaggctcttcttattattttttggtgatttaatttaagaagtaattttcaaattggttgaacaaatgattttcaatcaactttcgtgccttaatatttgttaatcatggatctgaaaccaaggccaggtcatgctcgaataaaatcaccgcatcttacttcccagtctcttgtgctcttcctcgccgacaaaaatttttccgttttttctaaacacacacccttcctcctccagttcatttaaataccgatacaagctcctttttgggatggccaagagatcggccaggtcttctcgcttcaggggcaaggtggcggggaagggggctttggtgtttttatagatggcgtaggcgaggcggtcttttttcgacaggtgtttctcctcggcgttttgccgcatggtttcttcgctgaggctcgccaggtagcgcaagaggagcatgaggacctcgggcttttgaaagaggggatcttttaggctcaggctgtagtagcgcccggcggtaacggcttttacgccggagaggacggggctttcggtgaggctttcgatgaggcccaggcattggggggcggtcataaagctttgcaggatgcgactcccgtcttgggcgtagcgggacacttccacggtgccggattccaaaagcagaatggaaaattcggcgctgtcggggtacataagcacatcccccggacgaaaggcgatggccggggcgtttagcctctgaaaaagttcttgaaaattcatactttcctcctaaaaggtgccaagtggcatctttttttcttacaaataagtatacactgtagttaagaaaaaagggacgttatttgagacaggaggctattatggaacgctttttcaccatggacgaatttcatcaagcggtgcgggacgtgcaaaaggacacggcgcaaacttacgagcaacaaactttccgcctggcaaagcttgcggaaaacagtttggattatcccgtggccgatgacgacgccttttacgacctctacgccaagggggaaatttgcgatttagacgaaggccacgccccctatgcgccgcgctacattttgcccgattacgaaaagtttttgaaagaaggcagtgaatttttgcgcatcgaaccgccgaagacgctcatcgaagccacgacggcccttttgattatgtatcaccacgtcccgagcatcacccgcttcccggtctacatcggcgcattggacgatctcctcgagccctttgttgaaaagacgagcgaagacgacgcacgggcgattttaaagagctttttaatgcagctggaccgcacggtggacgactcgttctgccacgccaacatcggcccctacgaaacgaagacggggaatctgctgctggaacttttggaagagctgcaaatcgtgacgccgaacatgacccttctttacgacgaagaaaagacgccggatactttcgctgaaaaggcactggcctgcagcttgacctgcgccaatccggccttcgccaacgacgcttattacagcgccgatttcggcgaggtcccctacggcatcgcttcctgctacaatgccctgccgaaacacggcggcgcctttactttgagccgcctgcgtttgaacaaaatcgccttgggcgccgacagcgtggaatccttcttcgaaaagaatctacctcacgccatcgacaccatgctccactttatggaatcgaagattcgctatttggtggaagaaacggctttctttgaatccaatttcctcgtaaaggaagatttcatcgatataaacaatttcgtcggcctcttcggcatggtgggcctggcggaatgcacggaagcgcttctgaagcttgacggcgtggaaggcaagtatggcacggacgaggcggcggatgccatgggcattcgcgtcatggactttattcaagagcgggtcggccaatttgaatcggcctacagcccggtgtggaaccaccgctttatgctgcacgcccaagtgggtgctgccaacgacgaaggcaccacggcggcccaccgcattcccatcggccaagagccggatctttatacccacattcgccaagcggcgaagttccaaaaatacttcccctccggtgtcggcgatcacttccccttcgacgaaacggcaaagagaaacccgaaggcggtgctggatgtgtttaagggcggctttaagctggggaaccgctacctttccgcttacaacgacgacggggatctgatccgtgtcacgggctacctcgtgaagaaatccgacgtggaagcctttaaggcgggcaagcaagtgtcctacgacacggtgcaatacgccgccgatcccctgacaaaatacggcattttggaccggaaggtggaaggggtttaatgcttctcgtcaacaagctgattcccatgagcgtcgtggacggtccggggaatcgctttgctattttcctccagggatgcaatttcaattgcaaatactgccacaatcccgagaccattcaccgctgcatccactgcggcgactgcgtggccacttgccctgcggatgccctttctttcgcgggtggaaaagtggtgtgggatcccgtaaaatgcgtggactgcgacaagtgcatcgccacctgcacccacggggcctcgccgaaggtgcgggccatgagcgccgcggatttaatggcggaaatcgaaaaggccatgccctttatcgaagggatttccgtgagcggcggcgaatccaccttgcaggcgaaggagctgatccccctctttcacatggcgaaagaaaaaggcctcacggcccttatcgactccaacggcggcctggatttctccaagggcgatttaaaccgcctcctcgagatttccgacggggttatgctggatgtgaaggcctgggagaaggaagaccaccttcggattacgggccgggataacgaaccggtgaagaaaaacctcgcctatctcgccgaagcggataaaatcgaagagttgcgcttcgtgctcctggacaccttggacaacgaacacagcctgcgggaagcggcgaaggtgttgggcgaaaggattcacaccactcgggcgaaacttatcagctatcgccatttcggcgtacgaggcgaattcatcgacgagcttcgcgcccccgatcgagaagaaaaagaccagctcttggccttggcgaaggagctgggctttcatgaagtcgtggatatttaaacctgctgtttcggcaggtttttttgtgccgtgaattgagggtgttgattttatatagggggggggtataatgaaagaaagaaggatcgagaaaaggaggttaacatgaaaaaattactcggtttggcactggccctggccatgattcccggcctggcctttgccgctgaacccatcaccctttatattaacgggatcgacgcgagagactacaaggaacagcccattgtgcgggaggatcgcctgttccttcccgtgcgaagcgtcacggaagccatgggcgtgaaagcagattgggacaagaagagcaagaccgtcaccgtcggcgatgttaaaatggtcgtcggcgaaaaagactatgtggcgaagggcgaaaaaaagaccatggacgtggccccctttattgaaaaagatcgcacctacgtgcccgtgcgctttttggccgaggggatgaagctccccgtcacttgggacgaaaacaatcgggcggccgtcgtcggcgagtacaagagcgcgcccgcctttacgccggagaagaccgtgacctacggcaatgtgactttctccctgccgaaagattgggaaaaacagctgaccattacttacgcttataatcaagtgaccttttacgacaaaatgaatcacgacgctcaggacggctacggccgcatcggcgaaatctataacacggcgaatcccgactatcccgtgcccgccattcttctggctaagggcaattgcttctacaccctgttcactttttcgagcgacgtgcaggtggcggatacggggaacaaaaagctttgtgacagttacacgaaatctaatcaactggtgcgggaaattttaaagaccgtggaaataaacgacgtatttaaggaagccgaccgcgtgaaggtgggcgaggtgtccatggtgcttcccgaggcctacaaagacgtgatcggcgtggaagaagccggcggaaatgtgttgctctttgaaaagaccaatgaaaaggcgaaaaagggcagcggcctcatcggcaccttccgcgtggtcaatcaaaaggaattggagaaaatagaagaggactaccgcctgttccgatacaataaagacggcagcctgatcttcgtcagggcggataagccgagcctgaaggatccggttctgaaaaaagcctacgaagaaggtgtggggaaagcaggagacattctccagaccgtgaaataagaagaggagccgaggggctccttttttgtttgacttctattttttcctaagatacactgaaacggactagataaaggaggacgaaggaatggagagaatcgatgcgcgacaagcggcgcgactgattaaggacggagacactttggccgtatcgggctttttgttggccacgacgcccagcgagcttttgcgggagatcggcaatcgctttttggaggagggccatccccggaacatgaccttgcttcaggcggcgggcacgggaaacaacggcgacgaggggattatggagatctctcaccggggcatggtgcgccgctatttaacggggcacttcgctcgcaatcgccgcttggcggaacaggcgtccaagcacgaaatcgaggcctataatttcccccaaggggtgctgtcgaaaatgtatcgggctctctcggcagggcaaaagggcgtgctcaccaccatcggccttcacaccttcgtggatccgagggaagggggcggcaagctcacgaacatcaccacggaagatttggtggaagtcgtcaccttaggcggagaagagtatttgtactacaaggcccagcctgtggacgtagccattattcggggcaccaccgccgacgagcaaggcaacattactatggaagaggaatcggggatcgtcgatgcccgtgaaatcgccatggcggccaaggcctgcggcggcaaggtcatcgtgcaggtgaagtacacggcggacagcaaatccctggatcgcaaccgcgtggtgattcccgggattttcgtggactatgtggtagtggccacagagcctgaaaagacccaccgccagaccgtggccgaatattacgatccggccatcgccgggcacacgaagcggcccgtggccaaggtgaaggacgcgcctttggacgagcggaagatcatcgcccgccgggcggccatggagattcgcccgggggatgtggtgaatttaggctacggcatgcccgaggccgtgggccacgtggcggcggaagagggcctgagcgattccatcaccctcaccttggaatgcggcattatcggcggcgtgcccctgggcggggcgaatttcggatcggccttaaatgcccacgccgtcatgcccatgagtcagcaatttgatttttacaacggcggcggattggacgtggcctttttgggctttgcggaagtgaacggaaaaggcgacattaatgtgtccagcttcggcgggcgcttcgccggctgcggcggcttcatcgacatctcccaagccacgaagcggattttcttcgtaggcacccttaccacggggggcctggtagaacacgtggaagggggcaagctcgtcatcgacaaagagggcagtcgcatgaaatttatcgacgccctgccccaaagaacctttaacggcgcctacgccttggaacagggccatgacatcacctttattacggaccgctgcgtcatgaagcttacggaagaaggcttcctcattacggaagtggcgccgggggtggacatcgagaaagacattgcggcccacatggcctttccgccgaaagtggcggcggatgtgaaggaaatggatccgcggatcttcgcgccggaaaaaatgcacttggcttaaggacggggaaccgtcctttttttgcgggcgaaaacccgcctcgcaaatgtgcaataaaaaaagaccgccgaagcggtccgattattagttcaaatggtctttcatgtaggcgataagggccttgtcgtcgatttttcccgtgccgttggtgggcagggcgtcgtgaatcacgatgtatttcggcaccttgtacttcaccaatttgcggttgatgtatctgcgaatcgtgtccttgacctcgtcttcgtccattttttccaacagggagatgtggaggcaggcttcttcgcccataaaagcgtcccgcgtcgccagtacccgggcctgatcgataaagtccagttccttcaccacattttcgatttcaatggcggagatgttttcgccgccgcgaataataatgtccttggtgcggccggaaatataaaggtggcccgcttcgtctttgtagcccacatccccggtgcagagccagtctttttccgtgtagcggtttttgccgttaatgtagccgaccatgacattgatgccgcgaacgtaaatattgccgggataattgggaggcagttccttgtggttgttgtccacaatggccacttccacgccgtcgatgggggtgcccacgctggtggaggcaatttcttcgctttcgccggggcgcaccagggtaacggcgggggaggtctccgtctggccgtaggactgaatcaaatgctcgaagccgaaggccgatttgatggtttcatattcatgcggcgtcaaaggcgagccggcgataatgccgctctttaaggaggagaggtcgtagtcctccaaattgttgtggcgcatggccacgataaagagggtgggcacgccgttaaagaccgtgatcttgtagcgaccgatggaggccaattgattgtaggacttcacattatccaagatcaccacggagccgccgcacataaaggcgcacaaagccgtggccgacaggccgaagcagtggaacatgggtacgcagagcaagaagcgatccgtttcgtcccaaccgacgacttttaccatggtatcggcattggaaataaggtttctgtgagtgagctgcacccccttgggcacgccggtggtgccggaggtgaggagaatgcacgccacttccgtgggattatcggcaagctccaaactcagcaagtgggaataattgtagccttcgttggtgtagaggacgtggaaatccttgttgattttgtagaggtcgcgaatgtgttgggcataatcctgctggccgttggtcaccacggttttggcgccgactatgtccatgatttgtgcgatttcagaggtcgtaaaagaagggttcaccggcacggtgacggcaccgagcatttgcaaaccgaaaaaggtgaaaatccagtctgccgaatttttgcccataataagcacgtgatcgcctcgcttgatgcccgaggtggcgaagtacgcggcgaaagacagagaaatatggtgtaaatccctataggtgtactccttctccttatgtataatggcgacgcgttcgggatacatctcatgccacaaaaaaggcatgtgcccgagggtcttgttatagtccatggtgacctcctatgttttcgctgcagaaagcgttatctttttcaatgcgtgggctataaatgcttgtatacaagtaatactttactacaaatgaaatttttatcaagagaaaaaacagaaaaaagcagataaataccgtagaaaatctcgggggatgaattttttaaggcgagaacgggaaaactattgcaaaaattgcccgtggcgatgcaatttcattggaaaaaagtcggaaaagaaaaaacaggttaaacacggcttttgcgaagtgtgatagaatagattcgaatatggaagttggattattacacaatataaaaacaacttgcaattgtttttatgacatagtagactagtagacaagaaggagacgtgtatggaaagcaggaccaactcggacaccctgtatcaggcacttctggaccagatcatcgacctgacgctgtatccgggtatgggcatcagcgaaaacgctatcagccgtcaattcgatgtgtctcggtcggtagttcggagcgcatttgcgcgcttggtacaattaaaatttttagtcgtctacccgcaacgcggcacctacgtaagcttggtaaacccggtctacatacgcaaagccctgtttatacgggcggcagtagaaaaagaagttttacgcggttttatgaagtgtcccgttgataaatcagacatttacgggaagatggaggccaatttggaagaacagaggcgttttgtcggcgaaacaaaatacgtcgagcgcttccgccttctggacgaagagtttcacaactttatcttaggcgccaacgactcgcaagacgtgctgcacttattggacgatcaccttcttcatattgcccgatggcgcaatatttacgtcgacagcggcgtgtccctgtcgatcttggtggatcaacaccaccgcattttaagggctatcgaagcgcggaatttaaacgaagcgctggatgccacggacgtgcacattaacacggtccacgaattggttctcagcgatccgaaattttcaagttattttgaaaaggtttaggatcgttaagattgttaagtagtaattttgtcaaggttatggggatgtttagtcccgaaggacttgaaaggaaggatcagatgacagaaagcagaaaacttttagaaggtgtaaaggttgttgaactggccacatttattgcagcggctacaaccggtcggttcttagcagacttaggcgcagacgtcgttaaaatcgaacaaaaaaacggcgacccccttcgctacactgccccttctgaaggcagacccttggatatgcacgaaaataccacttgggaattggaaaacggcaacaaacgctgcctctctatcgacacccgtacggaagaaggaaaagaaatcctcttcaaattattagacgaagccgatatcttaattaccaactggcgtaccaaagccttggttaaatccggcttggattacgaaaccttaaaggtaaaatacccgaaactcgtttacggtatttgcaccggctacggcgaatacggcccggacaaagaccttcccggttttgactttacctctttcttcgcacgtggcggctatttggaaacattgagacaaaaatccgatgtccccatgaacgtcgtacccggcgtcggcgaccacaatgtcggcatgaacttagcagccggtatcttggcagccctctatcatgcaaaagtgacgggcaagggcgaaaaagttgaaaccagcttgttcgaaaccgccatcttcaacatgggtatgatggttcaagctgctcaatacaccgactacggcgaaaaataccccatcgacattcgcaattccccgaaccccttcctggcttgctggaagagtaaagaaggtcgctacgtacaaacctgtatgcccgactacaatacctatttcgaacgcttcatgacggcattgggcctcacggaattcttaggcgacgacaaagacaagtacttccccgtacaaaacttaatcgaaaacggcttaggaccgaagctttacgacgccattatggaacgcttcgaaaccaagaccatcgccgaatggaacgaaatcttagttgaagcggacattcccttcgcattggcaaagaactgggaagaactcctggaagacgaacaagcttgggccaacgactgcttccgcaagatggaataccccagcggcgaacgcattctcgttaaccaaccggttcgttaccacgaaatgggtaaaacgccttacgaaaaaggccccctcattggcgaacacaccgtagaagtcttaaaagaactgggctacgacgacgccaagatcaaggaactcatcgaaagcaaaattgcttacgaatgggataaataagctgaacgaacgatactaagaaattagaaggatgggaaagtggacattataaccatgggcatcgacatcggctccacttcttcaaaagcagtgattttgaagaacggaaaagatgttttggcaaaagaagtggtcagtttaggcgcaggcaccaccggtgcacaacaagtcatcgacaaggttgtcgccgagacgggcctcaagagagaagacatcgattacctcgtagccacaggttacggacgcaactcctttaaaggggcggacaagaccatgagtgagttgtcctgccacgccaaaggcggcgtcttcctgtttggcgacatcggcaccattgtagacattggcggccaagacattaaggccttggccgtcagagacgggatgctgcaaaacttcctcatgaacgacaaatgtgccgcagggaccggccgcttcctggaagtcatggcccgcgtcctggacgtgcacatcgacgatttaggaaagctcgatgccgaagccacggccaaagcgtcgatcagctccacctgcacggtgtttgcggaatcggaagttatctccgccctggcaaaagacaatcccattcccaacatcgttcgcgggattcacgcctccgtggcgacgaaagtggcaggtctggcacgcagagtcggtttaaaacaaccggtggtcatgaccggcggcgtctcgagaaatcccggcatcgtacgcgcattggaagacgaattggactgcgaaattaaagtttcagaagattcgcaactggcaggtgcattaggcgcagcactttacgcctatgaagcttgtcaacagaaggattaaggaaggatggagtatgtctaaagaatcgttaaaagaaagagaagcgcaaatcagagaacagtataaagacgttccgccggcaaaaatgatcgccatgatcgccggcaacggctacaaggaagcagcagaagccaaggccgccggcgaaccggtgggctggtgtgcatcgaacttcccccaagaaattctggaaaccttagacattaaggtcgtatatccggaaaaccacgcagcggctgttgcagccaaaggcggcggggaacgcatgtgtaatgttgccgaagacgaaggctattccaacgacatctgtgcttacgccagaatttccatggcctacacagaagaaacggacattcccgaattgaacatgccgcaacccgactttgtcgcttgctgcaacaacatctgtaactgcatgatcaaatggtatgaaaacctggcaagagacctggacattccctttatcatgatcgacgttccctacaacaacgaatacgaagccggcgaagaccgcgtcgcttatttaaagggacaattcgacgtcgccattaaacaactggaagaaatttccggcaagaaatgggatcaagaaaaattcgaagaagtcatggaaatctccgacagaaccggtagaggatggctcgacgccacggcttattccaaatacaccccctcgcccttcaacggtttcgacattttcaaccacatggccgttgccgtttgtgcaagaggtaaattggaatccgccatcgctttcgaacgcttggctgaagaattcgaccaaaaagtcaaagacggcgtctccggcttcaagggcgaagaaaaataccgcatcatcttcgaaggtatcgcttgctggccgcacctgcgccacacctacaagggccttcaaggcgccggcgtcaacgtcgtcggtaccgtttatgccgacgcattcggttacgtctatgacaacaccagggaattaatgcaagcttactgcggcacccccaatgccatcagctacgaacgcgccttagatatgcgtctgaagctcgcagagcaaaacaacgttgacggcatgctcgttcacatcaaccgctcctgcaaacaatggagtgccatttcctatcaaatggaaagagacttcagagaaaagaccggccttcccacggcgaccttcgacggcgaccaagcagacccgagaaacttctccgaggcccaatatgacacccgtgtccaagggctgatcgaagttatggaagcgaacaagcaaaagaaatcgaaggaggcataaggatgagcgcggtagatttaattcaatccttagaaattgatgccctgaaagggatcgatcgctatgtaaacgaaggcaagaaagtcatcggtatttcggcaccgggcgttgttccggaagaaattatccacgccgcaggcatggtccccattaccatttggggcgccaaaggcgaagtcgtagaaagcaaggaatacttccccgcattctacgcctcggtgatcctgagaaccatggacttaggcttggaaggcaagctggacaaactctccggcatggtcattaccaacttaagcgacggcttaaagggcctcagccaaaactggaaacgcgccatcgacgtgcccatgctctacatcccctacggccaaaaccgtaagatcgaagccggcatcgtcttcaacgaaaaacaattcctgcacttcaaagatgcattggaaaaaatcgccggtgaaaaaattgccgacgaaaaaatcgaagaagccatcgtgctttacaacgaacacagaaaagccatgttggaattcaacgaattggctgccaagcacttaaacaccattacgccgctgttgcgtaatcgcgtattctccagtgcctatgtttatgccaaggacgaacacctcgaaaaggtaaaagccattaacgaagcacttcgcgccatgcccgaagaagaatttaaaggcaaaaaaatcgtcaccaccggcatcatcgccaactcggaagacatcttaaagatcttcgaagaattcggcttcggcatcgttgacgacaacgtcatccacgaatccaatcaatacgaagcctcggcaaaagaaaagaccggcaacccggttcgcgccttggccgaagtatttgccaatatcgaaggcaacaccttcgtcttcgacgaaaagaaactcagaggccccattatcgcggaaaaggtcaaaaaacacggtgcaaacggcgttgtctatctcctgaccaagttcagcgacaccgacgagttcgacttccccatcgtccgcaaagacttgcaagccgaaggtattcccatgaacatgatcgaagtggatcaacaaatggtcagcttcgaacaagcgaagacggcacttcaaacttttgcagacattatctaagctgtataccggtgtcccgtgtatataaatttgtttagccgcccccgagagggggtttcggctgaacggtaggaaaactatttcacacccaagaagaaggaggaaacaatgttaaaaatcagaagtacctgtaacaaaaactacgttgaaaaattcggcgtggaaagaccggcagactgggactacaagtacattaattatccctgctccgacgaagaattagcggaacaatgtaaagacgctgacgtcatccactgcggtcccgtcgatttcttcagaaaagaagtcatcgacaaattggaaaacgtcaaattgatccaatccttaggcgtcggcttcgacaagatcgacttagaagctgctaaggcaaaaggcatctacgtatgtaacaaccgcggcgttaacgctcgccccgtcgctgaattggccatcggccacatgctcaccagccttcgcagaatgcccgaagcagacatgaagattaaattaaaaggcgctgaaggcttcaaagaaagctacaaagaatttaccgaaaagggacaagttgaaatgggttcccgcgtcgtcggtctcgtcggcctcggtgccatcggtcacgaagcagttaaattattaaaaccattcggctgcaaaatgtactactatgacgtcttccgtcaagaagaattcgaaaaagaatacgacgtcgaatacctaagcctcgacgaaatctacgaaaaatgcgacatcatctcctaccacgtaccggtattggattccacgcgcggcatgatcaataaagaagccatcgcaaagatgaaacaagacgcaattatcgtaaacgttgctcgcggcgacttaatgaacaatgccgatgttgctgaagcattaaacgcaggcaagatcttcgctgccatcgacgttatcgcaccggaaccgccgacagcggacgatcccttgttccacttaaatgaaaccggcttggctcgtttctccattacgccccacattgccggtaccaccgatgattctttcatgcgtatgagccaatggtcctacgacaacatggcaagaatcgaaaaaggcgaaaagcccatcaacatcgtaaacggtctgtaatcgtaaattcaggctacgaacacagaagcccgaaagggctaaggagtgcttatggaaattaaaagaaaagacataatcgtctgtggttttgcactatttgccatcttctttggcgcaggtaacatgatcttcccgccctacctgggcgtagaagccggtgaccgttggttcaccgccgcactcggcttccttctctctgacccggttcttcccgtactcggcgttatcgtcaccgcacgtttaggcggacgggccatcgacctcggaaagcgcgtcggttggaaattctcggctgttatttcggctatctgtattttaatcatcgggccgttcttcgccgttcccagaaccggtgccacgacccacgaaatgtttattgcaccgaaccttcccagcgtacccccgttggtcacttccgtcgtcttcttcggcttgaccctgtacctggttcttaaccccggcaaggtattggactacatcggccaattcctcacaccgggcctgttaatcatcctcgcggttattaccgccgtagccattgccaacccgccggcagcagccattactaccgacaccccggaactcttcaaaatgagttttaaagaaggttaccaaaccatggacgcccttggggcatccctcatgagtggtatcgtcttaaccgacttgatccgccgcggctacaccgacgacaagagccaagttaaagcaagcatccaaatcggtatcatcgcctttatctgcttggccctcgtctacggctccctcgtttacgtcggaagtaccgtcagctctatgttcacaccggatatggaccgtaccgccatcttacttggcaccgtcgaaaccttattaggcggcgtaggtaaattcctcttaggtttaggtgttgcactggcttgcctcaccacctccaccggtttgacctctacctgcgggaacttcttcgaagatgttaccgacggcaaattacaatacaaacacatcgttattgtggctgacgtcatcgctttcgctatctccttaatcggcgtcgaaggcatcatcaaaatcgccgttcccgtactcacggctgtattccccatcgttatcttcttgatcctcgcatcgatctttgatttccaaatcaagtacaacggcgtcttcatcggcggcgtactcggcgcaggcgctatcggcgtcatcgaagccatcaacctgttctctcaaatgaacggcggcaatgctttgggtagcctcgttgaaaaaatcaacaccttacccttggctaacttcgcctttgaatggatcgtccccgccattatctgtgcggtgatcggcggcttcatcggcaaggcaaccggctttggcggtacccgcgaagacacctatcgcgaacaagccatccgcgaagaaaaacgcaaagcgttggaaaacgcataatccaccctgtcacttaaaagcaaaattaaaaaaaggagttttatatggcaaataaaattatgacctctctgggtaaacaaaaatccgttatccgtgaattggccggttttggcgcagaacgtgcaaaaatcgtcggtcccgaaaacgtcttgaacttctctatcggtaaccccagcgttcccgcaccgaaggaagtaaaagaagcaattttggacatcatccaaaacgaagcgccccaagcggttcacagctactccgccggtaacggtttggaatccacgagaaaagccatcgccgacaacttaaacaaacgcttcggcaccgactacaccgcagacaacctctacatgacctgtggtgccgctgcttccttaaacattgcattggcagcattgatcgaagaacccaccgatgaagtcgtcgttctcgcacccttcttccccgaatacaccgtctttatcgaatcccaaggcggaaaaatggttctcgtcgatccccgtgacgacatgcaactgcataccgaagacgtcgaaaaggccattacgaaaaacacccgtgccgtcttaatcaacacgccgaacaacccggcaggcgttatctattccaaggaagcattggaagaattggcagccatgctcgaaaagaagagcaaagagttcggccgccccatctatatcttaagtgacgaaccctaccgcgaactcgtcctcgtcgacggcgtggaagtcgcttgggtacccagcatttacgacaacaccgtcgtttgctacagctggtctaaatccttgtccttacccggcgaacgtatcggctacatcctcgttcccggaaaagttgaagacaaagaccttatgcccgctatcggcggcgcaggccgtgcgttaggttacgtctgtgcaccgactttgatgcaaaaagtcatcgaacgctgcgtcgatgtcgatgccgatgtcgaagtttacaagaaaaacagagacctcttattcgacggcttaaccgaaatgggctatgtcgtagcaaaaccggcaggcgcattctatctgttcattaaatcgccggacggagacagcgaaaccttctccgatcgtgcaaaagaatacgatatgctcgtcgttcccggcaccggcttcggctccaaggcattcatgcgcttgagctactgtgtcgacacggaaacctgcgaaaaatccctgcccatcttcaaagaaatgatggacaaatactatcgctaaaccctatggtgtaggcaaaacatctgaaaaaagcaaatccgggcttcggaaacgaagcctggaaatttgcttttttttcttgtgatgtttatgcatatgaggtatactggtatacaagaaggttttcatttccttccctgtgaccaaatcttatttagttggtaaaagacgcggcataaagcaaaaaacggaatttgccgggtgccgggaaaacgtccctaccaattcgacaaacgcaggctgtacatatgagtacagtgcagaaaaattaggaggaaaacatggaatttacgcaagagcacaaactcattcgggatttggcaattaaatttgctgaacaggaattaaccgatgacgttttggatgcagctgaagaaaccggctgtttggacctggacgtcgttcgcaaaatgggtaaagccggattcttcggcattaaagttcccagagaattaggcggcgccggcggcgaccacgtagcctacgttaccgttatggaagaaatcgcaaagaaaagcgctgtagcttccgtatttgtatcgagccccaactccctttgcggcgcaccgattcaattaagcggtacccccgaacaaaaagaaaaatacttaagcaaaatcgctaccggcgagctcatgttctgcttcggcttaaccgaaccgggcgcaggttccgatgccggcggcaccaaaaccaccgccgtattggacggagacgaatggatccttaacggtcgcaagacctttattaccggcgcgcccattgccgattacagcattatctatgccaagaccgacatgaaggccaaaggcagtgccggcatcaccgcatttatcgtcgacttaaagagcgaaggcgtatccttcggtaagcccgaagaaaaaatgggtatcatcggctgccccacctcggacatcgtactcgaaaacgtccgcgtaccgaaagaaaacatgttaggtaaagaaggcaaaggcttcaccaacgccatgaagaccttggacgtcggccgtatcggtatcgccgcccaagccatcggtgttgctcaagctgctttagacgaagccgttaaattcgctaaagaacgtgttcaattcggtcaacccattgctaaattccaaggcatcagcttcaagatcgcaagaatggccgctaaattagaagccgccaaactcctcgtttacgaagcagctgcagcaaaagaccgcggcgaagacgcatcgaagatttgctccatggctaaatacttctgctctgaaacttgcaacgaaatcgtctacgacgcccttcaagtacacggcggttacggctacatcaaagactacaagatcgaacgtctttacagagacgcgcggattacgtcgatttacgaaggtaccagcgaagttcaactcctcgttatcggcagccaacttttgaaataagagcatacaggaggttatcatgaatatagtggtatgtattaaacaagtacctgacacaacggaagtacgcttggatcccaaaaccaacaccttgatccgtgaaggtgtccccagcatcatcaacccggacgacttatccggtttggaagtcgctttgcgcattaaggaccaagatccggaaaacgtcaaagtttacgcactttccatgggcccgaaccaagcagaatacgcacttcgcgaagccctcgccatgggcgcagacgaagccatcttagtcagtgaccgcgcattcggcggcgccgacacctgggcaacatcctgtaccattaccgcagccatcgaacacatcgactacgatttagttatcgcaggtcgtcaagccatcgacggcgacacggcacaagtcggtccccaaattgcaagacacctgaacatccccgccatttcctatgcggaagatgtaaaagttgaaaacggcaaagtcatcgttaaacgtcaattcgaagatcgttaccacatcctcgaagccgacatgcctttgttgattaccaccttggctgaatgtgctcaaccccgttacatgaccattcgcggcatctacgaagcggaagaaaaacccattaccgtttggggtttaaaagacatcgaagacaaactcgacctgtccaacatcggtctgaaaggttctccgacccgcgttaaacaatccttcccgaaacaaggtaaggcagcaggcgtattgcttacagacttaaccgctgacgaagctgcacaagctattctcgcaaaacttaaagaaaaatacatcatttaagggggagaaccacatgagtaaagatatatacgtatttatcgaacaaagagacaacaaacttgaaaaagtcggtatcgaactcctgggcaaggcccgcgaattggccgacgatttaggtcaaaaagttgtcggtatgctcattggcgaaaacgtcaagggcgaagctgaaatcctcttccgccacggcgcagacaaagccgtcgttgttgaagatccccgcttaaaagaatatttaagcgaagactatgccgacatggtatacggcatcatcaaaaaatacgaacccgaaatcgtgctcttcggcgcaacctccatcggccgtgacttggctccgaacttggctgcccgcgtacacaccggtttgaccgccgactgtacgaaactggaaatcgacccggaaagcaaactccttcgcatgacccgtcccgcattcggcggtaacttaatggctaccatcgtctgcgaagacttccgtcctcaaatggctaccgtacgccccggcgttatgcccagcgttgaagtacaaaccgacgacggcgaaatcatcgaagacaaattcgaattcagccacgccgaacccgttgttcgcttaaaagaagtcttgaaaatcgaaaacaagaaaaaagacatcactgaagccaacatcctcgtatccggcggtcgcggcttaggcggtcccgaaggcttcgacgccttagacggcctggcacacgaactgggtgctgaaatttcttcctccagagccgctgtcgactccggctggatcgaaaaatcccaacaagtcggacagaccggtaaaaccgtacgtcccgaattgtacctggcattaggtatttccggcgccatccaacacttggcaggtatggaagaatccgacctgatcatcgccgtaaataaagacgaaggcgcaccgatcttcgacgtagccgacctcggcgtcgtcggcgacttaaacgccatcgtaccgaagcttgaagaactcatcaaaaaagaaagagaactgagcgaacaactctaatcgccggtttcgaaaaggcctcctgcgggaggtctttttttgcatgaaaaacccccggtctcgccgggggtgtggcggtttcgcggcaggaaggcgacaccatgatttagaaaaaacttcgcaccgaaaaaaagcttcgtaccggaaaaaagtttagcacaggaagagcttagggccgggaagaagcttcgcaccggaaaaaacttcgcacaataaaaaatccgccggcggcaatcgccaacggattttttataaatagacttatttaacagcttcggttaatacttcgcctaagcgcttaatgccttcttcgattttttcttcggacatgcagctgtagttcaggcggaagtggttttcttccgggctgtcgggatagaaagcgccgccgggtacgaaagcaactttcttttcgatggccttaacagcgatgtcgcgggcatttaagtgttcgggaagggttacccacaggaagaggccgccttcggggttggtgaaggtaacttctttcgggaagtatttcttcatggcgtcgaccatgatgtttttacggttgccgtaaaccttgatgatttcgtcgatgtgtgcttccaagtcgttgtcgtcgaggaattgagccaaaatcatttgcgtcgtggtcgaggtttgaaggtcggcaccttgtttaaccatgttgaacttttcgagtacttctttggctgcgttgaaccaaccgacgcggatgccggggctgaagattttggagaaggtacccatgaagataacgcggtcttcggtgtctaagctgcgaagagagggttgaatttcgccttcgaaacgtaattcgccgtaggggttgtcttcaagaatcataacgtcgtatttgtttgccaattcgattaaacctttgcggcgttccatggtccaggttttgccggaggggttttggaaatcggagatgacatagatgaatttgacattgtcatggttctttaattggttttccagttcttcaagaaccataccgtcttcatcgaggggtacttgaaggaatttgggttcgtaagccttgaaggcgttcaatgcgcctaagtaagtaggactttcaacgacgatgtaatcgcccggatcgataaagattctggccataaagtccagaccttgttgggaaccggacagaacttgaatgtcatcggcttcaacgtttttaacgccgactttattcatgcgggtaatgcagtgttctctcaagcgtttgtagccgtcggtggggccatattgaagggctgcggcgccgttttctttcataaccttgttttcagcttcgatccatttgtcaatggggaataattcagctgcgggaagaccgccggcgaaagagataatactcgggtcagccgttaaagcgagtagctcacggatttcagacgctttcagattgtccattctttttgcaaatttaggcattaagaactcctttcatcgtagaaaaaattgcgtggtaacgttttacagaattattgtatatcgtacattgttgaaagtcaatgatgttgtatggcccgaaatgtaacagacccggtaaaagccgtgatggcgggcataataaagaaaaaaatctttaatagggatggggcttttgatgacaaacgtatcatcgaaggcggacgaaaatctcacggaaataaacgacctgtcggcaaaaaaattcccccgacaaggcgggggaagggttattgcttcataaaggccaaggcggccgtcacttcggcgtaaatgccccatcggagggcttcctcgtcggggaaaaactgcggcgtgtgaatggcgtggcgttcctcgcccggtttttttacgcccaggttcaggaaggtgcccggtgctttttgcaggtagtaggcgaagtcttccgcgcccatggtgggggttggaagggcgacgacggattcatcgccccaggccgcctgaagggcccttgccacgatttccgtggccttttcgtcgttaataaggggaatgtagcccttgatgatttccacggtgcaactgcagtcgtgggcctcggcggtggcggtagccatgtgggtgaggccgcggcgaagggcatcgccgttggccaccgtgtcggatcgaatggtgccctcaaggatcatttcatcgggaatgatgttgtgcttgttgccgccgtgcgcggcgccgatggtgatgactgccggggtaaagggggagacgtggcgggccacaatgctttgcagggccacgatgacgtggccgccgcagacaatggggtccacgcagcgctcgggattggccgcgtggccgcccttgccccttaaggtgattttaaagtcttccacgccggcgtacataaagccggggcgcacgccgacggtgcctacatccaggaagggagagacgtggaggcctgtgacgtaatccacgccgtccatgaccccttctttgaccatgacttcggcgccgccgtctttttcctcattaggctgaaaaatcaggcgaatggtgccgggaaaatcccggtgcgcggcgaagtaaatggccgtacccaatagggatgccatgtgcatgtcgtggccgcaggcgtgcatgacgccgtcgttttccgaggcgaaggcaaggcctgtggcttccttcaggggcagggcgtccatatcggcgcgaatggctaccacggggccttcttttgcgcccttgatgtcgccgtgaaagccgccgtttgtgtagttgtgtacggggatcgaaagatccgccagcaccccctgaatgtagcgggccgtttccacttcttcgccgcttagttccggatgggtgtggagatggcggtagtgggcttttgccgcctccgccgcccgtagaatgtcttttttcattgtattacctcaccagtccgccgtaaatttccgaccgccgctcgttgtagagatcgaacatggccttggcttcgtctaccttgtttaaatccagatccacggtgtggatgcatgcctctgtgcccgtcatgagcacttcctcgcccatgggatcgtagatgcagctgcctccgccgcccatggcgtggtagtcggcaagcttcgtgcagttcaccgacacgacgaagcattgattttccacggcccgtgcccgagcgaagaggtgcatgtgggggatgcgtgaaaagccccaggccatgggaacgaagagaatttttgcccgccccatgacggcgaggcgcacccactcaagcatgcgcaaatcgaaacaggtgacgatgcccgcatccacgccgtccagttcgaaggcgagatttttatcccccggggtgaaaagttctttttccgccccgatggggaagagatgggccttgtcgtaggtgcctaaaagggcaccgttgcggtcgtagataaaggcacggttcgcccgacggcccttatcccacacggtgaggctccccgccacgaggttgacgccgtgggctgcggcaaaggccgacagatcccggcacagggcttcttccatgtaatcgtcgtcggctgaaaacttatccggataaaagcccgtgttccacatttccgggagtacgatcacatcgggatcatcttttaatgccgattccatggcgtggaaaatcgtctttcgattttcctccatgagcatggggccgatgggggcctgaataacagagactctcatgcccgtgcgtgtaagtgtttttccagaatttgaatggcgtttaatgcggcgcctttgcgaatgttgtcggcgacgacccaaagatttaagctgttttcgcaggaatcgtctttgcggatgcggccgacgaagacctcatctttgccttcggcattgatttgaaggggatagataaggttcttcacatcgtcttgaaggatgacatcgtccatggcttcgtaggcggcgcggagtttgtccaggtcgatgggcttttcgcaggtgacgttaatggaaatggcgtgggcgccttttaccggcacccgtacggcggtggcggtcacggccaaatccgggcggtggaaaatctttttcgattcattgaccatcttcatttcttccttggtgtagccgtcgtccaggaagtcgtcgatgtggggaaggcagttgaaggcaatggggtagggataaaattccggtgcttcgcccttgacgcccttttccaaatcggcaatgccccgcacgccggagccgctgacggcttggaaggtggtgtagacgattcgcttcattttgaagaggtcttccacaggctttaatgccaccaccgattgaatggtggagcagttgggattggcgataatgcccgccttgtcggaaatgtcccccgggttgatttccggaaccaccaagggaatgccgtcgaccatgcggaagtgggagctgttgtcgatgacaatggcccccgcttcggcggcgacggggcaaaacttcgcggccaaatccccgtccaatgcactgaggacatagtcgaacttgccttctctcaaggcttcttccgtaagctcttcgatgacgtgttcttcaccattaaaagtaaaggtctttcccgcactgtttttcgatgcgaacatggaaagttccagggggagtttcctttcttctaaaatactgcgcatggtttggcctacaagcccggtcgcgcctaaaatagctgtgcgatagatcgtcataataaaccttctttcttatgaatgagcaatgtttttcttgactatagcaaaaacactctagtatagtcaattcataaaatgaagagatgaaaagaaaggggaaaacatgaaactggcactaatcggattcggcaccgtgggtcgcggcgcctacgacattttaaaggatcgcaaagaggttttggagaagaccgtgggccctgtggaaatcgcctatgtggtggcctccgatcgcagcagaaacaccttggagcttgaaatcgacgagcccgtggtcacggccaaggaatacgacgaggtcctggccgaggtagactgcatcgccgaagccaccggcgccatggacatggcctacgactacatgcgccgggctttggaaaaaggcgtcggcgtggtgaccgccaacaaggcctgcgtcagcgcccactacgaagagctcgtggccctatcggaaaaaaccggcgcgcccttcttgtttgaagcggccgtcggcgggggcattcccgtccttacgccccttcgggccctgtgccttcaaaacgacattctggatgtgaagggcattttaaacggcacctgcaactaccttttaaacgccatgtttaaagacggcgccgattacaaaaacaccctcgccctgtgccaagagctgggctatgccgagcaagaccccaccgacgatgtggaaggctacgacacccgcagaaagctccacctcttaatcgaaatggccttcggtcacgtggacggcgacgccattcccactcggggcattgcccaaatcaatcaagatgtggtggcctatctcaaggcaaatgacaagaaggtgaagctcgtggcctcggcgaaaccggtagatggcggcatcgaagccgtggtggaaccggtgcttttagacggtgcaaacagcctggccattttgcccgatgccattaatcaagtgaatgtgaaaggcagctgggtcggcgacttggccttcaccggccccggcgcagggaaagagcctacaggcaacgccgtggtagccgacatcgtcgccgccgccacaaaaagcgccatgcccctgatgaaacgaggcgatgtgaaactcatgcccattcgcggccgctacttcgtggccaaagaactggaaggcgacttcgtggaccgcgtggatgaaggcttcacctacaccaagagcgtggcacgagacgaattgttgaagcaactggacaacgacaccttctttgcccgcatcgaagactaaaaagaaaagacaaacctcgagggggtttgtcttttttgcgtccacgaaaaaacgagcgccgaagcgcccgcttttatttttccttaatacgaatggcattgtgttcccgaatgtccttgcccttgacttgattcaaagcgccgatggtgttggttcgtttgatggaaatggattccctgaggcgcatcaaaaagtcgtctaaagccttggacgaagtggatttaatgcgaattaagaattggtattcccccatgagcttccaacagtcggtgacttgatccgaggtttggatgtagttaataaactcttccaatgtgttgtcttcctcggaaatgtcgataaggcagaaagagtggatgtaggaatcatcggcttctccgccgaggagaatggtgtagccggcaatgacgcctgcatcttccaggcgatggatgcgattgcgcgtggccgatacggacaagcttacctttttcgcaatatcgcttaaggacatgcggctgttttcgtttaatagagaaataatatatgtgtcgatagaatcaccggtaaagcgattgatgtgcacgatatgcacctcctttaatcaaaacaaatgggttaatgagattataccaaaaaagcggcgtaatttcactgagaattggaaaaaatttgcaaaaaagccacctttttttactttggtgtagagaaaatagaaaaggcgggccgaaagagacgttcttttgtccttttttccctttatttaatgtaagaacatgttttttcgactggttttgacagaggggatttttttcggatccgtttttttgctgataaacctttcttttcgcaatataaacggcacaaatcggcgttttctgcggattttacaggggcgtttttttgctttaacatggggcaagtgctaaaatgatcataactgtgaattctcgcctgaggatttaccgaatataaaatggaaaggggagtacgttggaacacttgattcgaagcgtcattgatttagacgaacgaaccgacgccatggttcgcaatgaagaaaaagccatcgacgacgaaaaggcggatctgcagaaacatttcacggaattggaagtagacgagcgggaagcgtcgaaggcatcggcgaaggaaagttacgataagatttacaacgaggccatggaagtggtcgaaggaattaaagaaaacaatcgaaaaaagttggagtcggtggatgcggtctataaagcccacaaagcggaattggtggaagaagcgtttcaactcctggacatttagtgggaggcgaatatgagttacgcggcagtcaacaccaaagccgtggccgtttacgcccgctttctcaagcctgaagtgcctctgaggattctggatgcgggaaacattaaagacggcctggcgattttggaaagcacttggggcttggaactttccgagaatccccatttactggaagtcaacgtgaaaatggcccacaaagtctacgacacgttgaacagcttccactattacttacagggaccggcccggcgcttttacaacgccatcttaacgcgctacgaaattcaggatttgaagcgaatctttcgggcggtgtaccacgacgaggatgtgaacattgtaagaaacagcgttctcgccttggaccccgccctgtttccgaaggatcagcccctgggtcccgatgaattatttaaaatcttagatgccaccccctacggacgtatccttgcgccctacaaggacgtctcccgggatcggattcttttttacatcgaaatggagctggacagaagctattacgagcatttaattaaagaagcgaaacagctgccgaaaaaagacagagcttccgtgacggccatgttgaaccgccgggtggatctgttgaatatccgatacatttaccgtggcaaaaaaacctacgacattttaaagtcggaaatggaaaacttcgccattcgcggcggcaacattcccaaaaagctcttgcagacgtggatttacgccgacgatgtggaagctctggtgcgctccgtgcgcgcctcctccttttctttcttgtttcaggaaaaaagggacaatcacatgaccgacattttggcgacgcgagatctcgccctgatgtatatgaaacagtaccaacaggcgggtttaagcctgggccgaatcgtggccctgtccatcttgatggaagatgccattaaagacgtctccaccacgctggaagggctccgactcggtttcggaaaagatttaatcaggagtctacttacgattcctatgaaagaaggtgaagtatggcagtagagagaatggtcatgcttagtgccgtcggccgaatcgaaaatctgcgggatattctcttcgagattttggattcccaggcactggatatggtcgatgccatgacgcaattggcggagaacagcaatatttactctctcgaagacaatgtggacatggtggtggatttaaacaatctggcgccttttcccgtcaatacggacatcagacaaaaggcccaagaggcgcaaaaattggtggactacttccatattaaggacttaaagatcaccggtttcgaagatgccgacagccttaaccgcaggtatcaggcccttttagatcgagtcgagcccatgcgcaaggagtacgacgcgattcacgagcgcctggaggccatcgccatgttcaaggagaatgtgtctctttttgaaaacgtggatgtggatttaaaccaaattcgggacatgaagtatttcacggcccgcttcggccgcctggaaaaatcggcgcgggtgcgcttgaaaaacagctacgaaaatcttctggccattgtgtttcacacaggcacctttgaagatgaagaagtgtacatgatcgtctaccccaacgaggtcgccgatgaaatcgatcgggtgttgaaatccctgcactggatcgacgtgcccgttatggaaaatgccatgggtacggccaaagaaaccctgaccaagcttgaaaaagaagaaacggatctctacactcgcctgtcggagctggatgaggagcgaaagaccctctaccgcgacgatcgggacaaggtgcgtgaaattttaggtcacatgctctttttgggccgggtggaagaagccaagcaacaaatggctacggccaaggaacacttcctcattacgggctggaccgacgaggccggcgttgcagaaatacgccgccgcacggaaaaattccccgatgtcattatcaccacccaaagtgaagaagaagcggctcagggcattaccccgccgacaaagctgaacaacccgaaattcttcaagcccttcgaacttctcgttcgcatgtacggcattccccactacaatgaaatcgacccgacgatcttcgtcggcattacctatatgctccttttcggcgccatgttcggtgacgtgggacaaggggcggtctttttcctcatcggcctgattctttcgaagcgccgacaaaaagacatgggcggcctcctcatgcgcatgggcgcatcctctgtggtcttcggctttttgtacggctccgtcttcggctacgaagatgttatcgacgccttgtggctcaggcccttccaaaacatcgagcaagtgcttatggccgccatcggcttcggcatcgtgctccttgtcatggcctacggcatgaattttgccaatgccattaaaaacaaagacctggcccggggcctcttcggcgaacacggcctcttcggctttttggttttcgccatgcttttagccatgatcctcgatgtggccggcatcgtgtcctttattcccatgcccgtggcggcgggaatcctcgtgttatccatcgtgcttatgatcttcaaaaagcccattatggcgaagattcaaaagaccgatgtggactatcaaggcaacaagagcggctacttcatcgaaagctccttctccatgatcgagctgttgatctccaccttatcggggatcgtgtcctttattcgtgtcggcgcctttgccattaaccacgtggggctctttatggccttccacgtcatgagcgaaatggcctcccacgatataggcggttacgtgatcttaattttaggcaacattttaatcatcggcctggaaggactcatcgtctttattcaaggcctgcgcctggaatactacgaattgttcagtcgctactacgacggcagcggacgggaattccgctccgacaatctgaaattgaaaaacaagcattgagaaggagtttattatggaaaaaatattatttttagcatccctcgtcgtcttatccaccattgcagccggcttcgtctttttggaacgaggcgtctccgccgaccgcgtgaaactgaaaaaagctatgcgcaccaatctcctcgcctttatccccaccgtcctcgccgcctatgtgctcctcgcaccgggcgtcgttcacgccgcaaccggcgcaactgaagtaaacggcctgggccttttggccgccgccatttccacgggccttgccaccatcggcacgggctatgccgtgggcatcgtcgggtccgccgcactgggtgccgtcagtgaagacgactccatcttaggtaaaaccctgatcttcgtcggtttggcggaagggatcgccatctacggcttgatcatctccattatgatcctgggcaagctctaatgatctcccgggtcatctctcgcgacgacgaatttctcgtcgcccttcgcatgagcggcttcgaaggcgtgttttgcagcgatacagaggcattaaacacccaattcgacgccgcccttgaagacaaaaacatcggcatgattatcttaaacgaaaaagactttcgcgcgttggaagagaaggttctggcggtgaaagagaaaaagcgcagtccctttatctgcacattgcccggtagagatggctactcggaagaagatttcattatgaaatacgttcgcgatgccatcggggtcaaactggattagtaggtgagaaaatgctgcaagtcgaaaacaaactggaaatattcgaagacgtcgtctacaagcggcgtctcgtggatttacaaaagcgcaaaaaggcttgggaacaggaaaaaaacagccttattgagcgcaaggaaaaacaactggacgaagaaaaagacaacatcgttcgtcgtcgtgcggagctcgcccgggtcatgggcaatgaaaaaattgccaaggccaaggaaaacgaacgtgtcttggaactgaaaaagatcaacgaattaaaaaaagacttcatcgaagccattcgcgagcgagccgtggaatacacgcggacgaaaaagtatgccgaggacctcgctgcccgcgtggaagaatccttgaaggagttaaagcccggggaataccgcttctccatggtggcggcggatatggatcgcttcttcgatggatttaaggtcatggccgaaggcatgggcatcacccttcacggagagacgctagaggatacgcgcatcggcgggcacaccatcagcgacatggacagaacctatagtttaaactacgatatctacaccatgatcgacgaaaagcgctacgccatcggcaagttgctctaccgcctgttccgagaggagatggaccatgagtaaagaagcgaaaatcatcaagatcaacggccccgtcgtcatcggacgacccatgggggatttctccatgcgggaaatggtgcaggtcggggagaaaaagctcatcggcgaagtcatcgccattcacggcgacgaaggcacggtacaagtctacgaagaaacagaaggccttatgcgggatgaagccattgtgagcaccgaaggccccctttccgtgcgtttgggcccgggcctgttgggcaatatgttcgacggaatcgagcggcccttaaaccgcatcaatgaaaaatacggcaactttatccccgaaggcatcggcatgatgaacttggatttggaaaagttgtgggcatttaaaccgacggtcaaagtaggggatgtgctttcaaaaggcgccgtcatcggcaccgtggaagagacggaaatcatcacccaccgcatcatccttccccccaacgtctccggggaagtggtgtggatcgccgaggaaggcgagtacaatatcgtcgagaccgtctgcaaagtcaaagacgaagccggcgaagaacacgacgtggccatgagtcatccctggcccgtgcgtattccccgacccgtcagcgaatttttagacgccgaccaacttctggtcaccggccagcgggtattggacgtgttcttccccatcgccaaaggcggcaccgtggccattcccggcggtttcggtacgggcaagaccatgacccagcacgccattgccaaattctgcgacgcggacattatcgtctacatcggctgcggcgagcggggcaacgaaatgacggaagtattggaagacttcccgaaacttatcgaccccaactccggcaagcccctcatggagcgcaccatcttaatcgccaacacatccaatatgcccgttgcggcccgtgaagcctccatctacaccggcattaccatcgccgaatacttcagagatcaaggctacgacgtggccatgatggccgactccacctcccgttgggcggaagccctcagggaaatttccggccgactggaagaaatgcccgccgaagaaggctacccggcctaccttcccagccgcatcgcctccttctacgagcgcagcggctccgccaaaaccctttgcggtgcggaaggctccgtcaccaccatcggcgccgtctccccggcagggggcgacttctccgagcctgtcacggaaaacacccgccgtttcgtcaatgtgttcttggccctggataaagacctggcctattccagacactacccggccattcactggctccattcctactccggctacatcggcgccttgtccaattactacgacaaccgcctggacggcgatctccccggccttcggaagaaattcatgaacatcctcaccgaagaagcccggctccaggaaatcgtcatgctcgtcggcgaggacgtgcttcccgataaggaacgcttcctcttaatcgtcgcccgcatgattaaagacgccttcctgcaacaaaatgcctttaaccccatcgaccaatacgtgcctttggaaaaacaatttgccatgatggaagtcatcgacaccttgtacgaagagggcaaagtggtgctggaaaagggcatttccattgaagaagtgaaagacaatgccctctacacgaaaatcgtcaacatgaagtacaacatcgaaaacgacgatttaagggcctttacccacttaatcaacgacattcaagaacattacagagaaatccgcatcgaatacggcatcgccgaaaatgaaatggaagcctacgaaattaaagaaaagaaacaagccgaagggcaaagcaaagagacggatggcgaaagcccatcggaagaaaaggaggtgtaggacgtgaagaaagagtatttacgcttagataccattgaaggctccctgattcaactctccggcctgcaccgagtacgctacggcgaaatcgtctccattaccaatcgagacaccaatgagatgttggtaggccgcgtcatcggcatcaacgacgatgccgccacggtacaggtcttcggcgaatccatgggggtctccacggaaaacctcaatgtggtcttcgaaggacggccctttgaaattcccctgtccccggaaattttaggccgccgcttcagcggcatcggccgcgccatcgacaaaggcggccccgtctatgccgacaaattttacaatgtcaacggccaacccatgaacccggtggcgcgggaatacccgagaaacttcatccaaacggggattcggggcatcgactcggttatgaccctgattcgggggcaaaagctccccatcttctccggcgccgggcttccccacaacgagctcgccgcccaaattattcgccaggccaacattgccgacgacggcggcagcgacgacttcgccgtggtcttctgcggcatgggcctgaagcgggaagtggcttccttctttaccgacagctttatggaagccggcgtcatggacaaagtcgtcatctacatgaactacgccgacgacccgattatggagcggatcatcgcgccgaaatgcgcccttaccgcggcggaatacctggcctttgagcgccacaaacacgtcttggtcattatgaccgacatgaccagctacggggaaagcttgcgggaagtatcttcccaacaacaagaagtgccttcgagaaaaggctacccgggctacctttactccgacctcgccgccatttatgaacgggcgggcatgattaaaggcgtaaagggctcggtcaccttgattcccattctgaccatgccctccgacgacatcacccacccgatccccgacttgaccggctacattaccgaagggcaaatcgtcctttcccgcgatcttcacggccagggcatttatcctcccattaatattttggattccctgtcccgcttaatgaaagacggcatcggggccgactacaccagggaagaccatgccgacgtctccgcccaactctttgcctcctattcccgatgcatcgaggtgcggtccttggcacaaattatcggggaagaagaactttcggaaaacgaccaaaagattttggcattcggtaaacgattcgaaaacgaatttatcggccaggactttaacgaatcctcgactatttacgagactttggacaaggcctgggagctcttgaggacactgcccaaagacaatttggttcgcatcgatcccaaaattctggaaaaatattattagaggtgagctatggcgaaacgcgtgacggcgacgaaagccaatttaatcaaaataaaaagcgccctggattttgcccaaagaggctacggtcttttagacaaaaagcgggccgtgcttatgcgtgagatcatgcgcctaaacgcccgggcccaaaccattcaacaagaggtggaagagcgcttcggccagtcctacgacgccctcaccatggcctcagtgaccatgggatgggaatccgtggtgagcatgagcaaatccatgcccacggaagagccctaccacatcggctaccgctccgtcatgggggtggagataccggagattcactacaaggccttcaagccccaatccaccttcagtatgtttgaatccaatttcgccttcgacgaagcctacattcgcatgcacgacatgcgggcgaggatttatgagctggcggaaatcgaaacggatttgtaccgcctggccaaggaaatcaaaaaaaccgtgaagcgggccaatgccctggaaaaaatccaaataccaaaatacgaggcggcgaaaaaagaaatcgaagagattttggcggaaaaagagcgggaagatttcttccgcctgaagcgtgtgaaaaacaatgtgagcaaataaaggaggtcgctgtggaactgagacgcatatacgacgaggattttaactacctgggctacttaaaagatcgtaaagaggtgttggaggagacggaatacttcgtcgtctcaggcgtcatggtcatctcccgaggcaaactcctggtgacgaggcgggccaagaacaagaccttcccccaccaatgggaatttaccatgggaagcgtcgtggataaagaaagcccccttgaaggcgccctgcgggagctgaaagaagaagtgggcatcgccgccacggacagagaccttaccttcctcggtaccttgaaggaaaatcagaaattttccaaagtctttctcctcgtaagggacgtagacaaaattaaaatgcagaaaagcgaagtagaagattacaaatttgttgggaaaagcgagctcgacgccatgttaaaagccggggatttcgccccgcccatggccaagcgcatcgaaacctacatggaaaaaatcgcaccgaagctcgccgattaatttcaacaagcgcctttacaaacagtaactgtgctttaagatcaaaggaagcaatcgaacgtttttgtagaaatgattatttgcgaggtgttttatggaatcagttttgtttggaagtatattttccggaatcgccatcgtcgtaaagctcgtctttatggtattggttgtctactatctggcgaagatagccaataaaaaataaaacgcgcctcactttcttaagggatgaaaaacctctccgtctcaggccccgcgacggagaggttttttgcgtcaaaagcggctttttcgagagaaaggcatcgctttttcagagcagagcggaaaaatccgtgttaatgcaaaacaaacttttacaatgtagtcggttgtgataaaatgtgagcaactgtgaacgctgtatacattgtgatgaaactgaggtgacccatggatctgttactgaaagtaaacggatatttgtactaccctatacttattattatcttaatcggcgccggcctgtacttcaccgtgcgcacgggatttttgcaattatcgatgttcggagaatccctccgcgtcttgagagaagagccccacgaaggggaagtctcctccttccaagcccttatggtttccacggcctcccgtgtcggcacgggcaacatcgtcggcgtggcccaagccatctgcctcggcggctacggcgccgtgttctggatgtggctcatcgccttaatcggcggcgcatcggcctttatcgaatccacactggcgcaaatctataagcgccggggcgagcacggcaccagctacggcgggcccagttattatattgaaatcgccttgggctccagaaccatcggcgtactcttcgccgtcttcttgatcttaacctacgccgtgggcttcaatatgctcgcctccttcaacatgaccgactccttccgcgtctacgatttcttcgtggaaggcaagaccacctggatcatcggcgccgtcctcgccatcgtcgccggctactgcatcttaggcggcggcaagcgcatcatcaaggccacctccaccttggtgcccttcatgggcattatcttcgtggccatggccctgtttatgatctttagaaacatcagctacatgcccaccgtattcaaaaacatcttctccgatgccttcaacttccaagccatcttcggcggcttggccggttccgccctggtccaagggatcaagcgggggctctactccaacgaagccggtatgggttctgcgcccaacgcagcagcctcggcggatgtgtcccacccggtaaaacaaggcttggttcaaatgttttccgtcttcctagacaccctggttatctgctccgctacggcatttatggccatggcatcgggggttgaagccacggaagaattggccggcgccgcctatgtacaggaatcactggccacggtcttcggccactacggctacgtctttatctccctgtccttgaccctcttcgcctttaccactctcttgggcaatctctactacgtggacagctgcctcaactatctccacaaaaaagccccctcgaaaaccttcatgctttgctaccgactcgtggcgattctcctcatcttcctgggaagcagcatgaaaatggaactggcatggaacgtggcggactttttaatggccctcatggtgcttgtcaacatccccgccattttacttttgggcaatcaggccctggccgcattaaaagactacaaggaacaatcccacgccggcaaaaatccccactttatcggcagaaacatcggcctcgacgaaagcaaattggattattggaaataaaagcatcgccttttgaagcgcctctcgcaggcgctttttttgcattagaaaacccccggttagaccgggggttccgtttagctttagcgataatcacccgttattcccagaatggtatgataagaaaggtctgccaaccaatcacaatcaggagggaataatgacatcactaaatcacacccatagtttatcacacacaaaatggaattgtaagtatcacgtagtgtttgctccgaaatacaggcgaaaagtattttatggatcgaagcgcttagaaattgga

SEQ ID NO: 28 - DNA, 149957 bp, Peptoniphilus rachelemmaiella
  source 1..149957: mol_type = genomic DNA
cagaacgacaaagaaaccgccgccaccgccctttcaaagtggatggaagaggcaaagaaaggcgggcaaaaggaatggcgttactgcttgcgcgcctacaacaactggttcgaggagatcaccaacagctttgattacccgtggagtaacggctatgtggaaggaacgcacaacaagatcaagaccgtgaagcgtgtggcttttgggatgcaaaactttcatcattttcgaaccaaattactctttgtttgttcaaaagatcggtgatggatggcttttaggaaaacaaaaaggagcctagttttcactagactccccaatggttgacatagaaccataaaaaagaagggtgaatcggatgattcgcccttctttatccctatgacgcctcttcggaggcgttttttgtgtcttgtaactgccgtaggtggaattcgcgcccctcatcctcttcttgcaccatggaaacttagggttcctttaccccgtagtgatccatttgttcaaagtaggcgtcgtattcttcccgcgtcatggattcttcccgaagccgtttatccatttccgccttctcctctgccgccggatccacggtgggatcgatggaatcgagggcctttgcatcgatggtgacgtcctcgtggaaaagcccgaaaagggtgttgtcccgcagatcgtacatgccattggggccggtcacaaatagatagtaatcctcccgcgtcttgtaccgatccaccctcgggcgagcgagaaacaggactttctcattctcgtcgttatacatgaagtccgcttccgtcggctccgcgtagatggtttgcttttcatcgtcgacgacatcaccgccggggattcgcacggtcaccgttcttccctctttcatttctcccttatagaccttctttactttaaagacggcgtctctgtaaacggctatgtccccgccgccataaggcgacactttaaagggtttcgtaaaacccagaaagtctgccgccaccaccaaatcggagctgtttgccatttcattgaaagaaagctgcggatagtcggtgtccgtcgctttttcaattcgtttatactgatttcgcgacggactttcagcctctcccgctttctgacaagccaccgcaaagaggcagatcgaaagaacacataaaatcgagatccaacgtattttcataaggcgggctttcttgcatttaatcttcatggaaatcaccttttttatccctctgcccttctccgggtcacgcccttaatcccgccgacagaatttattttttgttttcatcctctaaagcggtatatttcttcagggcgtctctcctcgccttatggcaaacgcggataataacgtaacatgccaagctgatggcggcgacgacgacgataaaagcgatgatcaattcaacaatgagcaaagcccctacaggtgcaaaatccataattcgtcctcctctctacgggaacaagatatcattctacgaactctctctttgtatatcgtatataccccccattgacttctaaccacccttcagtctttttattagagcattctaataaaaaatcgagtaagtcttttgcttttcttactcgatcgcttctttattttttccttaatactgccacgcactccacctggaatactgccacgcactccacctggcttgagtggtcagtatggataaaatttaatattttaaggaagcctcgtatgtgggaataggataagaaatctagtcgaaaaacaaaatctctactcttaaaatcaactatctaattattactgttaaaattttcgccctttacttttttcaagattgctctgatctcaactttctaacctcttcttttaattgctcattttcttttcttagtgcttcattaataacattatttgaatttttccaccaattcagtatctctaataccactttatacagattggggttattaataataaccacttctagtttatctctaactcttgttaacgcttcaaagtaacagctgaattcatcgtatggataatttctataatcatcactttctttataattagacgtcaatttagccgtttctttatcgtaaaagatatactcatcaaatatcacaatgacattgttatattcttttcctataacatcatggatgttttttgaattaattacaaaatttttcctttgctttcttcctgtagtttttgtactatattccgttaattcaataggtataaattggtcatgacgatacctatactctatataatcagatgccccttctctattattaaagtatttaacagttacttttttataatcagctggttgactctctctatccgtaggttgtaataattttctaataaaccacgacatctcattattttgtctaatcttatcacctagaaaataattagtaatttttataccttgattaagtttatcttctatatttaatgttttctcagaaggatgtagtgtttgtattttgtcgatactataaacaactagttctacgtctaaatctattaaaatattatactgctcttctcttactctttgaaattcatcaaataaaacaacatcatactttctaagctgtgaaaaatcagaacttatcgacttaatatcaaaaatatcaaagttatgaattctacttaattctctgaagttctctaatttaccacaaaaaactaaaattacttttttaccttgttttataaattctgcggctaaatcaaatagtacaagtgattttccagtgcctgccctgcccgacacactatgatataccgatctagaatttaatattttatcgactacttctctttgttcctgatttaagtagtaagagttctttacgaatttttcaggctcactataaggagatattattaaatcttctggttttatcatttcaagcttattacatttaatgtagtcacttgttatatctagaatcaagctggaaaatcctacttctaccaacttataatctttatttgaacaaccatcagttggaactaacctatacaatttttcatcacttaaaacatatgtataattaattacattttctgtgcaatttaataaaatatgattttgtcttcttaaagtatcttccaatttctccttaccaccatttggatattcagactttaattcaatatttaaagttgtatctttggtaaatcttaataaatcaaattcctgattaatagctttactgtttttataaccataataaaaagcttctttctgttcagaattcaatttactgcttattttttcatataaagatttaaaagtttccagttctctatactttatctgaacatttgaaatattttgtatttcgtcatcgagagttgctataaagtttttcattatattttcgtcattatagataacaggattgcttataatttgatataaagactctaaattaatacttctactcattttattaccttcccttaaatttattcttgtgataaatacttacctataataattttatacaatataatttcttacactttgccctctatgaatatatttgcctttatacatagagtagtcaaaatctgacttaatcggtcttgaatcatacctattataatcttctattttatcaacttttatgtctttaaattcaatcggaagtccagctgatagtacaaagccttttctattttgtacatgaaaatgtatatgaggctccgttgtattgcctgaatttccacactcagctaattcttgatatctttttaccgtatcgccttttttaactaaaaagctatttggttttatatggcaaattagagaatactcattttccatatgtttgattacaatgtaatttcctctgatatctcttattaaaggatctgtagaattattccacataatcttactatctttgcatttattagatacttcaactactatcccgtctgctggagctattatatcgctttcataacaataataattttctagtttttttctatctccattataactctttagtttatcgtctaactttataaaatcataagcatatctttgagcattaatactccaagagtgtgataattccttatccacacctccattaactactgtccatttacctttgaagggtaaagagtacttaatatcgcttttataatttgaaacacaggggactggattgttttttaacggaatagcgaacattgcaaaaagttgtcctaaagattgaatgaaaattggcaaagtaaataataactcaaaaaaaccaaatatccaaaatccccataaaattttccataactgactatcaaaaacaaatccgaagaaaccaaataatcctacccatttaagatatgatgctagtttaataaaaatcctcataaatatcccctattcatctataacgttaaaaatatcttcaatactcacattaaatatcttggcaatattccaagccaattccaaagatgggttataacggccattctctaaatttcctatagtttctcttctaacacccactaatttcgccaaatcagcttgtgtaaaattatactttgccctatattcttttattctattttcaatcatttctcatacctagcttttctctaaactcataaattatgattaatatcgtatatacaaaaattgatatagtccaagctagtattaaagcaaatatagaagattcatataatccataatttaggacgaaaaatttatataggcttattattacaaaaactaaatttccagcaaaaaatgaaaatgcagcagatttatttgtgtagtcttccaacatctcgtcaatatcaataaatagatatttaaaatgtattaaaaatgcaaagaagcacagaaatagcttattctctgtatagattcctaaaattcctaatgctgataaaagccctaaagatccatagattaatttgtatttattcatagctcactcctttgtggtatatttctatcattttgatgaaattataccacatcgctaaatgtaagacaattaaaatcatcctctttatatttcaattaatctaagacctaataaaatgaattagcaatataaattttaatatgtttatttccattaatcattctgagcacaaaaatagtcttttagaatttaacataaaactctaaaagactatgacttcactgcatattctttctctttatatctaaataaaaatcatctattctccatccataccaccccatgcttttaagcaacttaggtaaaccattaaatctattttaatttatgaattcatcttttattctattctataaaacaataaaatttttacttgcttgctcacatttgcgggagcttaatgaaatttcttcacattatttcttcttataacgaaaagacccgacttggctcgcattgtactaagagacgtgtcggggactattaagtattataatacacatttatatctattttcaaatcttctatttctcatataagtttttcaaactaattatatataattagttatctatttcgactacctcaaaaattaatagctagacaaagaggaagtactatttaatgataattacccaaatcccaattaaaataaggataatgccaatgataagttctaccaatcctacctttttagcataggattctgtctttcttccagatttataatctgcctcaaaaccgttaatcaaattatatttttctttaaaatagatcaaatatccaaatgtagtaaaaacgacccccactattataagtattatctttagtaaattcactaagcacctctatcaaaacttcctatgttaacaaatctccttatcatttctcaaaaatcaaattgtaatttacttatattttgaatatccttatttttccctatctatatccataaaaattttactgatgattagttatatcctaaaaactaactattctatcactttaattaacacttatactattttcttaacaacaatactatacactaacaatggttcgcattgttaagaggcgtatcgggtaatgttagttatattgtatatttacttttaattcttgtcaattttatatttcaacttcaagtccagatttaaatattactttcagtttttcttcataaaccactatcttctctataagttttcttactaaatcttcatcatagctttctatttctaattcttggttgtctagaaactcttttaattccattagtctgctttgttcattcttctcttctgccatatctagtagtatcttatctttttcatttcttaattcctccaccctgtctgcaaggtctgtatagtctttcttggcattagctacttttaaaagttcttcttgaaccgccagcatttcttggtctatttctttgattctgctacttccattacctgtgatggctttttctatattttctcttattatttcttttaattcactgctttcagatataagatgattgatggcttctacgactgcttcttgtaggtcttcttctcttatggttcttgcttcacatgcgtctggtccatgggttactcttgtacagcatctccaaacagtatatttcttccctctgttgttccaagcaattctcctataaatatctccgcattttgagcagtagacaatacttgaaagtgtgtatttgctggaataagttcttgtttttcctttgccactcaccatattagctcgtctgtacatttcttccccgactcgcatgaagatttcttttggtatgatggcttcgtgactattttctacataatattgaggtgcaattccatcattctttacccttttcttatttagaaaatctaccgtatatgttttttgtaagagggcgtctcccatatatttctcattggttaatatttgattgaggtttgatacatgccacttcttatttcctgctccatttactatcttatctttttcaagtcctgcctttatgtctcgtagacttgccccttccaagtattctctgtagatcctttttactatttttgcctcttcaggaactacgacaagttttccttcttcgtcttttgtatagcctaaaaacctattatggtttacctggacttggccttgttgaaatctatattgaaatcccaacttcacattttgtgataaagactgactttcctgttgagcaagagatgccataatggtaaggaggacttctcccttggcatccatcgtattaatgttttctttttcaaagaaaactgggatgttattctcttttagttttcgaatatactttaagcagtctagtgtgtttctggcaaacctcgatattgactttgtaatgatgtagtcgatatttccttccatggcttcttcaatcattttattaaagccagctcttttcttggtatatgttccactgattccttcatcagaaaaaactcccgcaaattcccattctggatttttcttaatatagtttgtgtaatggtctacttgagtgtcataagaagttgcttgttcatcactatccgttgataccctcgcataagctgccactctcagtttcttcttttctgattccttaatggaatttccttttttcttcttcgctggtatgactataaccttgctattcatcatctatcacctcgattaaattgtactggtagcttgctcgttcaaagggatctatgggcaaagtctcttccttcttatatctaaacttgcagggaactttaataatctcttcttccttttcccaaactcgtcccatggctactgccctttcctttaacatttgacctgccttatcaaaactttctctatctattatcttgggatagatgtcatttcctaaatatttttcgttggttaagattctttttacacttgagctgtttttcttgatacctgcaagttctgccgactttataagggcatttccatcaagatagtttttaaagatttttcttatattctcagcttctttttcctgaacttctaatcttccgtctcttattgtatagccataacataacctagacatcttctttcacttcctctcttaatacaagtccacactttaaatgaaaatcaagagtctctctatcgacaacttgaatgtggtcaatgatttcttcaaacaagtcatcttcaaagtgatctatcatttcactttttcctaagattcctattaacttttcaagctctcttatttcttcatcattcccaaggatggcttttttgcttctctccttttccatgagtagataactttcttcacttgaaatctcactgctttcttttgcgtaaatacttgcatctaaaactcccgaagttattagtttgcttagaacctcttttctttcctttaatttttctaagccttcttctattttatttatcttcgtaacttcccccttgctgtccactctctttagtgtttctaagagtggcattagaattctatcttttccaaagactagcttgtttactaaagtcacaaatgctagttttatgtccttgtctttaataaacttcatagaacacttattaatatcttttaggtgttcactacaagtccaagctatatatttttcttttccattatagtgatgccttcttttaaaggttgaaccacactcgccacactttattttccctgataggctatatctattttgatatcttttggtgttttctccatttccttttgctatagcccttatctttattaggtcttgaactttctcaaagtcctctctacttacaatggcttcatggttatctataatcttatactggtcttcctctcccttatttttatgtctattataattttcatctgtataagtcttttggtagatgacatcgcctatatatttttcattttttaagattccatttatagtcgacccatgccattttgctcctttttgtcctttaatctttcttttatttaagtcatctgctattttgtgagttcccttacctgagagatactgttcaaatatttcttttatgatttttccttcttcttcattcactaccatctttccgtctatattctcatagccatagggtaggcttgatataataaaagttccattttgaaatcttttctttatggaccatttgttattttctgatatagacctggattcactttctgcaagggatgaaagtatggataacatcaactcactttccatggttcttgtatcaatgttttctttttcaaaatagataccaatgtttaaatcaaggagtcttcttacgatttccaaacagtctgttgtgtttcttgcaagtcttgagatggatttagttaggataaagtctatttttctgtcttcacagtcttttaatatttttagaagtccatccctacattctttttttgttccagtgatgccttcatcaaagtataaacctgcaaatgtatatgatttattttctgttatcatcttttcgtagtgtgctttttgcgttttaagactcacaagctgagcttcctcatctgtcgatactcttgcataggcagcaactcttaatgtagattcttctttttgatttgcttctatttttgttatctttttcatcgtctcacctctctctcttagtgctatattcccgtacaaatgagtatatatcaagtcttatagcattaattctgaaagaataggtctgaattttttaatgttttctctcctgattttcctatattcttcaaggctaatttcatctaaaagaaataggtcttggataaatttatccgatagatagaaattaagctctgcctttaaatccatttcagtatattcagtttttaaaatttcttttctaccttcaaacttttctactctcatactccacctcctatatcacaggcaaagaaattaaggttatttttaaccctaattttctttcctctatatttcttaagacaaagggagtgtttttgagtaaagtttataatctctaacatatgtaaagagaaatatggcgttagaaaggtaggcataaaaataaaaggtcataattttggaaaattacaacctttttgtctaatagcagttatttaattatagagagtatatttctctaaccttatcaactaagaactttaccttcccttcagaaataattcctttaaagttttcattattcgctattgcttctatataaaagcgaacaatcatatcgtcacttctatttggatttgtaggtaataataaattttcatcaagccattcatctatttgattaaaatactcatcgcctcttatcttaaacgatttttccttgctctctattagtaggttgagtaatttttctacatattgactagcgatttttgggttattatcttcaatatagtgcgttgccaaggataaatagaagtttaaaacgatagaaatatttagttccatgagattaaaagtttctattaaatcctccactctctccaatgtttcaacccaatcgtcattattcaaactactcttcatcataagaagggtgattaaatcaattatgttcttataaatcattacttgtagtttttgatctacttcattatccttcttcgtttttaaataagctgaagccaccaaacaatctttcgatatagatagcatgtcagaagatggtaaaatatttaacgcttcttctgattttcctaaactaatcaggcaagctgccctcaagctcaatgattgttctttaagtataggatctttcgaatcctcacgcactctctttagtatatgatttgcgtattcgagatattcctctttcttggtagtgtcagttgctaaaccacagtggttcaaaataaacaaagccatatagtataggagttcaaagcaagaatagtattgtttaattttaatttttatatcttctaggatactatccatacctgcgtcagtgacacgattttctaaatctatataaaatttttgaatttgaactgaagataaatctgggtcatatcctattaattcatccacacttatattaaaaaaagtggcaagttttggtagaagtaaaatatctggatggctttgacctgtctcccattttgatacggatgcctttgttaccatcatgaattctgctaattcttcctgagttatgcctctttcttttcgcttctgaagaatattttctccaatttttagcatgatattttacctcctaactgatttgctttttgtttattatagcaatcgaaattacgatacacagtataagcaaaatactgcccgtaataatcggtacatagtagtcatcatatccaattccttttataaggttcacaggcttacctattaatgcgataggcatgtacttaacaatttcatctcgaatagataatataagttgaatcacaatcccagcagtcgttaatattaatgtacctataacatttcctgaaatcactccagctaatgtctctaaggatattaaaaataagccaaatataaaaggaagcaaggctgccataagtatatttctaataggaaatgaaatcccgaaaaagtactttgtgtagagataagttagtataaatgagcaaaagtaagccaaaaaccacaaaatgaaattgtaaaaaatcttcgatagcacaacttgataccttgggagtcccttagatagcaaattaatcaaggttcctttttggaattcattggccatttgtgtacttagtataatggctaatccaaacattcctatttgactaatatttttaaagaattgtgtccaagagtcaatttctgatggtggtgctacgttaatatctatatttcctgtagctatggattgaagtatcataggagttaattttgctgtcaaaggacttattaacccgatgaacaagaacaggataaaggtagaagtcatttttttagtccttgcaccttcaatagcttctttctttaatagagataaaaatatcctcatgctttcgtcacctccagaaaaatattttctaatgtaggttcttctatttttatttctagaggaaatatgtttaacttatatagctcatataaaatatcgaggtcttttagttgattgtcttcatctgttaagtacagagtatctcctttttcattaattaccagatttgaaaatttatctagtgacttaaatccctttagttcttcattcgacctaaatctgattttaattgtgtttttcctctttatattcttaagttcatctattgaaccttccagtacatttttccctttatcaagcaccactacatgatcacaaatcgcttcaacatccgataaaatatgtgtggaaaaaataacagttgtagagtcttttatctttaatatgatgtctaagatctcttttcttccaagtggatcgagggcagaagtgggttcatcacatattagtagtttaggactatttaacaaggcttgggcaatacccaagcgctgtttcatacctctagaatagccactaattcttttattgacatctcttaatcccaccaattctaaaagttcctcgctcttgtttttgatttcatttttgctaagaccagttatagacccacataaattgagatattcttttgcagtcatatagccataaaattcagggacatctggaagatacccgataaatcgattggtttttgactgaccaaagccaactttttctccaaacacttcaatggaaccttcatcaattttcaaaaatcctaaaatcattttcattgtcgttgtttttccagcaccgttttttcctaaaaaaccaaatattgtattttcaggaatggacatggataacccattaataatcgtatttttcccaaaggatttatgaagattgtcaatttttagcgcttccattattcgtcctccctacctattgttaagtataagataggtccaataatttgaataaaaacaactattaaaatccacatagttctgcttccaaatttatatctatcgtgttttaaaacatgtgttaaggaataaatcataagtccaatttctaaaataataataggtataagtatcggtaaatattctctaatgatatccattttaagccctcctttatttgtgtatatcttagcattttattaaatcaactatcaagaaaccattagtaaacttattctatttttatcaactttaaagaaactatattttgttttatgaggaatgaatacatcatttattgtatgccatcaagtcgtagtgcatccttttcatatattacaatagatattgtttctgcttttgctacattcccattacagaaactttcccgatactatggattctgatggcttctcactattagttgttaacactgaatcggtaatgaggtctcacgagataagtcataaaaaaatagcctgcaccaaaatcggcacaggcttcttacttaaatattaaaatagttggttcactcttttctgaacagtataatgatcatatccagcttgagttaatctcctttttctttcttccccatttccccatttccccattttccacttataacttctctagctaattagtcgattgtttttccaactggataaaccatcttgccattagcatcgaatacttttaatctgaatctatctgcacatctttttgcattagctagatttctaaatgcacctttctggctttttacatcagaccaagattttctgactctatatagtccatttgttggtttactaacagtcttattgcctcttagtcttttattgacctcatttgctatataaggaaacttactgccaagatatgtccctggacaatttgtattggaataccattcatgtttttgaagaacaccatccttacctccagtataggtgcaaggatagattccatttcttctacagatgtctgtcactaaatcaattagtctatttaaaacgcaatcagaaacaaccactgaggtcctctcgtagagttctctacttcaattgtgactgctctattgtcataccaggaagatgaggttgtccaggctctattggcctcatcaacacctaaaacaattactccatcggatcctaaattgtagttagctgatgctcgccttgctcttggcacaaatacgcatgcaagatttctacagtttataactccagctgcgtggtggattgctattttagtaatcttttgatttcttctaccactatggttaggcgaaagaattgttgcttgtactaatggactattactcatttatttttcctccttgaattgttttaatatatcttttaatttttctggtattggcaaacctaaagctacagaactttccaaaataaaaataccctccttactggtttgtccagtaaagatggtacatatcatttttggctagctattttttttatattttataggtctattctgtccactctccctataaatatctattctgtctacacacccctacgatttttactattaatatgttcccacaaggtgtttttctaatagaaaaatggcttttaagagttcttttgaaaatcctaaaaggcattgatttcagcacttttatagcttgttattctattttcttgacatcaatactacagtctccatcggcaacctatggggaaacatgtcgacggggataagggactctatatggaattgttcttttaaatagtattcaattaaaatgtcttgtttttcttaaggggaaaactctataactcactttacctacgacattcttaaaaggaacgtcgccaaaagttctactatcaatgcttcctccgggctccctattatcgccaacgacaaacagttcatcatccgaaatagtatgcggcccggccaaatgaattgcctcggtgtacataccatcttcgatgtatgcttcatttagaggtgtgtcgttaatatatatcttgccttcttctatgcttatcttatcacccggtaagcctattactcttttaatgtataattttttattatctttagtcggaggagagaaaataataatgtctcccctcgtgtatttattagggttgatgatattttcgtattttttgacaattaataagtctcgatcttcaaaggtaggatacatagaacttccgtcaacacgagcagcctgaaaaataaaggttcttatgaatagggccaacaagaacgctgctactatgcataaagcccactctcttagatttcttgctatattcgtattattagtagtgtaaaacatttttttcattattcgtctccctactatggcttcgtttcgctttttaactgtcacaaaatagttcacacattcgagtgaccctttattttctccttaacaccgccacacactctactgccgctgtatggggaaacatgtcgatgggggtgagggcttcaatatagaattgttcctttaacagggccagatctcgcgccagggtggatggattgcagctgacatagatcatggtttcaggattcgctttaatggcaccttcgacgaccatgggatcgagcccggcccgcggtggatccacgacgaggacgtccacctgctcctcttcggcgatgcggggcatgattttttccgccgcaccggcgatgtagcgcacattgttgacgccgtttttctccgccgtcttccgcgcgtaatccacggaggcttcggcgtattcgttggccaccacggccgcagcctgttcgctcaaaggcagagtgatggtgccgatgccggcgtatagctccaccacattcttgcccggctcaacattgctcaccacgttgtcgataatggcttcggcgcccatggggttcacctgaaagaaattggagccgaagatgccgtagtcgtagccggccaaggtttcggtgatttctttcttcccgtaaaggtgctccatctttctgccgtagtggaagcggggattggtgtttttcgtgtagtacaagctgtccaccccggcttccagggcaaaggccacggcgccgtgaaggaggttgtccttcatgtccttgggtccggacaaaatcaccatgctctcgccccggcgggtggtgcgaatgcccacgagggccacatcatccagccacttttccccctgcatggcggctaaaatttcgttggctctatccgtctgcattaggcaacgctttatggaaataacttcgccgcctttgccgtagagggtgagctttctgtctttcacgtgaaactgcatgtggttgcggtagcccgtgctctcgccacgcgtagtgacgggatccacggccacagccacatcgccgatacgggataaggcatcggccacccgacgccgcttccaattcagctcctcttttcggtccagggacaaaaaggcgcagccattgcagttcgtgtagggacagggatttttcacgcggtaaggggattttttctcgtaggatgtaatctctccttcgaaaaagcgcttcttcttttttacgatggtcacatccaccacgtcgccgatttccccgccgtctaaaaaaaccacggcaccgtcggctttgcccatgcctcgtccccgatagtcgtagtccgtaattgcgaggcgcaccttgtcgaagacttccattacttccgtctcgtttccgtgggcccggggatcgccttgccttctttataaagcttgcccacagcccgcttgaaggcttttttcgtcatgcccgtgaggcgcttgatcgcctcgggatcggatttgtcgccgacggggagtctgccgcccatttcatccataaggcccaggagcacgtcggaatcctgaagcatttgcacgtgggcaaagtctcgcagcgacaaagtgagtttaccgtcgtcaagtacattggccacccgcacttccaccgtatctcccgcgtggtagattcccttcatctcttgcttgggaatgcggccgtcgtaggtgtcgtccacggcgacgaggacgccgcttttgcctacgtggtacaccgtgcccgtgacccgatccccttttttgtaggggctgtttgattttaatgcgtctttaatttccatggaaacggccaagcgctcggacttgtccacgtacatggtaaagaggtatttttctccttctgcgatgcgctccgtggcttcagagaagggaagcaagatatctttcggtgcgttaatgccgacgaagtagccgattttcgacttggccaccactttcagcttggctacttctcccacttggatgaagggcgcctcgagcatgccggcgatttgcccgttgttttcacggtacaaaaacacgtcccgcatctctccgtctttgccccgcatctcgccgtgaatgggtacttccttttcgccgtcggtggcccaaaggtatttgcccttttccacgagttttaactgttgtacttttcctaatttcattttttccctttctccaagagctccttggccatgtggtcgtaaatgtcgtgggccctgccctctaaggtggagcccaattcgtaaaaggcgtagctgcccccttcgctctttaagagggcgtctaaggcgtagtagctgaaggcgtcgtggcggcctaaattttccacgatggcccgcgcctgggtcttgtgggaaagatccgtgtagcgggtcaggtagatgccgaattttttcgcctcaatgacttcgctgtcccgcataagcaaaatggcgaggcccaaaaaaggacgctccatttgatccagggcgaagagccactgctcgaagcggcccacggcttccagtgcccggttcttttcaaaaaagcggtcgatgtgctccatggcaaagggctcccggccgaaatattccataatgcccacgtccagggcgtcggtattcaccggcgtcggtgtcatttctttattgaggacggcccattcgtagctgccgtcgtcgccgatgtccacccggggatcttcgacgatttttccgtataaggtcttcggttttttcttaaatccaaacataatgcctcctgattttattttcccacaggcgctctttaaaagcaaacggacatggaaaaagctccggccgaagccgaagccttataaaaactgcgcgatgtaatttaacttatctgcaatccacaggcgaatgtccgggaaatgttccacaagggtggttttaagcaccgccatgcggcgaagcatttcttgtccctggccttggggatcgtgaatgaagccgtcgagatagccgaacttcgccaacacagccaagaggatggcgagaaaaatcaagcggcgcagacgcctgcgacggcgctttcttcgtttcttttctttttttcgatccacggcatcttgtaccatgcttgtcatttccatggactccctcctttttcaccagtatagcagataatatccaagccttggcaaagaggcgggaaagcctaagctatttcgacacgtcgacgaagccttccccgtccacggcgtggatcaattcgtcgacggcaaattttgccacggcgtattccgagccgcaggcgggataaaccacgtcgtaagcttttaagctttcgtctaaatacactttcacgccgggattgacgccgaagggggtcacgccaccgacttcgtggccgatttcttcggcaacttcttcggcagagagcattttcgccttggtttggaaggcggccttgaactttttattgtccacccgcttgtccccggccatgacgattaaaatcggctctttttcggcattgcggaaggtaagggacttggcgatttcccccggcgtcacgcctaagacggcggcggccatttcaacggtggcggtggattcttccgtttcgataaagtgatccgtgaggccctttttttctaaataggcgtacgctttttccttcgacataatttccctcctgttacttgtttttgttggctttgtaacgcttgttggaatctaaaatcgtctttctgattctaaaggattgcggcgtaatctcgatgagctcgtcttcttcgataaactcgatggcttcttccaagctcaaatcgcgaatgggcgacaggcgcagggcttcgtcgctgccggaggcacgcacattggtttgcttcttcgttttggtgacactgacctcgagatccagccccttcggcgaggagcctaccaccatgccggcgtaaacatcttcgcccggttccacgaagagatccccacggtcttgagcattgtgcagaccgtaggccgatgcggtgcccgtgtcgaaggagataatggagccggttttgcggcggggaatgtctcccttataaggggcgtagtcttcgaactgggagttcataatgccgttgcccttggtgtccgtaataaattcctgacggtagccgatgaggccacgggcgggaatgcggaagacgaggcgggaatagccgccgtccggctcttgcatggtcaaaagttcgccttttctgcggcccaatttttcgataatggagccgataaattcctgattcacgtcgatggtgactttttccatgggctcgtagcgcttgccgtccacggttttgtagaggacttccggcttggaaacttggaattcatagccttctcggcgcaggttttcgattaaaacggagaggtgcagctcgccgcggccgctgaccttaaaggcatcggtgctgtctgtatcttccacctttaagctcacgtctgtttccagttctcggtagaggcgggttctcaattggcgggaagtgacgaactccccttctctgcccgcaaagggcgagtcgttgacggagaaggtcatggacagggtgggctcggagatttttacaaattccagggcttcgcctttgtccggatcggcaatggtgtcgccgatattaatgtcttcgatcccagtgacggccacgatgtttccggcggaggagccgtctttttccacacgatccaggccttcgaattcgtaaatcttgttgatcttcaccgactcccgcttattggggtcggcggcatttaaaagcaccatgctgtcgccttttttaatggcgccgttttcgatgcggccgatgccgatgcggcccacgtattcgttgtagtcgatggtggaaattaaaagttgtgccggtttatccacatccatggccggcggatcgatgtgttttaaaatcgcttcgaaaaggggcttcatgttttcgcctttgacatcggcggattccgacgcccagccttccttggccgaagcgtagataaagggggaatccaacacgtcttcgtcggcgcccaattcgataaacagatccaacacttcgttttccacttcttccggccgtgcgccggggcggtccactttgttaatgcagacgatgacatccagacccagctcgaaggattttttcaatacgaatttcgtttgaggcatggggccttcgaaagcatccaccaggaggaccacgccggagaccatcttcaacacccgttccacttcgccgccgaaatccgcgtggcccggcgtgtcgataatattgatcttcgtatccccgtattggatggcggtgtttttcgaaagaatcgtaatgccccgttccttttcgatgtcgccggagtccatgacccgctccgctaccacttgattgtcacggaacacgccggattgcctgagcagcacatcgaccaaggtggtctttccgtgatcgacgtgggcaataatggctatatttcgaatatctctctgttccataaacttcctttctcggcaaatgccgctataaaaataggatcggttgcccaatccttcaacttatctattatacagcattttcctctttcgcgaaaggtgcttgccaaagttttaaaccaaatccatcaaacagtgaatggcattgcccttgtattccacggagcgacaaatggattccacgataaaaagcccgcgtccgcagcagctttcgctggtgcattcaaaatcatccgcggagtaataaaagccttccccttcatctcgcacggcgatgcgcattaagccgggctccacgtccacgcgcaaaaagacctgcttgtcccgattccatgcgttcccgtgatcggcgccgttgaccatgagttcgtcgataatcaggcgtatatcatattgtaaatcccgattgggaatataagccgagatcacctccatggcgtcggcgataaaacgacgcagcgccgccatgtcgctggccacggacccttgaaaggtacgcacttttctcatgtctttcccccctatgctttctttttacccaagaaagcgtcgcaaaaaccacgacaaaagggaattttccttctgtgtttcttccccttttttccgcttcaaaattttcattttctctgttactttttctatccagcgggtataattaatctaggttgacaagttaacaattgaaaggagttcaacacatggacaaatatgaatgccaagtatgtggttacatttacgatcccgccgaaggtgatccggacaacggtatcgcagccggcaccgcttttgctgatcttcccgctgattgggaatgccccctctgcggcgcaggcaaagacgacttcgaaaaggctgaataatcgcatgcaaaggtcgcggttcgtaccgcgccttttttattgctctttttacatagaaaatccattgagatcgtgcccaatggatttttttcagtcttttttcttgtaataggccgccatatcctcgatgatctcccagagcacgtccacattttctttggtgacggcgctgtaggggacgatgaggtcgtcgtagggaatgtgaagggctttttttataatggaaaaagccttttgcctttggttcttcgacaacttgtcggcctttgtggccacgacgaggccggcaaagccgttttccacgatccatgcatacatttccttgtccttggccgttggttcgtggcgcatgtccacgaggaggatcagctccgccaaattgtcgcggctctcaaggtattcattaatggtcttggcccaggcgtcttggtcttttttcgacgccacggcgtagccgtagcccggcagatccacgaggcgcagggcatcgttgatgcgataaaaattaatggtgcgggtctttcccggcttgccgctggtgcgggccaggttttttcttcccaacatggcgttggtgaagctgctcttgcccacattggaacggccgcaaaaggcaaattccggcaagtccgccggcgggtattgctcttttttaacggcgactttttctaaattacactgacgtatcttcacgtaccatcgcctctttcaatacttcatccatgtgctctacgccgatgacgttgagctttttaatggagggagaatccatgtcctttaagtctctgagattggccttgggcacgaggacggttttcaccccggctcgttgcgcggcgaggagcttctccttgagcccgccgatgggaagcacgcggcctcttaaagtgacttcgccggtcatggccacgaagcgattcacgggaatcttcgccatggcggagtatagggccgtggtcatggcgatacctgcggagggaccgtctttcggcgtagcgccgtcgggaacgtgaatgtgaatgtcgtgtttgtccttaaagtcttcggaaaggcccaatttttcttccacgctccaaatataggtgagggccgcctgagccgattccctcatgacactgcccagttggccggtgagttgaatcttgcccttgccgggcacgatgttcacttcgatgcccaaaagcacgccgcccactgccgtccaagccaagccgttgacgtagccgatgaggttttcctcttcgatgtccttttccagggcctttttctcgcctaaatatttattcagattgcgattggtaatgtgggccttttccttgcccgtttccaaaaattccaaattcaccttgcgcacgattttcgccagctccttgtccaacatgcggaccccggcctctttcgtgtagttttcgatcatggtgtcgatggcgttgtcggaaatggtcatggcatcggcgctgtagcccacgtcttttaagtgcttgggccacaaatggcgcttggcgatttcttttttctcctcgggggtgtagccgccgatggtaatgatctccatgcggtccaaaagaggcgccggaatggtcttggtggtgttggccgtggtgatgaaaaagactttcgacaaatcgaaggggatttccaaaaaccgatcggtgaaggtgttgttttgcgccggatccaacacttccaagagaccggaggccggatcgccgcggtagtcgttgcccactttgtcgatttcgtcgagaaggaagaggggattgtttgtcttcgcctctttcatcaagctgatgacacggccgggcatggcgccgacataggttctgcggtggccgcgaatttcgttttcgtcggtcatgccgcctaagctcatgcggacatagggcttgttcagcgcttccgccacggaggcggcgatgctggtcttgcccacccccggcgggccgacgaggcaaaggatgggggatttggcgtccggggattttttcctcagggcgataaattccaaaatccgctctttaatgtcctttaagccgtagtgggcctcgtctaaaattttgcgggcttcttttaagctgtgctcttcttccgccgattcacaccagggcagatccaaaatccaatccaggtaattggtctggcccgcatactccggcgatgcggcgttgatgcgctccagcttcttcagctctttctccgccttttcccgcaccgcttcgggcagggccttctcttccaagcggcggcgatattccgccacttcctcttcttcttccccggtgagttccttttggatgacccgcatttgctctttcaggaagtattccttttggttttcgttaatggaatgcttcaccttgtcgtcgatggcgttggaaatgcgcaagagctcattttcccgcattaaaatggtgtgcaggcgcatgagccgctccttcacgtccatggcgtcgagaatgctttgggcatcttccgccttcatgttcacatagcccgccaccgtgtcggcaaaggcctggggcgtgtcgtaattaatcaccgaatccaaaagaccggggtagatcttgttgtttttttcgatgtattcgtccaggtcgtcttccgtgaggcgcaaaagggcctcgagctccggctccatggcctcctctgtgtcgtcgtagcgggccacctcggcttccatccacttgccggaggtgtccaccgactgaatcacgccgcgagccacgcctttgacgagaacgcgcacgatgcccccgggcaggcgcaggatctgattgatcttgcaaatggtgcccgtctcgtaaaggtcttccacttcgggatcttccacttcgggatctctctgtgtcaccacaaagaggtagccgcctgcgccgtctgctcgctcgatggccgccaccgaaggctttctcgccgcgtcaaaatgggtgatgacgtggggcaaaatgaccatatcccttagggccaaaaggggaaaaattccgttttccgtttttattgccatagtttctccttatataaaaaggcccacctgggtgagcctttcgcttattgatccgacgagatctttttcaagggctcgtctctttccatgatcggggcctcgtcgccttcgacgctggccttggtcacgatgacgcgttttacgtcgttcatggaaggaatttcgaacatggtgtccatcatgatctcttcgatggtgcctctcaagccgcgggcgccggatttctttttgatggctttttccgcaatggcgtctaaagcatcttcttcgaataccagttccacgccgtccatggcgaagagggctttgtactgtttcacaatggcgtttttcggttgagtcaggatgtggaccaaggcgtctttatccagctcttccaaggtgacggtgacgggtaatcgcccgataaattccgggatcaagccgtatttcaagagatcttccccttccagttcttccagaaggttcacctcgtcgtgcttgctccgtttgatttccgtaccgaagccgatgccgcctttgcctaagcgggcttcgatgattttatccaaagaatcgaaggcgccgcctaagataaagaggatgttggacgtatccacttgaataaattcctggttcggatgctttctgccgccttgcggggggacattggcttccgtaccctcgatgagttttaaaagggcttgttgcaccccttcgccgctcacgtcacgggtaatggagacattttccgatttgcgggcgattttgtcgatttcgtccacatagataatgcctctttccgccgcctcgatgtcgtaatccgccgcttgaatcagcttcagaataatattttccacatcttcgccgacatagcccgcctcggtaagggaggtggcatcggcgatggcgaaaggcacatccaggatgcgggccatggtctgcgccaaaagggttttgccgctgcctgtggggcccaccattaatatattgctcttttgaatttcaacgctgtcgtcgcctgcgccggcctcttgggtgcgaatgcgcttgtagtgattgtaaacggccacggccagggcgcgcttggcgctttcctggcgaatgacgtagtcatctaaggtcgctttaatttccgccggcgtgggcaggtgatcggaattggccgcctctttcggcgccatttcctgtcttaaaatatcttcgcacaaatgaatgcattcgtcacaaatataggcgtcgggtcctttgatcagtttttgcacctgatctttggacttgccgcaaaacgagcaacgctgatcttttttctcttctgtcatgatgctcctaactatttccgtttgacgatgacatcgtcgatgataccgtaagctttcgcctcttcagccgacataaagaagtcgcgatccgtatctttttccacttttttcatggtttggccggttcgctcggcaatgatggcgtttaattgcttgcgggtctttaagattttttccgcgtgaatttgaatgtccgatgcctgaccttgagcgccgcccaagggttggtggatcataatgtccgcattggggagggcatagcgcttgcccttttcgccggccaggagcagaaacgcgcccatggatgcggcgagacccacgcaaatggtggagacgtcgggcttaatgtattgcatcgtgtcgtagatggcaaagcccgcgctcacagagccgccgggagagtttatataaatttgaatgtctttgtccggatcttccgattccaaaaacaaaagttgggcgacgattaaatccgccatttgatcgttcacttcaccggttaaaaagataatccggtcttttaagagtcgggaataaatatcgtagcttctttcgccgcgattggtttgttccacgaccatgggtaccagtgccatacttatgcctcctttgcgaggctcgtgcagcctcttatgcttcttcgctttcgtctttatttaagccttccacttctttcgcattgtctacgagaagttcgacggcttttttgcgttctaagtcagacttcatgaggtccttgttggattccatcatggtcttgaccatttcttcttgtttgtcttcgtcgcctttaaagtagcgttcggacatttctctggcgtaagcttccacttcgtcatcggtgatttcgaatttttccgctgccacaatggcttcaagcaccaaggacttcaatacttccttttcagcgtcgggacgcatggagtttttgaagtcatctaagctttggcccagcatttgcaggtattgttccagttgcaggccttggctgcgcatgttgttgtccatgttgcggatttgttcatcgatggcgttgttgaccatgacttccggcacatccaccttggcattggctgcggcggcttccagcgcgcggtccatgcgaatgtttttcgcattggcttcgacttcttcggtcttttgctttttcagatccgccttgtattcgtcgacggtgtcgaattcggaaatgtctttaatgaactcgtcgtccacttccggcaattcttccacggcgatggaatttaaggtaatggtaaagacggcgtctttgccctttaattcttcgttaaagtaatcttccgggaatttcacgtcgatgtcgaaggtttcgccgatttcgtggccgacgatggcttcttcaaagcccggaataaagctgccgctgcctaattccaattcttggtcttcggcactgccgccttcaaaggcgacgccgtcgactttcccttcaaagtcgatgttgactttgtcgccgtcttctgcggcgcggtcatcgatattaatgtgacgggcatttaagtggcgttgcttgtcgatttcgttgtcgatcatttcgtcggaaacttcgtcgggaacggcttcgatttcaaggcccttgtattcgcctaaaaccacttccggcttaatttcaacgctgacttcgacgataagatccttgctgcgatcgaagttttcttcgtcgatgtcgatttccggttggtcgatgacttccagttttaattcttccagggcgtcttgatagatcttcgggagcacttcgttcagtgcgtcttcaaagaaaatgccgctgccgtagaattgttcgatgattttcttcggcgcgtgacccttgcggaatccgggtacgttaaagtaatttttgttgcgtttataaactttcgactccgcttctttgatttccgcgtagggaaccgtcaggtcgaagtaaactttattcttttcttgctttttgatctctgtcatcctttatccctccataatttatatctaaagcattataccataagggcattaaaatctacagtttcaggcaaaaaatcacggcaagatgccgaatttcccgcccttagcccctagactctgcgttcatagacaaaatggcagtagggacaagtgatctttactttgcccgcaccccgcggcaggcgggcggtcttgttgcaagacgggcagtgaatgtagcggaagtgccgcaggtctttcagccgcctgaaaaaccgctttgccgggcgaagggcatttaaaaagcccgtgttttcttcccggcgcttgcctcgctcccgggaataggcgcgaaaaatcaccattaacaggagcacaagggccccgccggaccaatagcccttctcgaaatggcgcccggccatgcgcaagagaagggacgcggcgaagagcaaggtgttcagctcgtcccaaccgtagcgaccggccatgaagcggcgaaaggcgttttttagttccctcatacgaggtagctgcggatcatttcggcgctatcggtgtattgtttccgctcttcgtcggttaaatcaagctcgacgatttcttcgatgccgtctttgccgataacgcagggcgtggagacgtagacgtcttttacgccgtattcgccgttgtgaagggcggagacttgcagtgttttcttttcgtcgtaaagaacggcgtctaagatggtgtttaccgtgttggcgatgccgtattgggtggagcctttgccgaagaaggcgcggtggccacggtagacgatggatttttccacttccgccttatccagcgatacgtcgtgttcttttaaatagcgttccaagggaatgtcattgatcttcacttgggaatagggcaagaattggctgtcgccgtgttcgcccagcatcatgctgtgtacattgctcgggctcacgtcgaagtggcgggccaagatggtgcggcttcgttcggaatctaaggccgtgccgcttccgatgatgcgggaggcgtccatgccggaaagttcccacacacggtaggcgatggcgtcgcagggattggtgaccacgacgaaaatgcctttaaagccggcggccatgactttgggaatgtagtctttcacatcggcgtaattggcggcgtattcgtttcgccgttggccgtcttcgggaatgcgcccggcacagacgacgatcatgtcgcttgccgccacatcttcaatggtgccgccgacgaaatgggtgttgtggggataaaagcccgtggcatcttccaaatcgctaaccacgccgtctaagcgcttgtcgttaatgtcgtgtaatgtaatgtgtgtgcatccgccgcgcaaagcccgcgtataggcgacgatttcgccaacgtgtcctgcgccgataattcctaatttagccatgatccgctcccttacttaattaattctctcagtgcttcaaattcatcgacggacaaggtaatgcccttgctcattttcgagtgatcttcattccatgcgcgcagatcgaatttcggatcggcgccgttgtaggatacgcgatttaattcttttttccaaccgttcggcgattcagacaagacgcctaagtgctccacgatttcaaatctaaattctgccacaattcctcctaacagaaaaaagcgccgtgggcgctttcatctactcaaccgctgtgactgtatagcctgcatcttccactgtttttttcaataaggcggtgtccagcttttcgccttccacaatggcttcttgagggtccaagcttacctgcgccttcacgccgttaagttcgtttaacgctttatcgacacgtccgacgcaatgattacagctcatgccgtcaatttttaaaattttcttatccatttttttctcctcctttttttcattatacccatgtgttttcgtttttacagagggaatttccacaaagtcgatggactcggcggattcctctttattttcgctttctgccttttccaatgaaaggaaatttaatctgagggcgttggtcacgacaaaaacggagctgaagctcatggcaagtgccgcgatcatggggctcagggttaggccgaagggcttgtaaaacagccccgccgccacgggaatgcagatgacattgtagaaaaaggcccagaataaattctctttaatgtttcgaatcgtggccttggaaaggtccatggcgcttaccacatccattaaatcgctgtgcattaagaccacatcggcgctttccatggcgatgtccgtgccggcgccgatggcaatgcccacgtcgcttctggcaagggccggggcgtcgttgattccgtcgccgaccatggccactttccccgcttcctgatattgacgcacgaaggcttctttttcatcggggagcacgccggcgtgaatgtggtcgatggtcaaatcctgcccgatgaccttcgccgtcttttcgttgtcgccggtgagcataatcaattttttcccggcgccgtgtagcttttcaagggcccgtttggaattggctttcaccaaatcctttgccgcaatcaggccgataaattcattgcctttcgcaaaaaacaagggcgtcttgccctcggcaaggagggtgtccaggggctcttgtatgcctgaaagatccgcgccgacggaatccattaatgcttcgttgccgccgtagtagacttcgccgtttaaggtggccttcagtcccctaccgggaatggcttcgaagtgttcgagggtaaatttattatccgtgccgtgtgtttcttcgtaggcgcgtataacgccttcggccaagggatgctccgagggtttttccagggcgtaggccgtggcgaatagttcttccgccgaaatgccggcggccaccacgtcggtgacgtagggcttgccccttgtaatggtgccggtcttgtcgaagatcaccgtgtccgcatggtgtaaaacctcaaggctttcggcgcttttaaagagcacaccagccttggcgcctttgcccgtgcccaccataatggccacgggagtggcaagacccagtgcgcaggggcagctgatgaccaagacggaaatggcgagctttagcgcaaaggcgggctcagccccgagggccagccaaatgccgccggtagccaaggcgatggcgataacaatggggacgaagacccccgccactttgtcggcaattttcgagatgggcgccttcgtagcgttggcgtcgtccaccagagcgatgatttttgcgatggtggtgtcttcccccacccgcttcgcttccataatcaagcgtccctggccgttggtggtggcggccataatttcactgcccgcggttttttccacgggaatgggctcgccgcttaaggcggattcgtccacggaggagatgccttccaccaccacgccgtccacaggcacattttccccgggcttcagcagaatcctgtcgccgatttcaatggcttccacgggaatcactttctcttccccatctttaatcaccgtggccacttccggcgtgagatccattaaggagcgaatggcgccggaggtcttgtgtttcgccttggcttctaaatatttccccaagtcgattaaaaccacaatggtggctgccgactcaaagtaaagctcgtggccgtaggcggcgatgcgggccatgtccccgtggccaaagccgtaggccaattggaagatgacatagatcccgtaaatgtaggccgcaccggagcccatggcgattaaagcgtccatgttcgggtgcttgcgcatcatggattttccgccgttaacataatagtggcgattcaaaaacagaatcaccgtggtgagcataaattgcaccaaggcaaagatgagtaggttgtcccggccttccaaaaaggagggcaccggcgcacccatcatggagcccatggagatataaaagaggggaattaaaaagatcgccgagacgatgagtcgccggcgttttaattccaattcttctgaaaaaggatccgcctcaatggtttcgctctttttgtcctcgccttctaaaaagcctttataacccgccgcttccacggcatgaaggaccgcgggttcgatgccttcctcgccctccactttcatggagttggtaagcaggttcaccgccacgttcgtcacgccgtcgactttagcaacctctcgttccacggcggcggaacaagcggagcaggtcatgccttcaacgcgatattttcgttccatagggcctcctctcaaatagtcgttattacttactatttatatcctaccaacgtagtgggattatgtcaaccgatggcaggatgaagcagggcggcgatctcttttttctcttctgccgttagctccacctgagtccatacgccgtccgccgtggtgaagaggtagagcttcgggaaggtgcccctaattttttcgtaagccgtgccgtaaaggccaagctgcagtcggtaggtggccatggcgccggtgcgtgcgcctcgcgcgccggttttgtaatccacgatggccatgccatcaggcaattgacgcagctgatcgtaaaagccttccaatataacgccgtcgaattccgcgcggaagggcacttctgtgtcgatgattttgccgcggccgaaggtggcgtcgtagtttttaatggcctcatccaattcacggtccacgccgcaaactcgggcgcgggacagaagcttttcccgaagacctttctcgggcttgcgagcacgctgggcgtagtggtgaaacaaaattcccagctgcatataattcttctcgctctttacgccctctttgccgtcgtcgaaaacggcccgcccctttaagaggcggctcgcggaaaccacgggcttcggctgtgccatggcgatgacgggagccgtcgctttttcaggcaagtcctcttcacgtgcaggcgcggccatgggcgcaggcgtcccttcggcgaaatctatgtcggttaaatggctctcaagcccttccccctctttcgatttcagcagatagacgtggctcttcgcccgagtcatggccacatagagcaggcgaagaatttcctcccgagccttttccgccgcggcccttcggttcatttcgtaaatcacaggcgccgcgggattgtttatgcccacgcctctttctgcgctgtagttccacaggccgccgtcgttcaggggcttggcgaagagatggcctaaatacactgtgtcgtactccagtcccttggccttgtgcatggtgaggatctccacggcacagtcgccgccgaatgtggctgcgcccacctcttctgtggcttctttttcacggaggctatgaagaaatccttccaggtgatccccttccctgtcgtattcttttgccatggcgaggagctgatccacattggctacggcctgctccccgcccgctttaaaggcgtaggcgcgaaagccgctttcttccacgagggccaggagaaattcatatacggaggcgacggagcccgcgtcttcgaaaaatttttctatgcgccccatacgctcgcgaacactttctctgcagggagaatctttcatcctatgaaagagatcttcctgattcgcaccgataaaaggcgtgcgcaaaaaggccggggaaaagatgccggtggctttcgcttccatggccaagattaaatcccgcacttctcgggcccgaaaaaagccttcggcgctgcggttcacataggaaatgccgtagtcccggaagatggattcgtaaatccccatgtattgctttcgccacaaaagcagggcccgggatgtcgacggatgcttttgaatgtcttccacaatccacagggcttcttttttaatggcctctttcggatcctcctcgcctacaaggtccacgccctttagggcccactccccttccccgtggcccgtaatgggctcgtagtcgggaattttttccgcaaagagatcccccacagcggccaccaggtctttgtgggagcggtaattatttaaaagggccatggcttccgtgccctcgtttaaggcctcgccgcggaaattgtcgccgacggccacatcggcgccgcgaaagccgtagatggattgttttctgtcgccgacgacgaaaagtttcccatcgccctttaaagcacggagcatgcgaatctgcaggggattcgtgtcctgaaactcatcgacgagaatgtgatcgtaggcgcaggtaatcttccctgattccaaaagggccgtggccttttccaaaagatcgctgaagtccacggcacccatggcccgcttctctttcctatacgcttcatccagccgcttcagggcgcggtcgatggcttcgataaaggggcgatttttcgcctcttcctttaagagcaggcgatacctgagttcttcgtgtcgtttttttatgtcctcgtctattttcagcgacgacccgtcgggcatttccaggagaaaggcccgctgcatctcttcactttccccttttattgcctcgagatccgcctcgtctaaatacttggccagtttcgatgccttcgtctttaaggcgccgcgaagggcgggcagaaaatcgaagtattcatctaacacatcgtcatcggcgattgctctcgggcgaaaatccccgagggcgccgcgggtgcgaagatcgtcgtagctttttaaaagcgtgtttttaaaattattcgccgtggtaccgttcatgtccagaaaatcgagaaaagccccgtcggaaaaaatgtccttcgccactttttcgtagctcttctccaaaagggcccgcgcctcgccttccgccagctgcgccatgccgcccaaggtgtccgcctccacaccatagatggagagaaggtagcggcaaaagccgtcgatggtctttaccaccaaacgatccgtctcctcctctgtaaggctcgccgccatacgcacggccatttcttcggcggcgcgattggtgaaggtaatggccaaaacattttcgttagtttccgataaaatccgcttcacccgctcggtcaagaccttggtcttccccgcgccggcgccggcagtgagaaagacggagcgatcgtaggattctgcagccttcaactgctctttatcaagtggcatctgccgcctcccttctgcacaaatccccgtaggcgcaataactacacaccgattcacttaagggcgcgtcgttgaaatcgccgcttttcatggcgacaagcgtccgatccagagcgacctccccttcgtcgagaaaatcgtcgaaggcctcgccgtcgtaaattctttcgtttctcaagcgactgtactttcctgcccgagtcgtgtcccgcgccataatggagactttaccattttctatagacacatattccaacgatgccggccgattgcccatgtgtcggcgggccagggcataaagggcgagctgcatgactttgtgggccgccacatgtttgtattcgggaagccccgatgatttgtagtcgattaagatttcgtcgccggattcgtttctgtccacccgatcgatgacgccgtgaatctccacatccttaaaaggataggtgaaggatgtttcaaaggccgccggtcgaaaggcgccgtttttcttttcatcgttcagacgctcctcctccgattccacggcggcgaggagggcgcggaccatggtctttttctcccacgcccaaaggtattcgggcctgaggggcgccattttctcgtcgtaggccccttccacgaaattcgccagcccatcttttgaaagcttcttcgaaaaatacagagccagcgcttcgtggtaaatggtgcccttggccatggcagggcggccgtcttcttcctccggcgcacatttcagcacccgctcggcaaagtagaggaaggggcaacgtaaatagctgtccagggccgaaggcgaaaggcccttctccctcagggtctgtgccataaattccgccccttcttcggaaaagacgtcgtcttctgagatcaggtcccaatttttttcatagaccccctcccattgatccaagtcttcagcggaataaatttccttcatctgcgtgaagatcggcgcttcttccccgcttcccactttgtagagcagggattttttcgatgaagccattaagtaatgtagcctttccgtggtctcttcgccttgaaaaaaattcacatagagccccacatccatggcggattttgccatggctcgattcatcaaactgtcctcttttttggcgggaataaatttcccgtccagggaggcgacgagaagaaggtcgtaatcgccgccgtaggcctcatccagtgacagaatgtccacgccgtagacggcctctttttccaaataggcgcagaggatggattcaaactcccggccgttaatcctgccgtaatcgccggcggccgcatccaatgcatcggtgagcatggtcgccgccgcctcgccgaacgaaggcgccgcctctgccgtgagacgagcgaaatcatcccagctgccttccttctcttgcttccaggttcgcaaaagggctttgtgccccatcaacagatccttcgtctctttggaaaagtaatagggcaggggattttcctcgatttccgaaagatccttcacgcccaaagtctctatggccgccgccaatgcaggcgccccttccacctccgccaaatccccacgcaaaaaggcgcaggcagaaggtgcgtcttctccccgccgccacaagaggcgcagttggtgcagcgcctcctcgccgagagcgtaggcataggctgcggtcggaatctttgccgaagagaggtgtgccttcatggccgcccgatccccttcatgattcatgaccacgccgatcttcgccgccggattttccgtcagcgtcgacgcaactttttttaccatgtggcgcagggcccgctctccgttcaccgtttgatacagcgccacatcattcggttcattcccctccccgaagggattgacctccaccacttgagcagcagcgtctaacttttcaagcagaaggcggtggcgttccttgtaatgggaaaagcccatgacaatgtacttccgcttcggattcactttcgccgtcatggcctcggcgaacagagcgccttccgtgatgcagtccgcctcgattacggcatcttcataggcagacaaaagggtcgagcagtcttctcgccaactgtaaggcaggtccttttcctcaagacccaagtaataaacatcgtcgcaccactgaaagagtcggcgaattttttccatgtcccgcaccgaggcgaaggccgtttccccttcttccagccgctttcggaaaccataggccgcccgccactgattccgcgtttgcgccatggcgagctccgccattaaatcgtcgaaggtgaaaaaatctacgcctaaaaacccgacggagcgagacaaaatttctttgctcctcgcgatccacttccgattgggcataataaaggtagcgccgatgaaatccccctctgccaaggattccaggccgcttcccatgggcttatcgatgatcttcacggcctctcctttcttttttcacaaagcgcatggcgcatggcccctgccacgccgcccgtgccgtagcctaaatcatacatggaggctctccctgatccgctgaaattttcccttgggctcggaaataaacaccttgccggacacttcgggaaagtcttccgtttcggggaagaccaatttataggcgtgaagcaattggtgatgcaattcgccgaagcggcgggaggcgcggccgtattttctgtctcccaaaacgggatggccgatggatgccagctgttggcgaatttgatgggtgcgcccggtaatgagctccgcctcaaccaaggtgtaatcccccctgtgcttcagaggccgataaatgcccacggcatcttttccgtcgtctccttccacgactcggttcttctccccgtcttttgtcaggcgattttccacctttcgcacatccttcagctccccttccacaatggtcatgtaatacttctccacttcccggttccgaatccagccgttggccgcccgaaggcccgccgccgtcttcgcacctaaaatgaggccgctggtgtttcggtccaggcgattgcaaatggaggggacaaaggtcttctccgcccgtggattgtagcttttcgtgtggatcaaataggctagcatgtcgtccaccatgtttcgctcgtaggccttgcccgtgccgtggctcaacacgcccacgggcttatccataataatgaaatcctccgattcgaagacaatggcgggaaacttccccttcaccaacttcggcgtctttgaaaacttcgcaagcgtctcgtcggaaaaatagatttccaccgtgtccccgagggccaagacatcttcctccttggccttttttccgtttaccgtaatatttttctttcgaatggatttatatagaagcgacggcttggcattgggaagcaacttttttacatagcgatccaagcgcatgccggcgtcatttgtgtcaatttgattagagatcacgagagcctctctttctttcccgttcctgtgatataataatcttactctaattatatcgaaatctacaggaaagggaaaacagcatgaaatctaacggaagagtttcgaaactgttcgtaaactttttgcgcattgtggtcgttctactgatcgtcctcgtcctgctattcatcatcaagtggcggatgaaccacttgttttccatgatgacgccggatgatcgaaaagacaccaccattaccgaagagatccgctcctcgaaggagcagatcgacaagatctccagcgccgccaaagacgcatcggaaaaaaccaccttacttaaactggaaaccacagacccggattccgtggccaagcaattaaaggatttgggactgattaacgacgccacggccttcagcaacatggccaaacgctccggcatggcccgctacattacggcgggaagctatgaaattccggaaggcgccaccgccgaaaccattttgaaaaagctcacggaaaccggcttgcaaaaagccacccgcaccatcaccttggaaatcccctatggtgccaccgacgaaatcatcgccgatgtggtcatgaaagaagatttagtggcagaccgagccaccttccttcaaatgattcgcgacgccggcgccgtgccccggatcaaacccggcggctacgtcattcacgcgcccattaaagccgcagatctattaaacacccttatgggaggaagcggacaggaaaaccccgcacctcaaggggagcaaccggcacaatcggctcaaccggcccaacaataaacgcgaaaaagccgcccgatgaaatcgagcggctctttttgtgcctttaatcgtattgaacgatgcgcttggccacggccatggcggcgacgcagccttctccgcaggcattgatgacctggcggatgtttttgtccacaatgtcgccggcggcgtagatgccgtctatggcggacatttgattttcgtccactttcacatagcccctgtttaattccaaaaggccttctaaaaattccgtttgtggtttcacgcccacgtaaatgaaaatccccatgggccggtcgccttttttcaccgtaaaggtttcgtcggttttgttgttgtggagaacgaggccgtcggccatgttttcaccgagaacctccttcagctctgtatgccacatcacggaaatattttcgtgggccagggccttctccgccaaaaagcgttcggcgcggaaactgtctcggcggtgaacgatggtgaccttcgcccctagatttgccatataaagcgcctcttccacggcggaattgccgccgccgatgacatagacatcgccgtcttgatagaaggcgccgtcgcaagtagcacagtagctgatgccgcgggagacgaatttttcttcgccgggaacgcccaggcgattgggcttggaacccgtggccacgaggacgtatttgccttcgtaactgccgctttccgtcttcacgattttcgtctcgcccgctgactcaacggaaaccacccgctcgcgaatggtggcggcaccgaaagaagccgcttgcttcgccatgcgcatgccgatggccatgcccgtgtcctgtgggagcgccccggggaagttttcaagagacatggtaaggctcatttggccgccgtccatctccggttcaaaaatcactgtgtttaaatgggcgcggctcgcgtaaatggcggcagtgaggcctgcagggccgccgccgataatcatgacatcgtacataattccctcttatttcaataattccaaaagacggcccgtggctttccacttcacctgtcttaattcgtcgatatttttcgctcccacgagcaccatgacgatcttcgtcttgtcgatcaaatcctttaaatacaccgaagcgtagtccacgccgccgtggacgatgtaccttagaatttcgccgctaatggcgcacatgtctgcgccgagaatcaaacacttcaccagatccaggccgtttcgtatgccgccggatgcggtgatgtgcagatccttcttacccaatgccacggcttcgtgaagagcataggccgtgggaattccccagccgtaaagctccgtcatatccgaattaaagtagcggagattttccacctcaaaaaaattcgtgccgccgtggccggaaatatccacgtggcgaatgcccaaatcgtagagtcgctcgatgacggaggcgtccatgccgaagcccacttccttcaccaaaataggcacgtccaaggcctcgtttacggcgcgaatccgctccgccgtgccgcgaaaatcccgatcgccctcttccatggccagctcctgcgccggatttaaatggatttgaagggcatcggcgtgaataatatccacggccttcttcgcctcgtccacggtgagattgccgttcatgttcccgaggacaatgccctcatcgccgataatctcccgcacgattttaaaactttcgatggcttcctcatcttccatggcgatggtttcactgcccacggccatgggcagatcaaagcgcttggccagatgagccaaatccgcattgatgttttccgcaaattccgtgccgccggtaatggcgttaatcatgaggggaaaatgaatcttcttgcccaagtacgtggtggacgtgtcgatttcgtcgaccgaaagttccggcagcgaaatatggggcagatacatatcgttgaaaagcggatcccctcggtagtccgtcttcaaataattttctacatgctctctttttctatactttctcacttgcatcccagcctttactcactatgatgaatctatcataccatcaaatccatgttgcctcaaagaaatttatactatctatcacctaaaaatttacccggacaacaacatctatttctccccacgaaaaaaccgcccgaaggcggctttggattggcggtttagaaaaactgattcagaaaatctttagacaatgaaaaaggctatgagtttgagtgctcatagccctttatttaatttttataattttctgcctgttctaaaaccatatcaaaaatttcttcgctccattgaggaggatatccgtttttataaagcgggaaaatgatcggctcatcttatttgagcttgctctgctgagtacttttctcaaagaacttattgttgataaatactccgaaaaatccagctaacaagcacagcacaacattaacggcagcagctatcaaaatcacttcatttgtataggcggcaaccatttgtgctgcttgttctggagaaaaggtagatgacatatattttactaaaccttcgacgcctaaaatttttgttaaaagaatactgtgcatcgaatcggtaaacatgacaacactaaaagcaatggcgatgcggttgctattatcgtactttccgataatcagctcgcagacaatccctgcaatcagagtaatcggaatcatgatcccataacctaaaattgcatataccaacccaagcacagcccaaaagagaagcgctgtgccacgcttttgtacttttcgagccgcaatcacaaaggtcggtccgatcacaaaagcggcaaacccggctgaaatgtagagggcagccatgcctaaaagtcccgtcagcatactgattccaaaggagacaacacagccaattactgccaatacggcgatctgtacaatattttttagtttttcatcataaaattcctttctgaacatttaattttcgacaacatcaggcacaatcatttttttgtcgaagatgttgttgttagttccaaactttaatttgcgaatctccagctttccgccttgcttctcgattcgataagatctcgataaagacctccttgcagcatcaattcatcatgtgtaccgcactgctcaatccctgctttgttcagtaccaaaatccggtttgcattacggatcgtcttcaagcggtgcgcgatcatgatgacggttttgttttgagtaagggcttcaatagctgctttcagcttgtcttcgttttccggatcaacatttgcagtagcttcatcaaagatgataatcggtgcatctttcagcattgccctggcaatggaaatgcgctgtttttctccgccggaaagacttgttccaccttctccgatcatgctctgatagccatcgggcaaggcggaaataaagtcatggcactgagccttttttgccgccgcaatcacatcatcgcgggtggcatttgggcatccgaatttaatgttgttttcaatcgtatcggcaaaaagatagacatcttggaagaccatcgaaatatgattcataagattttcgagggagtaatcttttatgttctttcctccaaggcgaatctctcctgaattgacatcccaaaagcgagagatcaaattgcaaaaagttgttttccctgaaccagacggccctacgatagccgtcattgatctttcggggatatagcaagacacattatttaagattggcttttcgccataggcaaaggaaacatttttaaattcaatatcgtgttgctgaagtgcatcattgatatgaccttccggcatatcttgcatttgattgacgtaatcataagaatccatcgcgttgtcaatggttctaagcatggccatagcactaccagaagccaataaactgttaaaaatcacaaaactggcaaccagcgtcatgatggtatagtccaaagaaagctctcccgaaaagtagcatgaaagtgctgtggcaatcataaccgaaatcgtgatcgcaatgatgattttcagcagtaccgtgtaaggcgtaacggccttttcaaggctcaacgtcgatatttttgtttcttcaaaactttgatccagcttgttgttattttgtccgcccaagttataggacttgatgatctgcataccttgcaaggttgccagcacttctttcgtgagatcgttttgtacaacagaaactcgatccgaactctttttagatctttgctgcattaaagcggccgccgccaagaaaatcaaagacccagcgatagcaatgagtgcaattttccaatgcagcataaaaagggacaggataaataccacggttacaagcagaccgccgaataccataataaaaagtgtgggcacccaagtttcgagactgtccaactttgtcgtcgcaatggccgttaaatttcctaagctaaaatcattgaaaaagcccattggcacttttttgattttttctcccatagcgatacgtttatttgcggctgtaaaatagccggcatgcgtttgcttaagcatggaatttttcttagaaataatgatgcccagtaaggaaagcaataagaatgcgctgcacataccaatcgtctgccacgtaatttcctgctttataatcgccgcaatgaccaaatagatggccataaattgaaaaacgttaaaaatcgcgcccaaaaaactccagatcaccgaggagcgaatcattccttgctcacgctctgcaaatttccataacttcttaaatgtattaatcattttcttcacctcgcatggccgcactccacaattcttggtaaaccggagaatcttttaatagttcatcgtgtgttccgtgattttcaacatatccatcatggattacaaatatttgatccacatctgcaatggttttcagtcgatgggcgataataatgagcgttttgccttttaccaatgtggcgatggcatcttgcaaaatagcttcattttctggatcgatataggaagtggcttcatccaaaatgacaatcggtgcatctttgagcatggcgcgtgcaatagagatgcgttggcgctcaccgccggagagatgccctccaccttctccggcaaccgtttcatagccttgtgagagcttcataatgaaatcgtggcagcccgattttttagcgatttctataatttcctcatccgttgcattttttttgccgatgcgaatattatctttgatggaaatatcaaacaaataattgtcttgagatacataagaaatagcatccgaaagctgttctaaaggcatatccttgagagctatgccaccaattgttatggttccactatcggtatcccaaaatccggcgaggagctttgcaacggtcgatttccctgagccagaatacccgacgagtgcattgacactaccttcattgatgtgcagattgacatccttgataacctgattgttgtcatcgtaagagaaatacacgtgatcgaaagtgatgtcatagcgtgaaatgtttagtgtaccggttgcgtgggataactcttttgagttgagaactttttcaatctcaccggcaatggttttgatgcgacccatatcgtcctcataagacatcacctgcatgatatttgagattgtgccaaatgataaaataatcaacatcaaaagatgagcgccgcttaggctaccttgcatacagaagaaaaggccaaacggaatgatggttaaaatacccatcggtgcaagcgacatgctcaccgcataatcgttgttgttcaagcccatccactcgcagtaataatctgctttggcataaacattatcgctgtattttttataggatgtatcgccttgattaaaagacttaatgacttcgatgccgttgatatattccacaattgagttgttcatgtcttgaccaattttgactgctttgggaaacattttaggcatgcgcttcatcgggccggccataaaaaacatgccgatcacaagaggaaccagtgccaagagcgaaacgcgccaatcgagtacaaacatgtaaacaagaagcaaaaccgggccaacaatattagcggtcatttcaggaatcaggtgagccagggttgtctccatgctgtcaacttgattcacgatgacatcttttagctttcctgtgcttaaattcaaaatgtttcctaacggcatttttaaaagtttgtccatgatatctcgcctgatttcacacaaagcaccataggtcgccgtatgagaaatcgtggtggaaatacccataaaaacttcttttgcgcacagcagtgcgagaatactgaggactcctttagtataaaaagcaaaatctgtattccctgcaatgagggcaatgatcattttgctcaagagcacataggtaaaaagtcctgccagtacacccaaaacggcaaaaagaaccgagaaaaagtagccggtcttatttttggcgatgtactttttcaataagttcatatcaaaaaacctccttagtaaatgaatgaaatgcggaaattgatggaagattttagagtccggaaacttccgcttactgagaagtcgaacgagtaaaataaccttcaatcatggataccaagtgctgtctgttctttagaaaattttcacgcgtatctaaaatttcacaggataacaagcttgcattgatgagattcgttacaaattcatagtcatcatcagtaagcaatccgcagtcgtacccattcataaagtgcttaaagtaagtaatcgaatccctcttgagtttttcatataatgcgttaagctgttcatttttcttaatctcaccaagaaatatgacatagataggcgtaaaaggattattcgccaacattttatcgacgacaacttcagccaagatatgtggtgtaagcttgttccccatatgttgaaccgtgtttgttaccgtcgcttcacgcatcctgcttcctctatccataatgtcgtagaggatttctgccgtatttttgtagtagtagtataatccgccggctgataaaccggatttttcacgaacatcatccatcgtcgtattgttaaagcccttagaagaaaagagtgccatagcagccttttgaatgtcttctttacgcatttccggatctaatcgttctctgaccatcattttcctctccttgaccatcattttcctctccttaccgaaattaatctcggtaaggagaaattaccatagactaacttatttgtcaagaattttatgcgataatggcaattcacctaatgttgcataaaaaaagaaccctgccagatagaacaagattcttgtaacgcgtaatgcttcttagtttaattttaggatgaacatcgctgtgagcttattgattttcgtaccacatactaaattttcgtaccccttagtattaggttcgtaccctaagcggcgatgccgttaaaatgtatcaaatatggtgttttgttctcatatacaactccgtcatatggttcgattagctcagtcaatagtcttacaacgcttgaaggtgtataaaattcaccgtcttcctttgttcctgatgctgcatatatttgtaaaaaatattcgtagactcttccgatcaaatcttcttcatggaatctatctccatttatcttatttatctcatcgattagacttttaattttacttgccggagctcctaaagtagcgtacaaattttgaggcaaagttccttttagggaaggattgtcctcctctatgtctttcattgctgtatctatttttattgctatatcatctgccgatgcatttttaactatgtaactccatctggatgtttcatttagataataaacattgtcagcatgataagtggccggcatctctcttagcatgaataaatcaggatgttcttctacaatttgttttcttcttgtttcaaacttatctcctgcaaactttaagaaaactaatcctattacagcgtctctattttttcagtacttccatatcctcttaatgatactctgcaattccatagaactgattctaaggacaattcctcagttttatctttattttttgccatttcacatctcctttaattaattatccagcactgatattccaaaatctccagtacatcacatttaaactacctacaaattttgcccggtacttctatgcctatactctcatcccatcctacataatcatgacatgtagagttatatttatggcattttgtaggcccggtttattctttcttcatcttttattttttccataatctatcattggaaagacatcctccatctcaggtgatgcttctactatgtacagtccttcgacagtattataccaaattttataactttatctttgcaaggtgaatgatggtttttagttcatgaagccagcattaaaaaaccgcccgaaggcggctttcttattttctctttccatccacgatgtgggtttgtttgaagcgaatcattttttgaatttcgccgatgaccaaggggatgagggcggagatgaggacgatggcccagtcgatcacgttcaggtccgtcatgtggaagagttcttccaggaagggaatgtagaggaccacgaggaccatggccaaggacaggagcacggcttggttcaggcgcttgttggtgaagaagcccattttaaagagggtatcgtcgatgcttctcgaggagaaggagcggaacagttcgctgaagaccaaggtggagaaggccatggtgcgggaatagacgaggccgtcgccgtccatgccgtgggtggtgagggcgtaatagtagacgcccagggtggccgccgtaatggcaagggattggatgatgatggtaatggtgatgtttttatccagaatcggttctttgggatcccgcggcggttcgtacatggtttcttcttcgcctttttccacgccgagagccagcgccgggaaggagtcggtgactaaattcagccacaacagctgaatgggcaagaagggcgtgggcaggttcatgataatggagaggaagaccacgaggacttcgccgatgttgcagctcaagaggaaggtgacgaattttttaatgttggcgtagatgattcgcccttcttccacggcgttgacgatggtggcgaagttgtcgtcggttaagatgacgtccgccgtgtttttcgccacgtcggtgccggtaatgcccatggcgatgccgatgtccgcctttttaatggccggggcgtcgttgacgccgtcgccggtcatggcggcgatttcgccgttttctttcagggccgtcacgatctgtaccttattttcaggggacacgcgggcaaagacgcgggtggtctttacgatttcgcgaatttcttccggggtcttgtcgttgagctcttcccccatcatggccttatcgccttcacgcaaaatgcccagctcttcggcaatggctttggcggtgagaaggtagtcgccggtaatcatgacgggaacgatgccggcgtttcggcattctttgatggcggccttcacttccggacgggccgggtcgatcatgccggtgaggcccacgaataccatgtctttttcgttttcttccgtggaaggattttggggcatggcgtcgtaatttctaaaggcaaaggccaacacgcgcagggcttcttgggcaaaggcgttgttttgctccaagatcgcctttcgatcggcttcggtgagatccacgatctctccgtctttaaacaggtacttgcagtttttcaaaaccacatccggcgcgcccttggtaaaggaggacaccttgttgtcgaagaaattttcgtggaaggtggacatcatcttccggtcggaatcgaagggaatttcgccgatgcgggggtaggcttcttccagggcgtcttcctttacgcccagcttgcccgccagggtaatgagggcgccttccgtggggtcgcctaaaatgctgtacgttccgttttcttcgattaagtccgcatcgttggttaaggtggcgatggaggagagggtttttaagcccttcatatcgtcgacggagacaacagatcccttataggacagctccccttccggagcatagcccgtgccggagacgtccatgactttgccgtcgaggtagactttcgtcacggtcatttcgttttgagtcagggtgcccgtcttgtccgagcaaatataggtggtggtccccaaggtttccacagccaagagccgcttcacaatggcgtggcgcttggccatattgcccatgcccatggaaaggacgatggtgacgatggcggggagcccttcgggaatggcggcgacggccaaagagaccgaggtcataaacatgcgcagggtgtcgtggccgtagagtttgcctacgagaaaaaccacggcgcagacggcgacgacgagaatccccagggctttggagaggcccgccagcttcttttgcagcggcgtttgttcctcttccatggtggagagggtggtggcgattttaccgatttccgtgtcttcgcccgtggcggtgacgatgcccttgcctcgtccgtaggtaacgatggaggcggagtaggcgtagttgtctctgtcgccgatgcccgcatcgtcttccagagtgatcgtggcatctttttcaacggcgacggattccccggtaagggaggattcgtcgatttttaaattggtgctttcgatgaggcgcatatccgccggcacaatgtcgccggtttccaacacgaccaaatccccgggcacgacgcgcatggagtcgatttccacggggcgccccccacgaatcacttttaccgtgggagagctcatcttctttaaggcggcaatggcctcttccgccttgccctcctgcacgatgctcaagacggcgttgacgatgacgatggcgagaataataacggaatccaccatttcgcccacggcgccggagataatcgcggcgattaaaagaataatgatcatgggatcgaggaattgctccgccagctttttggcgaaagacttgccttcctcttccagcaattcatttctcccgtacttgtctaaacgcttttcggcatctcccggggcgagccccgtcttgtcgtcggccgacagttcgtcgagcacttcccgggcactcattttgtaccaatccatgtaaacctccttgtgttataaaaaaagactcctgtcccacggacaaaagtctcacagcctgtataggatccttggccgggcgttagccggattgacgaccaagaataatcgttactcccctttgtttcgacaagtagtataacaaatgaaaggggtcgcggtcaatgaagaatggataaaaacaaaggaatcggcgacaatttccctttttctttctcatggcttttcaaaaaccggcatattataatagacgcaagcaaaaccgttgaaaagaaaggagattcccgtgaaacaaaaacacctgtctttgctcctgctgcttctgtcgatgcttatgatcccgacgagcagttttgccgcaagcccggtccgactctttattaagggaagctacgttcaaggcgatgtggcgcccatgatcgtcaaggaccgcaccttggtgcccctgcgcctcatcagcgaaacattgaattacgatgtgaggtggaacggcgccgaccgcagcgttcgcatcgtgcaaaatgatcgcgccatcgacctgaaaataggctccaccacggcctatggcttgcaatcgggcacgaaaaagaaaatcgccatggatgtggcgcccatcatcgttaaagaccgcaccctggtgcccctgcgctttatctccgaaaacttcggcgaaaaagtggactgggacgcaaaaagccgcacggtcatcatcggggagggctacagcccgaggacaaaccccgacgcgctgacccttcatttcagaaacaaaaccttcaacatcgaggccaaaatgtaccgcggccaaaccatgatccccgccgaagactttgccaaggccatgggctggaactacgtgaagaaactgaacgaatacgaagagaaagtccccgtgctccacgatcccgcaaacggcgtggaaatttacaactacggtgacgcctttcaatgcgacggcatcctctttaagcccatggatggtgaaaatgctaccgcagcttcggcaaaaatcggcgggcgagactacctctcccttcgccacttggccgatgtactcaatctgaacatcgagcaaatcgaaggccaaatcacccttcgcgataaatctaaaacccaatacaagctgtattacaagccccttttagacggcggcgaacgctacggctatgaggtggcaaaagtgaattccattcagtacaagaaccaccactactacattatgcctttgaacaaaaccccggaagaatacaacggcctgggaattttcgacaaggaaatgacgcctatcagcatgtgcaatttctacatgaacgtggacaaaaacatcgtggaagccgcctctcaaggctgatgccatcaacagaccgccacatgcctttcggcgatttcagaaaacgacaaaaggagagagaatcatccgattccctctctctttttgcatgtaaactacttttacgcgtcttttagaaataaccgtatcataatattctagtactaggcaggaaaatctttttcgaatgattcatgaacatgttggtttgatttaaaaagataaaccccggactatatccgaggtttgtcagtaaattggaaatgttcttttttttatagtacaattgtttgtttaattcaccttgtcggctacttaattgcctcctacaatttgaattttatcacttatatgtgtttcaaccgtcaactcaaccggtttcttttcctgcttcttttcaggttttttgtccttatcagtcgtcacagagtaaccgtcggattcagaagagctaccgttattgaatggattgccggtgccggtaggaccatcggtgttaatgggatttttaggtctactaaatcgatcgtaactagaaaatacaaagcacgcaatgccacaaggcttaccatcgactatagccaccttatatgcataaccataaacgacggcactgggcgacctcatatttctatcgtggcccggggaatttttccagatggtaaaggcctctcgaatcggcttgtcggaagcataggtccaaccgattaggttttcgccgaggtagttttcacgaagcagattcgacggagatttatggtcgaaggtgccatctgtggccaattgttggatttcttcatttgcccgcttctgagcgataaggtccagctccgatgtgcgaaccacttcgccaaggcctaagctttttctgtaatttgcgtaggcgacggtgtagtaatgggcaaggctgtcgtcggttgcggaatcgactgtctgcggttggggtttaaccggcttttcttgtgagtcgcctcgtccatagtcatttccttcattgcctccgtcggagttccgccctttattcccttcaggcgacttcgaggggtctttttgaatcaatacttcgcgattcacccagtcgaccttgtaacccaacgcttcggacacgaaacgcagcggaacataggtgcggtcgccggcaagtaccgtcggcgtgtctaatttgcctttttgagttttgccgccggaaatttcatatcggtccgatccgatggcaaagcgaattgtctttgaagtcgatcggatcacgacagtgcctttcgggctgcctgcctgtctcggaatatattccacttggttgcccaggttctccgcgacaaagcgaataggcaccatggtcctgctcgtccgcacgttaatatagggccttcccatttctttcgggatatgttgatctttcccgttaattttaatggtaaccttattttttgcggcttccggcggcaaactgccgattcctttcgccataactcctgtgggaaccaagagagtcaacaccaaaaaggcgatgacaactgttttaaattgccgtcttttcattacattcctccttgatacaaatttttatgtatttctatgaaatgattgtatcatctaatctcttttttaacaattcaaggcttggataaagttgtttccgagcaagctgtccccaataaaaaagaccccgaataaacggggccattgcgtaacaagaaaggggagtcttcctcttccttgccgttagttgtcttagtcgatcttttcaattttttccttgaagcccatgtagggacggaggacttccggaatgaagagggatccgtcttcttggtagtggttttccaagaaggcgatgagcattctcggcggtgcgacgacggtgttgttcagggtgtgggccaggtagagtttgccgtcttcgccgcggatgcggatgtttaagcgacgggcttgggcgtcgcctaaattggagcagctgcccacttcaaagtatttttgttgacggggagaccaggcttccacgtcgcagctcttgaccttcagatccgccaagtcgccggagcagcattccaaggtgcgcacgggaatatccatggtgcggaaaaattccacggtgttttgccagagctcgttgtagaagtctttgctttcttccggcttgcagatgatgatcatttcttgcttttcgaattggtgaatccggtagacgccgcgctcttcaatgccgtgggcgcccacttcttttctgaagcagggggaatagctggtgagcttgtggggcaaggtggcttcttcggtaatggagtcgatgtatttaccgatcatggagtgttcgctggtgccgatgaggtacaggtcttccccttcgattttatacatcatgttttccatttcggcgaagctcatgacgccgctgactacgtcgccgcgaatcataaagggcggaatgtggtagatgtagcctttgtcgatcatgaaatcacgggcgtaggacaaaatggcggagtgcaaacgggcgatgtcgccgcgcaggtagtagaagccgctgcccgaggtttttctcgagctgtccaggtcgatgccggccacggattccataatgtccacgtggtagggcacttcatagtcggggaccaccggttcgccgaagcgttccaattccacattttccgtgtcgtcttttccgatgggcacggtgtcgtcgatgatttggggaatgaccagcataatttcgcgaatgcgttcggattttttgccttcttccagctccaattcttcgatgcggtcgttaatggctttcacttcggcctttactttttccgcttcgtcttttttgccgtctttcattaagccgccgatggatttcgacagggcgttgcgcttggcgcgcagctcgtcgccttcggttttcgccgcacgattggccacatccagttccagcacttcgtcgacgaggggaagtttgtcttcttggaatttctttttaatgttttcttttaccagttcggggttttcacgaatcattcgaatgtctaacatatttacctccataaaaaaagccgcctcatcccccatgggacgagacggacccgcgttgccacccaaattaaccgtttccggttcacttcattgtcaggctcaaaggcggattcaaagattgctcccgcctgctcgcaccaaccgcaggctctctttcgggttacatcttttactgctcctcatcgtcgccttatatcgttgatggtagtataccacagctgtggtaaaaaaggtaggcaacaattttttcaattaaaaaaagacgttcttgcggagaacgccttttttgtgtccgattttattcgggttgtgcagcgccggtggggcatacagctgcgcaggaaccgcagtcgatgcaagcattttcgtcgatggagaaaacgccgccttcagaaatgcagtctacgggacattcgggtttgcaagcgccacaagcgatgcaagcgtcagtaattttatgtgccataattttacctcctagattctgttaggtatgtgcagcgtgcttgtacctaaacacattatgttttctttctgaagtcattatatcattaccaccgaggatttcaagggctaattgaaaaaaatacaatcttttccgacgatttttcacatatcatagtaaatcagtttgaattttgcagtcacgttgcaataaaaaaggatgccgaagcatcctctttatcatttactattagtggctgtggctgtgatcgtcttcgtggtcacagcttgccgtcccgcattgggagcaaccgcagcatccgccttcttcatgggattttcgcatggagcggacagcgccgaagatggccaagcagacgacagctagtacaataatcgtacccatagttcctccttagtttaattgttctcgaccgatgggtacgtccttgactttgggttttcttacgatggcccaaatcatgactgccagaaggacaaaggccacgccggtccatacagtgaaggaaccgccggtaatcagttgtccgatttggaagacgatgagggcgatggcataagcgaagcccgtttgaaaagccagggcgaacagggtccagaatttcgagtgcatttcctcgcgaatggcgccggtggcggcgaagcaaggaacgtttaattggttaaagagcataaatgccaatgcgccgaggaaggtaaattgggtggcgacgaaggcgtttaagttggcaccttcggcgacaccgttgatgatgccgtaggtggaaacaacagcttctttggccacgaggccggtgatgctggccacggtggcttgccatgtgccgaagcccaagggaatgaagatgggggcaatgagtttacccatagcagcgagaatgctgtcttggttttccgcaaattctacgaattcgccgtggacggagatgttttgcaagaaccagatgacgatgctggctacgagaatgatggtcccggcctttttcacgaaggctttgcagcgttcccatacgctcttaaagacattttctgccgagggaatgtggtattccggaagttccataacgaagggtgccggatccccttggaagatcgaggtcttcttgagcattaagcccgcaataataacggcgatgatgccggagaagtaggcgatgggcaagaagtaccagaagccgaaagaggcgacgaagaggccgatcaggttgacctttgccccgcaaggcatgaagcttgtgacgacgacggtcatgcggcggtcgttttcgttttcgatggtacgcgtggccataatcccgggaacggagcagccggtcccgataagaatcgggataaagctcttgccggagaggccgaattttctaaagattctgtctaagataaatgcaatacgggacatataacccacatcttccataatggcgaggaagaaatacagggttgcgatcaagggcaagaagcctaagacggcgctgaccccggcaacgatcccgtccataacgagggattcaagccacggtgccgtattcattgacgagacgacgttgttgatggcatcggcaacataggtgccgagcaaagtatcgttgacccagtcggtaacggggccgccgacgagtctggcactgatgtagtagataccggtcatgatgataacaaagatgggcagggccaggacgcggttggtgacgatggcgtcgattctgtcgctggtgctcatgccgcgcttgccttgtttataattgccttcgacaatgcctgcaatggcattgtagcgcatttccgtcataatgccttcgccgtcgtcttcgtaatagtcttccaactccgaaatgacgccggcaatcttcttttcttcatcggcgctcagattcagcccgagcttttgatcgccttcgatgagttttaatgcatagaagcgcttagagtccatggctgctatggaaggagcgatgtcgtaaatggctttcgccgcatcttccaaatgctcatcgtagtaaacgtgattttcggcggctgtggcttggacttttttcgtcatttccatcaagccgtcgaggttttccttctttaatgcggaaatttcaacaaccggtgcgcccagtgcttcttcaaggcccgaacgatcgatgacatcgcctttgttgcgaacgacgtccatgcggtttacggcgacgaccacgggaatacccagatccaataattgggtggttaaatacaggttccgctctaagttcacgccgtcgatgatgttgatgattacttccggtttttcgtttaataaatatttccgacttaccacttcttcaagtgtgtaagggcttaaactgtaaataccgggaaggtcagtaatggtaatgcttgtatcctttttgtactgtccttctttcttttcgacggtaacccccggccagttcccgacaaattggtgggaaccggtcaaggcattaaatagggtcgttttcccgctattcgggttgcccgctaatgcaattttcacgcctcttcctccttcggcccttgagtttcttcaacttccacaagctccgcatcggcctttctaaggctcaattcataaccgcgcacggttaattgaatggggtcccccaagggagcaaattttcttacgaacaacacggtgttcttcgtaatgcccatgtccataatgcggcgcttcaatgggccttgcccattgatctttttcaccacgtagtacttgtctaccgacgcttgattcaagttcatgctacacctcacactgtgatacgaatacattcagccaaatctttgcccaagccgacgcgtacgcctttgatgatgacgatcagcgacccctgaacctcagatacaacacgacaattggcaccttccacaaaccccaggttttgcaagtgggtaatttggctcttgtccaatttttgatctcgcacccttagcaccttcagatccacgtttttcggcgcaacgattaaattcatatgcatctccttacaataacggttatcagtcaagagccaaaagaaaaagacacttgccttccaatgaaaatttatctcataacaaaaattataccattcgactatgtccctttcaagagaataagaaagattctcgttctaatttaccgctaaatcaatcaaagaaagtgcctttcactgcagaattcgctcccgttaaattttacacattgtatgcgtctgcacccgccttcaaaagccgtgatgaaaattgagaaagggtgtttcccttttgttttcccaataaaaaaacacgcggatatccgcgcgcttttacgagaatgtgaagtacagaaagacgatgaggcccagaaggatgcggtaggtaccgaagattctgaagtcccgctttcggatgtagtccatgaatttttgaatgaccaccacggctacgacgaagcttaccatggcgcccaaaaggattaagaaccattggaaaccgctgaaagccaggccgtttttcacgatttttaataaggtggcgccgaacatggtgggaatggcgaggaagaatgaaaattccgccgccgccccgcggctcgcgccgagtaagagggcgcctaagatggtggcggcacttcggctcgtgccgggcaccatggccaaacattgaaagaggccgatggcaaaggccatggtgtagggaatggcctcgacgcgtccgactttcgccttcacatggttcatttcgcttcgattttcgatgacgagaataaggatcccgtagatcagcaaggtggcggccacgacttgtggcttaaagaggtgctcgtcgatgaaatcgtcgaacaaaaagcccaacaccgccgaggggatcaccccgacgatgaccttgagccacagcgcaaaggtgtctttcttaatggccacttttccctcttcccgccgaaagggccagagagttgaaaaatacagaaccaccacggccaagatagcgccgagctgaatgcacacgtcgaaggcgttttgaaagctttgcggctcgaggccgataaattcgtgggccaaaatcaagtggcccgtgctggagatgggaagaaattccgtcaccccttccacgatccccagtaaaattactttaataatatccattgttcctccattaggattgcaggttcacaaatttcgtgtattcgcctttaaacaagagttccaccgtacccgtggggccgtttctgtgcttggcgataatgagctcgcctaaaccctgtttgtccgtgtcgggattgtagtattcgtcccgatagaggaacatgacgatgtccgcatcctgctcaatggccccggattcccgaaggtccgataaaatgggccggtgatcggcgcgcatttccggcgcacgggaaagttgcgacagggcgataaccggcacgtccagttccttggcgatccccttcagttgacgggagatggcggagatttcctgttgcctgctctcggcgcggccgcctacttccatcagctgcaaatagtcgatgaccacgagatccagccccttttccgccttcaggcggcggcatttggccttgacctccaggggcgtaatgcccgccgtgtcgtcgatatagatgcccatttcgttcatataggtcatggtctcgatgaccttggtccattcctccgtggtcaggtcgccggaaataattttcatgagatccacgtgactcaaagacgataagatccgctgagacaattgattgcggctcatttccagagaaaacatagccaccgtggcattggcttttaaggcggcgttggtggagatgttgaccataagggccgtctttcccatggagggacgggcggcgagaaggaccaaatccgccttctgcataccggaggtctttcggtccagatcgataaagcctgtggtgagtcccgtgaggcctcccttgttttccgagcgttgttgcatgacatcgaaggtggtaaccatgacctcgcccatgttcatcaggccgtttcgctgattgtcctgggtaatgtcgaaaatggatttctccgccttttcgataatggccccaacctcgtcgtcgtctcggtagctgtcttcgacgatttcgctccctgcgcggatcaaggcccgcaaggtggatttttctttaataatgttggcgtaggcttccgtattgcttacggcgccggcaccggaggtgagcctgcctaaataagtatagccgccgacggcttccagctgcccgttcttcttcagaaaatcggacagggtaatcatgtcggcgggttcatttttgttgtagagactcaaaatcccttcgaagatggccttgtggctatcgtaataaaagtcctcggcgtgaatattctccaccgccgtggtaatggcgcttttgtccaaaagcatggcgcctaataccgacgcctcggcctgttcgtcgtagggcggcatccgcccctctaccctttcggccattattccgcgtcgatgaccacatccacatcggcagcgatgtcgccgtgtaattttacggtgactttgtgtttgcccgtggtcttaatgttttccgagaggacgatttttttcttgtcgatcttcacgccgaaaatagcgttcatgcgatcggcaatgtcttttgccgtaatggcgccgaaaagcttgccgttggcgccgcccttggcctttaagtccacggccttggattcaagctctttcttttgcgcttcggcttcttccacgcgagccgcttcatcggcagcttccttggccttcatttccttccagttcttcatgttttcaggcgtggcttcgatggcagccttgttcggcaagaggaaatttctcgcgtaaccgctcttggcttcgaccaagtccccttcttttcccaatttgtctacgttctttaataagatgactttcattgttctttctctcctttatctttttctaaataatcggcaatggcgtcggttaattgtttttccacgacgtccatgtcgtcgctttttacttgggcaccggccatgttcaagtggccgccgccgcctaattgttccaaaataagctgtacgctgatgtcgccgaagcttcgggcggaaatgtggatcacatctttcttcttggtcaagacgaaagaagccttgatgccgtgaatttccaagagctcatctgccgcctgggcactgacgagaacggaattgggcatgtccttttccagtcgcgaaatggcgatgttgtcgaagatgattcgggcgttgtgcaccacttccgcacgggagacgatggtgtcgtaatcgtcttcgaagaagtagcgtacctggctcatgtcggcgccggcccgctttaagaccgaggcggcctcgaaggtgcgcacgccggttttaaatgtgaagtttttcgtatccaccaccacaccgctcataagggcattggcctcaaaattagtaagctccgtgtcgtcgtacatgtaggtaagcatttccgtaatgagctcgcaggtcgacgaggcgtagggctccacataagaaagcacgggattggccacaaactcgctgcccctgcggtggtggtcgataaccaccacattggcggtgcgcgtaagaaggggcggatgctccgtaaaggagggcttgtgattgtccaccaggatcaccaaatccccttggcgaatggcctcgtcggcaaattctccggagacgattcgcttgaacagatccggctcttcccgcttcatgacctttatcaggacttcgatggagggattcacttcgtttaatacgatgtagccttctttgttttggttgagcacggcacgcatgacgccgacggcggcgccgatggcatccatgtccgcattattgtggcccatgacgaagacccgattggacttgtcgatgagctgcctgagggcaatgcccagcacacgggctttgactttatttcgcttttcaacggctttggatttgccaccgaaataggtgtaagtttcttcgcttcttaaaaccacttggtccccgccgcgacccaaggccacgtccaggcaagtgtccgcctctctgtaagcctcgataaaggacagacccgggcgactgacaccggcggaaatggtgacgcttactgtattgcccgcgtcgatttcgcggatcctgtctaaaatgtcgaatttctgctccaaaatcggcaggatgtccatttttcgcatgaccaccagatacatatcctcttgatacttgcgcaccaaggcatgttgcgaacggaagtattcgttgatccgatgatcgatttctgcgattaaaagcggctttttcgacgtaggcgccgcgtccaccacttcgtcgaagttgtccacttccacgaccagtaccacgccgccctcgtcttcataaagggtttccatgtgttggtactgactgtgatccacgaaatagtagaggcaaagcacatcttccttgccgtttatctggaaattcaccaccgagttgtaaaccttgtagggcgcctctttgatttccacttcggcgccgctttcaacggcctttaaacccttgttttcatcggccaaatcctcgatgtaagcgggcagggatttgtcctttaatattccctcgccgaagagctcgccgaaaaggctgttgtgccagacaatggttccctcccggtcggtgaccaccagaggaaaaggcatggagaatatgctgcgctccgtgatcttttcaaaatcctcgtggaggccggtgaagtagtcattaaaggcgctgttgtatttttttacgctgcgataggcataagatgccgtcagcacccaggcgatgaccccgattgtccccaagaccggattataggaaaagaccgccaccgtgagaaaggcgatgacaattaaatagaagtagaagtttttcaatgaaaatgattggttcatgagctacgctccctctaaactccgcacgtcgataaattgatcgattagccccagtgccgccaggcccatttgtcccacgggcaccaccaaaataaagagcataatcatccctcgcaaaaggggcgaaggcacgaagcggagcaggtaaaaattgacaatgctcatgccctgaaaagccaagagactgaccgccaccaccaagccgtttaaaacataaggctcgatgcccaaggtcatgaagtaattcatggcaagggccgcccctaaaagacccaaagaaatcaagatcggcacccgaggaaggtgcatgagaaagaaggggcccgggcaaatcaccttttcgccgccgatgcgcatgttgcgcccgctaatgcgataagataaatacaccacagccaaacccgacagaagaaaaaacgcgggaaaaagggcgatggcgcggttcatggtggttttaaacgtcatggcgaggcgcgcctgttccacatccgtcagggaagccttttgcattaattctccctgcacggcgttgaaacttttcataagctcgccggattcgatggcctgaatcgttcccgtgcggtagaggataaagccaaggctcaggagaaaaagcatggtccccagcgccatggtcgtatccacggaacgatccgtgcgcatacagtaatctaaaatcaaaatcaacggccccatgaccgtgagaatcgtaagacccattaaaggatccgtcaacagcccgattaaaacgcaggcgccgacgaagaccccggaaataggaagcacgccttgaaagcgcatctccgataaaaacatggccggtataaaggcaaatagaatgggcacaaacagcccgcccatgaccagcaaaacagaatataaaagaagcttgagcacgcgcaagccctgaatttttcgatacaatctatcacctcatatcaggctattttaccatatattcccctattgcgccattcggggccattctgctctttcggacacaaaaataggcctcaaggcgctcgagcacttgaaacctattttttcgatcggaggtcttcgagtttatttattgtgatccagattgtagagaacttgtgctacctgcgcacgagtaaagccggatttcggtctaaacgaaccgtcttccatccctttaacaatgccctttttctccatggcacgaacagcttccttagcccaaggagcaatggttccgtcatcagtaaaggccttgctttctttttcagaaagctttttgtctgttacttgtaagaacttattcatcatgacggccatttcctcacgggtgatgggacgcttaggatcaaattttccatggccgattcctcgcacaatgccattttcacttgcccagttgacgtaagcggcgtagtagcctccgttaacgtctttaaatacattcttcgtaaacttgctttggtcgatgcccgccatgcgtcccaaaacggtgacgaaatctgcacgggtaatggacctctcgggagcaaagcgattgtcgcctacacctttaaagtatcccttgctgacgacataattaatcgactcttttgcccagtggtttacagtatcgctgaattttgcttcgggggctttcggtgattccacatgttttttgtttttctcgggttctgtttgttttccttcaggtttcgaggggacccgagggaaggtccgagtgcctccggagttgcccggctttacttccggctttttaggattcggcttgacatcaggcttcggcgtatccggtgttacatcgggtttcggcgctttcttcagtactaaagccccttttgcctgttgcagctttgtcagtgccagttccacatcctctttggttgcggtgctcttttcagaaacagccttcgcatctttcagtgccgctacaaattcgctcttacccttttcttcatagcgacttagatccagagcatcacattcggcgattaattgattcagcgccttcttgtccacttgaggcgcaggttgtgccggcgtttttccgccgccatcgacgacaaagtctgccgatgcctttgccggcattccttttgcgccaacggttactgtcaatctaaaggtcttattcacatcattcatatccacgggaatatcaaatgccgcaggcttcgtttgggtaacaccgccgacagtgacttctgtcgtcttcgacggcacgagggtttcacctttataggccatgtcggtaacgtaggtcccttcgcctgcatcttgcagttccactctgaagacagccttatcgcctttgacgatcaattgtgcaggatgtttaaagaccgtgcccatcatcgcgtcgtcatcgctattcatcttcttccaagaaaattctacattgtaaatagcctcttgatcggcaggcacttccactttttcccaacgagcggttaacgttttgttgctgttaacaggttttgtgaaatcaaatttttcattgccatcgtaccagcccttgaaaacataggtcacatcgtctaccttaacttttgaagcattttcttcaaagcctgcgggggcggaaatcaccatgcctttatcgacggtaacggcagctggcgtcgttcccttgtcgctcacaaaggtgactgtcaccttttccttaggtgcttgtttaaccacaaggccctcttttgccgccttcaaatcattgaaggcgtcggttacactttgctcaaccgctccttcgtcattggctacggttttcgcttcgtttaatttcttctcaaattccgttttgctttcatcggtatacttactgagatccatagcgtcacattcgcgaataagctctagaagcttcgtcttatccacttttttcggtgcttcgccttccgctaccatgcccttcatggcggcatctaaagccttggtcagatcaggcgccttatagccggctttaatgccttttacttttgcttcctcaatccacttcttcgcatccttgattttgacgtctaaattatctttgctgtcttgcgtgtacttgccgtccatcatggcggaagcttctttgacttttgcctctaaggccgaggtgtcgtaacgtagattatcgtcgatgaatttaatggcgtcgtaagccgctttaatagcatcgtaggtttttgcatcttttaatgccttctcaccttgggtaataacattttcgtattttttcaaggactctgccgtgtacttacctgtttcgcccttaaattcgttgagattggcctttaattgtgttaagtgcacgcggtaaatttcatcggcaaatttgacggcgctgcccgctttatccaagtcgctgtaaacgtctttgacctcttgaatggtcgcgtcgccatttttgatcactgcttttgccttttcaagatttgtctttaagccgttaattaaatcttgattgacgccttgtgcggcattcgccagcatctcataaactttgacggcatcgattaattgccctttgtctaccttgtacgtgttttcgttaaagccgtccgtcgccgattgccagtcgatggcgatgcgcgctgccggagagtgttcttgaggtccgagggatgtcttgtaggataccttaacgggaacaaattgttgattttccgtcacttcgattttgacacgagtcggtgactcatacttgttggagcccactgttacatcacgttttgctaagacttgggcttttttcatttcaccatttacagcataggaaagatccgtaatggcgccggtgactttattgtcctcatctgcagtcatgtcgacccactgcatttccaaataccatttgccgttctctttggtgagtttcccttgattccaaagggcactgttagccatagacggctcatctttattctctttatacagctgaatgttgacggttttcgtcgcttcaatatgaacattcggatcctctctgtcgggggatgcttggaattttcccacggcagcttgtaaggcctttaaggcagcatcgactttttcttggctgtccgccttcaagccctttttcgcttcttgaatggcaatggcaagcctttcattaacctcttcttctttcttcgttgcatttaagagcttctccgccttgtcaatttcagcttgtaaggcttcggttttaaagacatctttcgaatcttcataagttttcacagcggcatttaatttttcaaccgcttcatcgattttaccttgttccgtaaagttcattgcctttttcgcttcggcaatggccgcacgcaacttatccttcgcctcgttcgacttattcttttccagcgccttttcagccttttgaatggcatcttctaaggccgtcttggtaacatcgccggcttctttcagttttagtgccttgattccggcgtccacacggtagacccagctgtcgtaaaccgatgtatccaaattggtgccgttttgcgtcgtgtcactcggatcttttttataggtcttcttcggtgccttaatatcggcaaggtacgctttcgctcctttggagttggagttgcccttatagtcaatttttggaccgccaggataaggttggtagccgatgttcggttctttgtagccgtcgattgtttctttaagcgccttgacgccggcatcttgatatttgcccgattgaatcttttcttctccatcttttaccagcttttccaacggttccggatctaagcgcaagccgtcatagagagaagtaagggtttgggaataggtgcgaatatcctcgcgggtaatggtcgccgtggttttttctttaatctctttccatttgttttccgcttcagtcactgtcgattgaatgaaatgggtgtccgccttatacttcgcaaggttttgcgattcgccgtccactgcattgataaagctgacccagggcaaaatcgaaagggagagatcatctaattcctttatgcacgctttgatcttttcgggatcttttgtatccactacttcggcgcggccgagtgcctcttttatggcgtcgttaattttaactttcttcgtaacgactttttctacgacatttttttcggagccgctgcgttctacgtggtcgaagacgtcgatttcttcgggaagaattttagaaaccatgccgtgattggtttttaaatcactgatgcgattttgcagtgccgtttgcaattctttcaattcttctttcgtcgtcttcacttttccgccttttacgtggaggtaaatggtgtcacctgttttttgcgtttgcttgtcgctatgaccaatgaccacatccgtattgacgacaattttttctttcgagtcgatgtcgtagtttaagacaaatgccatgggaacatctgctttttcagcagctactcctgccacatccggtttttcggatactaaaccatattctactttcttcgtaatatccgccggtatatacgttcccttcggagcgtaattaatattttcaaggtaagactttacttttttgccgtccatttcaggattcgcgtagaaagtaagggtcttttgtaccggatcatacgtcactttttccgataccaagctttccatatgggtcttgccagcaccgttttgattttgatactcgatggtgacatcatagggttcggttgacggcttatcctcctcgccaccgatcaattgttgcttggtcgtatctaaggtgaatttgacactcttttcatcgatgcccatcatatttccatcatagtattctacattcgtatatatggcgccaaggctggtatccggatcgacaaactcaatggtcttggctattttatgtccgctatcttctcctagagtttcgattacctgacctgtcttcttcgtgaaatctgatgtattagacgtcgctttattgacaaaattatccccatctttcttaaaggagaaaatgtatttcttttccgagggaatgtatttaacagggcctgccaaacacctttggattgcaggattattgcaagtgacgggaatcgcatacatcactttcccttgtttgccccgctcatcttctttaatttcaggcggcgtcacgccgggcttcgctttcagcgcgttgatcgcctgctccaatgcccttatatgatccgatgtttcatctaaactcggtgaataatctgcattatctttaatccactttttcgcttgaatctttactaagttaaacttggcaaaggattctgcttcatagtatttttcttcatacttgtctgccttgtttacaagcttttgcaaggcttccgtattgtattttaggatattattttggcttgccgtttgcacctcgctgatcttggacaccagttccggcacatccatatcgcctgccttttgttccgtttgttcaaggtattttctaaaagcttccaaactttccttggtatactttttgtcattgtagatcgtaccggaatctaaatcgtccatggcttcatgaatacgctcatttaaaatttcaagcaaggtaaaggtgttttcgatttcgtaaatcggctgagcgatgtttaaagcttccgtcatcgacggcgtcttggaattgcgcaattggtttagcttttcaatgctttcccgcaccgttttaatccgttctttatccttcgccacatcggcatccaaatacttaccgattaaaatttcaccgcgcttaatccaatatttaattctcgccttggtctttttctcgtaacgactgtaattgtccgctgatttagccatggtattgtagtcaattttaataccgaaggtacccgtttgtttcgtggtaccttgattgtccacataactcatgctttcaacaacgagttgcgatccgtctaattcagcaggaatggggatggcgactaagtttgtcttcgtcggatcttgcgggtcgctggagccgagggaaacgcgaatttcttttcccgctacgctcttcattaccatactgttgattttagatactttgtttttattagcgacaaaaagtacttccaactcattgccccatttggtcacttccatttcttggaagagatcctttgcatccgctttttccgtacctaaatctttgtaaatattcgtttgcccgtcgctgtccactaattgaacatcgactagtttgtaattgcctttatagtcgccatcttcttttagcttcgtatcgctgtttagggcatagatttgtaaaatcgtgtccaattcgcccagtaaacgttgtgctttcgcttcatctaagctattcacgctttttttcgcgcgagccactaaattatatatttcgtaccaaggtgtttcgatgatttgatccggcgttaaaatataggaatccttgccgtaaagctttcccttgccttccacatcttcgtagtcgccaaggtcgatgcccggcgtataagtagagttatgtttcggcgctaagtaattggtgcctaacaaatgcttttgaatggcggtattggctaatatggcatccgcctttgatacaatcgccttctttgtttcttctttcgccggcgtaaaagcgaaaatcggttgagctgaacccatgaccgttaacaaagccatggctaagcttattttttgtcttcctttcattttatcctcctactgcttgtaacgatgcgttcggcatcaaacaagcttagatttttacatgatatcatttatcatttatagaatattcgatggctttttctcggtcaagcttttttaaaaaaaaattccgtaacccgggggttctttttaaatccatgctttccgtaaaaacagctgattttcaacttttaatccagaaataactccggttaacaattggaggttattttcttttaatcaaatgaagatgccttgacgactgaatttttttcaataaaaaactcccgccgaagcgggagctgtgtgtatttaaaaaatcattagtcggcgctgtagggcaaaagtgccacttgtctggcgcgcttaatggccgtggtaatcttccgttggtgcttagcgcaagcgccggtcacgcgacggggaaggatcttcccgcggtcggaaataaaacgctttaaagtttgcgtatctttataatcgatttgtttttccttgtctgcacaataaatgcaaactttttttctggaacgatatcttctttgcatgttctcaccccttaaccttggttaaaatgggatatcattgttgtcgatcgggtaatagccttcgtcgtcggatttgggaccgaagccggaaggattgctcggttgagcttgattattcgattgataagccatgttcgtcggcggtgccatgttcggcgcaccttgcgcattgcccgcttctctcgcactttcgataaagtggacgcggtttacgacgacgtcggtggtgtagacgcgttcgccgtttttttcgtagctgcccgtggaaattcgaccttccacggcgatgcgattgcccttgtggaagtaattgcctaaaagttcggctgtggttccaaaggctttaatgccgataaaatcggcggtgggccggccggccgcttccgcttcttggcgcttttcgcgactcatgccgcgatccacggcgatggtggcaaaggtatttgccatgccgttttggctgtagcgaagctccggatctctcgtcagtctcccgtaaagtacaactaaattcacgatatcaccaatcccgtttcttattcatctacgcggacgaccatatgacgcatgaccgtatcggaaatgcttgcaatacggctgaattctttgattacgccgggttctgcatcgaattcgacgagcacatagaatgcttctttgtaatcttcgatttcataggccagcttacgcgtgccccattcgtcttccgatttaatgacgcctgcatcagcgatgatgccttttaaacgttcgtattgttttacacgtctttcagattcggcgtcgggatagaacataaggattacttcataattgttcaagtctgtcacctccttgtggactgacggctcgattgatcgagcaaggataactatctgatccattataagtgagaaaggggctaagtgtcaaggccttcttccacaattcgactttcaacgcctgcatccgtaagttcgatgagtcgcgcgccccggggcaagctgccataggcgttgtagccggtgatgcggccgtagtaaaggtgcatcccccgccaattggcggtgaagtcgttgtcgtgatcgtggcccacaaaaatatggcggacggtgctttcgtttaacaaagtatccaccagccccgtgtttttcaccggagcgcagacagtttcgtctttgtggcccacggccaagcccgcctttttcgcgtcgtcgaattccaccacgggaatgtgcataaataaaaggccttcttttccttccccgccgtccagggcgatgaggtctcgaatctgctcttcatagacgtaggcgtagttgttgtcctcgtcgtagtcaccgctgtctaaaaagtacaggcgatagttccctgcgtcgaaataatagagctcccgcccctccacggaggcgaggccccgtttttccacatggtgtttcatatgatacaccagctccttcagcacccggcgatcgtaggcgctttcgctgtcgtgattgccccaggtaatagctacagggacgcgcaggctgtcgaaaaaatccagaacgccggataaaatcgtgaggcttcccgattccaaagaccagtgaatgtcgccggtgaggacgatgagatccggcgccagggccgaaaccatgttccgcaccaaatcctccgtgcgcttgtcgtcacccttaaatggaaaggagccgaagtgaagatcggtgagttgaagtagtttcatgagcctactccattccgataatttccgatttcggcatatacaccgtcaccttgtcgccgacgcgccgcatattggcgcttcggttcagttgatccatcttcagcatctttttcccgttcacttcgatgtacaggcgatagatggagccacgcatggaggtgcgaatgactttgccttcgtaagcgtaggcgtcgcttatggcttctaaggagagcacttccgggcgaatggccacgtagctgtaatccgcatgatcgacggcgcccatggcggccgcttcttctctcgtaaagagattgtagtcgccgataaagcgggtggcgaattccgattggggatggcggtaaatgtaggtgggcgagccttcctgcacgatatggccctgattcatgacaaaaatataatcgctcatgctcatggcctcttcctgatcgtgggtgacgaggatcaccgtaatcttaagttccgcctgaagggatttaatgagcccgcgaagctgcacgcggatctgtgcgtccaatgcgcttaagggctcatccaagagaaggacgtcaggcttggtgaccaagctccgcgccagagccacccgctgttgctgcccgccggaaagattcgccgggtaagcctcttcttttcccgtgaggcccaccaggtcgatcatctttttcgcttccgcgtcccgggtctttttgtctacgcctttcatttccaggccgaattttacattgtccagcacgttcatattaggaaagagggcgtagttctgaaaaaccatgcccaggccgcgatcgttcggggcgaggccgtcgacgcgtctgccgtcgatgatgatttcgccttcgtcgatggtatttaagccggcgatggccctgagcaatgtggatttaccgcagcccgatgggcccagaagggtggccaattgaccgcgggcaatttttaaattcaatccgtgaagcacttccgtttcgccgaaggattttcttaaattgttgatttcgataaagctcatattacgcctcgtatcctttctgttttctcgtaaggcctatggcgccgaaggtaatgacgctgatgacgataaagtagagtatgacaatggccgaggccatgtgtccgttgacggagagggattttctcaaaaagatttgcactgtttcatatttcgatcccaccaccaaattgatgatgacgaattcgccgaagagggtggaaaaactgaagaggcaggcggaaaacacgccgggcataatcgtcggcaggataacttttctgaacgtcgtccaggggctcgccccgaggatttccgccgactccatcagggtctgtgcgccgatggcccggaggctgtttagggtgccctggcgaatcatgggatagatgaatagaacgtaggatcccaccaccacggtgatcatggggatgcccaacgcggcgtaggtgttcatcaaagcgaatgccagaatgacgccgggaaaggcgtagcatgcgatgaccatgccctccgccaccttctcgaggcgcgggtagtagacgtaaatggcaaagatgctcggcacgatgatcgcggcgcccaagctgacggcgataagagacagaacgcaggtacgcaccaaggcatggaggaaggttttattcataaggagcttcccgaaccaggcgagggtggcgcctctggggagcatggtggaagaccagtccatggatgtggcatagagcaatgtcgccagcaggggcgcgaagagatacagaagcatgaggacgatggcggcgttttttgcaaattttttcatcctttactcactttctcggcccgcttggccagtttgtcgcccagaatcatattgatgagaagaatcatcgccagcaatacggagagggccgcgccgatttccggccgggcaaaaatatccccggtcaccgtgttggcgatgcgtatggagaggaggtttaccccggtgcccgtcaaggcctcggcggaagcgtaggcgcccatggcgttggcaaacatcatggcgaaaacgccgacgatggagggcataagcacgggcaggccgatgcgccgccagtattgaaagctgctcgcccctaaaagctccgccgattcccgccaccctttttccagggcgtcgtaaataggcaaaagaagaataatgcccatgggcagttgaaaataaaggtacacgatgcacaggcccaaggaagaatagagattgtaattcgccagccaatggatgccggcgcggcggccgaagataaggagcacgccggaggagcctaagagaataatgtaggcgaaggccaggggaatgccggcgaagttcgaggtcatattcgcgatgaccacaaagatctctctaagccgtttcgaatgactcacgatggcgtaggtggtcaccgtggtaaagacaatggccacgacgcttgaaaaaagggaaattcccacggaattttttatggccgcggtgtacattgacccggtgaggatctcccggtaattggacagagtccatcccccgcctcccgtgggcttaaagctcataaggaccatgttcgccgacggatagatcaatacggctacggcgataaaggcgaagagaatcatggccaggtgaaagggcaaccgtcgtttcatgcaagtctcctttcgaaataaaaaggggcccgaaggcccgaagttgtgacgtctcttacttcatataagccatgacgttttcttgccacagctgagccagttgcttggtgctgtcttcccatgccttgctgtctttgaccttgtaaatgtccttgtaggccgaagggggcaggagttttttcttggcttcgtcggaaatcttggcattttcgcgaatgggccgcgcgtagcccttagccagattgtcctgaccttcgtcggagagaataaattcccgagccaaagcggcggcgtagggattggcggcgtagcgattgatgatggtggtgtagccggtcataaccgtcatcggcggtacggtaatcacgaagcgatcccgatccacggcatcggcgtagttcagagcgttaaagtcccacaacatacccacttgcacttccccggtttccaaattggcgagagaggcgtcggtggtcttcaggcggccttgttcggcgagctttttgaaaaagtccagtccgggcttgagatttttttcgtccccgccataggtgacggcggcatttaagagggcgaattgactttgattggccgtttccatgtcgccaatggtcaacacatagttaccgtttaaaatatcgtcgaaagttttcggcggctcgaccccttccggcagattttgtttgtccgtaataaaacacatttgtcccgtgtaggccaagagccagtcgccgtcgtcgtcctttgcccagtcgggaacatcgtcccagtaagaggtcttgtactttaaggacaagccctgttcctcggctacgggaccaaaggcgattcccacatccccgatatctgccgaagcattggtcttttccgcggcaaacttcgccagctcttccgccgaagacatgtccgtgtccgtgtgactgatgccgtatttcttttcaatgtctgcccaggtttccttccagttggcccaggcatcgggcatgcctacagagtggacgttcccttcttccttcgccttcttttccaactcttccactgtgatcttgcttaaatctaaagtgtctgtggccgtggattcctttgtgcaggccacgagcagcatcatgcccaaagccacaaccaaccatttcattcgtcgaatcattgcatcctccttgtgtttttgtaaatttttcatccctcacagaataaactatgtaaattagaggaaatgcaaatctttattaaatccccgttagttcttgtaaaatttcctcttccttttcgtccccgtaaaattctctcttcccttcgccttgactttcctcaaaggcggcccccataatagacatagtatacaagtgttttcggcgggctttgcccattggattttgaaccggcgcagggagaaaggggtcgtcatgctcaagggtattcttttaatctttttatgcaccatgatgtgggcacttaacggcaatgtgggcgcatacattttccaaaacaaagccttcacccccgatgttctcgtggccattcggctgacggcggtggggctcatcctcctcgtccacgacttgcgccgcagcggccgctacgcttttcgcgtggtgcggaagcgggaaaatatccccgcctttctcctttattccatcggcgggattttatgtatgcaatacggctatttcaccgccattgcttattccaatgcgccgacgacgacgctgattcagtacacggggatgtttttcgtcatcttcgtctcttccattatgaatcgcacctggcccaagcccatcgtctaccccaccctggctttatgcagcctcgggctctttctcatggttaccggcggcgatccttccaatctcaaggtaagcagcaaggcgcttttttggggactggtctccgccgtgggctttatgaattttaatctggcacccaccggtctgtccaaaacctatcgctccatggaaatcatgggcccctccatgctcttaggcggcgtgctgctcatccttctgacgcgtccggatttcaccgcccccacgtgggatatgacctccactctctgcgttctttttacgattatcggcggcaccctaattcccttctgggcctttttggaaggggctcgccacaccggcgcgcagaaatccagcatcttcgccctatccgaagcggtgttttccgccatcgtcgccatggttctctaccatctgacctttaaactcaccgacctcgtcggcatgctgatgattttcggctccgtgcttctgctctctctgtcggaaaaatcccctctaccttagataattgtctaaatctctataaaagtctattttttggtacttctccatttacgacaatttgctaaccctctataagtgcccatagatttctagcaaattgtcgtaaatttgtcgtaagctgtcgtaaattctaaaatataaatttcatcgctttttcaaattcccccatctgttctattttaaaatcttctgttgcatctacatatatatccattgttgtactaatatcagaatgacctagaatagactgcattgcttttgtatttatattttgttcattaagccttgtagtaaaggtgtatctgaaaatgtgattgcttaaatgtggaactaatagaatatcattagagttcgatttatttttatccattatacttaaattgcaatctctaacaattcttcttaaagctttattaagtgttccattattgtgaacctttccgaatctatttaaaaatacaaagtctttaaatccatcgattgaatcacaacattcgattccaaaagtcttttgtaactctctttccataagaaaagcatcttttactttttgaaccataggaatacttcgcttacctgatgctgtcttcggtgtattaatagcatatctatcgtttaatcctttacctttactataatataccaaagtcctatttacacttataagaccattatcaaaatctagatcgtcccattgcaatcctgtaacttctccaactctcatacctgtccaaagcataacaatgaatattggataccattttttatattcatcactattagataaatattcttcaaatagtacctgttcttctattgtcatggcttttttcttcggagattcatttcgataagctactttcaattccttcatagcattatcagacggattaaaccttatatattcgtcatccactgctaattctaacacctgatgtaacacagtatggacacaatctagcgtttaagtattgatttttaattgaaaagagagactcgagttaacaagtctccccaaaatttgacaaatagcctattttaatcattatctctttgcatcaataataattcttctttatttattttattaatagcaataattgaagatattggacctaacaaggttcccaaaattattactattattaacattaaaatcataaggaatatattcggtcttaaaaaaggcatattcaaaagtgatgaaaatatattattgaaagttatacttaaaacaaaggaaagcacagaacctatgactgcacctgttccgttaattagcatagattcaataagaactacttcactgagttttttctttgttgctcctaatatccttatggttgcaaattctcttttcctttccttaactgataaggtatttacaagacttaaaataaagaaagctagtatccaaatcaaagctatcaatatatacacatatacaagcatgttttttgctgaatctgaaacttctgtcattatttttcttggcaataaaggatacactttttcttttttaaattcttctttaataagtttttgaattgtttttggatctttgtttttttcaacttttactaaaatagaagatatatcatctttttttgccaccggatgattaattatcttttcatattccttggctaatctatgagtttcttctattgtcataaaaactgaattatcaaaacccatgccagtttttgcaagcctacctcttatctcgaattcttgattaaaaaatttaaccttatgattaatagtccccacaatgttagcacctacaacaacttgcccagctttaattggagttttaatctgtttttcaagccaaggtttaacgctaaagtcatcagaaaagtcaattcctataacttgaatgggaaaagaacagcatccagcagaaagtgtagctagataaacttgaccacaggctttttcaactcctggtattttttttactctgtttaatatatccttgtcaaaaaagaatgtattaggttctccccttaatattgcacctgtaattttggaatcataaccttctgggactactataatgtctgctcccatcctatctgataaagatttcatgccatttttaagagaaaaaattgtaaatgatgacatgaataaaataaaagttaaaattcctacaagtaaaatcagggtaattgaccttgcctttttattttctatattcttttttgctaaattaattgtgtataaatctttcattattttgcaccatcaagagcattattgcaagcttctataaattgcttgtaagtttgtgttgcccccgaaataacgtccactccttcaggatttcctttttccactaatctatctgggtatgactttgcaagatttatagcttgttgggctatcttatatagtccttcattttggctttgaccataagattcatccttttcttttccatctccatcaatgttttgcattgtgcaagattcaatcttattgtctttaacggttatatccacctttacaagtccgcctctttcatctttggcagattctccttgatatgtgccgtctttatagcttacgcttggaacttcttcttttttatctcctccacaagcaactaggacaagccccaaagaaaaaattattaatacatttaaaaattttctcatataaactccttaagtttttcatctttttttacagaatcaagaactggtctttttcttttcattttttcttcttttgaaattttaccatgttcaagagttatcattctttcagattcttcaccgacttcagggtcgtgagttacaacaataattgttgatcctgcattgtgaagtttttcaaatatgtcaagaactatatattcattcttttcatccaaatttcctgtgggttcatcggctaaaagtattgaaggatgattaataagagctctagcaatgcatactctttgttgttccccacctgataattggttgggtaagtggttggctctatcagcaagacctactgcagccaaagcttccattgcttcttgtgcatctggcatagaatgataatattgtgacatcattacattttccaaagcacttaaataattaactaaatgaaattgttggaaaataagtcctatcttatcccttctaataactgttagttccttaggtgatttttttgctatatcttcaccatccaaaataacttcgccaagtgaaggtttatccatggcaccaataatattcatcattgttgttttaccagaacctgatggacccattatagaaatccattcgcccttttctacacttaaattgattttgtcaagggctttaagttcaccataaatttttgaaacatctacgagttttaatatatccataaaattcctttctattctccacgaagcactaaagctggatcaatatcaacagttttagatactggtattaaagatgcaactatagttattactatacagacaataattgtcataggtactaaaagaggcaagaaacttacctttctagcaaataccgaaatacttactctattggcaaatatatatcctaatgcaacacctaaaagtccaccaaaaacccccaaaaatgctccttcacctaaaaagtcaacgattactgacgaatttgtggcgcccaaagctttcttaagacctatttctttacgcctttcagttacaactgccatcattgttgtggatacacatatcatcattatgaataatactattatcgttacaatgaagacaagagcttgtaatttattcaaaactatatcttgtgaggcggtaactctttttaccatttgtggagttagagatccatccttttgtgaaatatttgatactatttttgaaagttcattttgttcagcttctattgaatattctacgacatcaaaatctttgtctttaacaagctgtgaaatatcatcaatactcataaaaataagttcttcttctttaccacctgttgttacaactcctgaaacaacaaaattagtatctatagaaccttctccattaactttgggagtatttataataattttatctccctcttttaattccaaagcctttgaaacttcattacctattaaaacttctctcgatttttcaggccatgaaccgtcaataagccagtatggagaattttctttcgctccctttaaatctgtacctgcaagcatataaggttgttcattaatttttgcatttgtataaatatagggtgcctgaccgacaagctttcctgaaggaattaacgatttaacttcatctaactgttcattggtaatttttttatcagggttggtgggaattaccaacatatttgcaccataagacctaaactccttacccatttgtctaggaatatcatagtaaatagtaacaagtcctgaaataattgttgctcccatagctatagcaagtagtgctgttaacattcttgcacgtctccttgccaaggaagtcattatcatttttaagtaaaatttatttttactttgtttatctgccatgtagtacctccgttggatttaaattcaaaaggtatcttatagctggtattgaccccaatattgtaacaagaataataagtattgctacaatgggaactaccatagctgttggagctattgctgagccaaaaactgttagaccaataatctgagtaagtagcagaccaacaccgtaacctataactgttccaaatatcgctgtcaaaattatttccacaagaattatgcaaattatccttccatttgacgcccctatagctttttgaagtccaatttcattagatctttccattacagatgctgtaataagattagaaataccaaagcctgaaccaatcaaagttaatacggtaattaaaaccataagaagagtagtcttatttaaaatatctccttcactttctgcaacttggcgaattggcttagctacagaatcagtcattacttctgttatttgataacaaatagcagaaacataagctgtacaataccatacttcccgttccttaatagttaaagatagtgggtttttggcagcctttcttgctaagtcattgtctggtgtagtaagagctgatacttcaactttatttacaactccagtaactccagcaaattcttgtgctgtttttaaagtagaatatataaatgcatcttcatcagaacctgatgagaaaatacccttaactttaaattttttgtctaaattattgctttttagttggatttcatcaccaactttaaatccatttctgtctgcaaaaatctttccaagcataactgaatcgctatcattttctgataaccactcgccttgaacttcccaccagtttttaagtctaatcataccagtatcaactgattctccagtaggcaaattcatatgattattaaaccatgttcctaccatcttagtatgtttagaatcattattacaagaaacccaagtgttaagatatggcgtatagtctacaatattgtaagcccaaaaaatagttttaatgttaggaagttctgattcctttaaatatttttgaacctgcccctctttttcttgcatgccatacaaatcatcaagaagggaagcttccttaggtaatacattaatatttgctccataggtctttaattcttgattaactttatccccaacaccgagcatggtatttaacattgaagtggcaagagaagctccgagggcaactgtaaatgcaataagagccatctttcccttttgtctaaaaagcgctcctttaactattctccaaaacataagccctcctacttaaatacataagacaatgcgtcaagatcttttggcgcaatctttatctttttatcatggacaatgtatgggaaaggtatcgggttacatccacccttaaaacctattgtacccctattcattacaacgtcgcacaacttacaaataacatcatcgcctctttcaaaatatccagatggaccacatatctcgcaggcatcaagtacaactccataggaaccttctgattttttaatgcagaaaaatctcatttgtacgccatcctctgccttatacaaatatctgtgcaaatgcatatcctctaagctacttaaaggaataacaatcattccattttcagtttgataatcttcaggtggtgaaagggcctgttccttattagcatatgcctttccaaacgttaatgaaaaagtattaataaatagaacgacaaggaaaaaaattgcccaatgtcttttattcttcattctatactttatttttcttaactgagccctattgctataatcttcattaactttaatattttgcttatataaaattactggaatagctatcataattaacattgttgcatataaaaacacattttcgtgattagctataaatgcaataactctaaaaaagttaacatttctaggaataatccctttagaataaaacctttgaattatgatattaaattggctgatacccgagcatatcaagctaaaaaaaactacaatctttaagtttttaccttcaagtttaactgaggacttgtatatggcaagccctgataaaatcatcatgattatcccaaaaacaaagcctaaaatcctaaaaagtacaatagttgaaacagcactttcgccataatatacaaatttgtttgattggttaaatacatacggtaaataataaaaacaaattcctacaagatagacaacaaccgatgatgaaatgaaattatcataaattttagcatttatcttatcttcaaatatcataaaaattaatattaaaaatactgagataactatgggtaccatagaccagaaattcaattctgttctattaataaaattaggtatatttcttataattattgaaacaattgctgcaattacccctaaaactaaagaaattataataacatactttttatatttgctctctttagttgtataataggcaagtattaaagaaatcattagagaaaaggctattcccgcctccataactgtaataaaaatttttaacataatttcaccccccatatatgtatataaggggaatataaattccccttataaatattataaatttttaaaactttaccattgtggtccgttccattcgaagtcagtccattctgcaacaagtggttctgtccagaatctacctgttacaccagtttctttatctacgtgtagtaagtagtcattgcctggtgcagaaacttcaaattttacatcataaacgccaacaccttcgtcaaatttaacatttgcaccatagtgtggaccatcagatgcgttcattggcatgaaagaaacttcttgaacatggtctgaacctttcttttgtaaataagcttttacttttaaccatggaacaaaatcaccaacaccataacctaacgttgaaccttcttgtgatgctgtaatgtcggcttcaatatggcagtcagcttcttctttaggaattgagtttcctgctggttccatatcaactggttggaaatatacaccagagattactaaaggtcctttagtttggtcatcgccaattggaaattcttcaaatcctgcatcttctcctggagctgcagcttttgcatctcctgcttctttcttgtttccttcagctggtgttttttcttctgtagaagttttagctgtattattagcttttgtatcttcttttttaccacaagctgtaaacattaatgcgcacacaagcgtcataacaacaagaaataaacttttcttttttaacataatatcctcctattctttttcttggctggcttcaagctcagctctaatttttttgtttctattattttgataaataacagaagcaatggttactactcatagaataatttgtggaatgagattttcatacctatatatcctcctattctttttcttggctggcttcaagctcagctctaatttttttgtttctattattttgataaataacagaagcaatggttactaccaatagaataatttgtgggatgagattttcatacctatcgtatatacctataacttcagcagaccatccattcatccaaggaactatagttctgccaattacatctgcttcttgtaattctcctatgccctttcctaagaaagacaagcaaagtataaacattagccaagaagtaaatgtaaagaatggttttaatggtagccttacagaaactttagcaattaaataatatacaattgcaagtattatggcggcaactaaaagtccaatccacatatgcattggattatcagaaatgcctgttctcataccttggaaaaacaaaataagttctgcaccctctcttgctactgctaagaatgcagtgaaagataaggcaaaataattacccttggaaacagattgttcaactttgtttttaatgtatctattccaaacttcaacttcagatttagaaagcatccaattggatacataaaatagtacgataacggcaagaaacatcgcaattccttcgaatatttcttgtcccattccagactcaacttctcccactgtattggcgatgatattaaatcctccagctaggactgctgaaaaaacaatgcctagcaaggctccaatatatacaccttttaaataaattctattattagtctttgataaatatgcagcaatggcagctacaactaaaatggcttcgagtccttcacgaagtgtaagtccaagaactgcaaaaaatgtaccaaatctttttagcagctctccaaacaattgacctgttgaaaggctatttgcatcttcttgactttgaccactggacttagaatctccagaggttccatcaagagtatgggcatcttcatgaagataagttataagtgcatcaatttcatctttaacttcttttgggtctgcatctgctttgatagaattttttgctctgtaaaattgatgttcaaccattgaacctctttggcctgaaattgcagtcatagttgttttttcaaatccaattttttcatagaatttaaagtaagctacattaactgcatctgtggctgcttttttagcatccttatctccaggcttgtaaacttccacagctttttctaaatgttctgacatagcatcagcgacttcaacccagttaccataatttgtttctgctgcaaaagcagacatggaagtgaggctaatcatgattaccataattgcaaaaatgctagtcattttctttaataaattcatctctatcctccttctttattaaacttccatcttccatttggtaaagtgtattgccatattttaaaatatcaagctcatgagtaactataataagtgcagtacctttagaatttattttttttaataaatccattatctccatagtagtgtttttatccaaatcacttgttggctcatctaaaatcaaaagtttcggcgaattaatcatagatctggctatcagcactctttttagctctcctccagataaatttttagcaaaatcatccttcagatgcaaaattcccatcaaatcaaggagcatagctgctttttcataagcagattcatctcttttaaatagataataaggaagagacacattctctaaaacatttaaatttggaagtgttcctagactttgtggcacaaaacctatgatttcattcctatatttgctaatttctctatcagaaaaatcacttatatttttgcccttagcaaaaattttaccttcagtcggttttaataaaccagacaaaagatttaaaaaagttgacttcccggaaccacttctgccaattatattgacaaaatctccctccttcaaggtaaagtttacatttttaacagcaaaaagtgtattggaacctcttttgaaactcttgcttaaattttcagtttcaattattgattccattatgaatgtctttctttcatacaataataaatattaactaaaaccaatatacatgacaacaatgtgcataacggaatggtttttgctctgcaagccatatcggctttcatgcatccaccaataagtatatgagcgtttagtatctctaaaataccaattgctatatttgaaatagataatcctaaagatatttttgaatctttaactacaataagaataattgctaatactaaaatgactgcgccaatacctatagtcatatttcccatccaatggcatttcatgaacatcccattttccataggaggacaaacgggtgttataaattttggtgcaagcactaacaaaaaacctataatagctgaaatatatcctaaaatcttctttctactcattttaatcatcctttctacttatctttatcaataacattgtaatataaaaacgtgtttattttttttatacttaccagtctttttttcaacagttacccctggccagttaccaacatattggttggaaccagtgaggccgttaaaaagtgttgacttgccactattggggttgccggcaagtgcaatagcaatagccatcttagtcctccttcttttctatttcttcaattgcaattaattaagcatctgctattctaatgttaagttcataatgtctatattaatttgcacagggtctccaagtggcgccaccttccttatgtgaatttctgaattttttgtaattcccatgtccattatccttcttttcaaaggaccagaaccattgatttttttaacgatgtagtattttcctacaactgcatctttgacaaaaccaagattcgccaggtgggactcagttacattactatctcctaaagacttaatccttaaaatcttataattaacatttaagggtgccattactaagctaagcatctaaccactcgtttctagttttaattttattaaaataaactaatctttgaatttgattatcattttcgtaactattgtaacataggaaattgaaaatttcaaatcaatttttcagtctttttttaaaaaagggcatatttttaagattgagaatatttttaatttatctttcttatgatgccttgtatattatatattttcttttttattggcctatataatagaaggactttaataaaaaagctcgtttattttttgttagatagtaatttttagtaattttataagtaaaacttattctcaaaataatttatttaatagaaatgctctcaaaaatcccatcttccagcaataccataggtaacctaatgaagttatacatttcagattgcctattataaaaataatcaaaattcatccctacctcctttctttgaaataaaaagacgacagaattattgatttctatcgtctacgattgtctaatatttatttttctttaaatagcttttattgtatagtttaataattctaataatccaataacatatatacctaatttaggtaatccaaatgggctaaataaaaatgctaagattagtgcttcaattacaatttgattatctccttgaaatatgctagctaatccaattataaaaattaaagtagaaactacgcttaacagagcagtactcaaacttaatatgaaggttaaaaaagctatgagcaaactcaacactaatcttatcggtaataaaattattctaattatccatctcatacatacccctaaaaatttaactgggattcataacaaaccccagtttcataattagcgtgttctttaatataattgtgatcctgctggaatattatcatccaacattattaagttaagtttttcttctccgtcgtactcgcaaattgcagatataatcataccttctgagtcgattcccatcatcttacgtggaggaagattacaaatcgcaagcagtgtctttccaattaaagactctgcgctgtaatattccttaataccagataaaataactctttctttttcagaaccatcatctgatgtaaatttcaaaagtttttttgattttggaacttcttcgcagtttaaaacttttacaactctaaaatcagattttgagaatgtatcaaaatcaaccatatcttcaaataatggctctacttttacttttgaaaagtcgattttttctgtcgtaagtttcgtaagtttcttttgacgaatccttattttctgccttttctaagcctattggcttcatcgtggggaaaaacaaaagcctgaaaaaaaagaaaccccttcgggaacgcgtccacgaagaggattaaggaagacagccgtcttcttattttatttgtctatcaacctttgtgacatcagacgaatcgtgttaactcattataaaaaaggatccattgaggattgactatcaatggatcctttaaagtctttcgtggaatgcgacgccgaagcaatgttccgcacaaggctaatgacgcctttagacaacttattcttttttctcacccaacaggcatgagactaagcccaatccgacgggcacaaggggcagtgctaaataagaaggaatgccccccattgaagcactgaaagactcgagccatagccttaccaattgcaagagaatgtaggacaaggcgatggtataaagacaaattcgacttctctggttcataattcttcctttattgaacaattgtgttttttattttatatatttattgcagattcgtcaatgggaaattcgcactcgaatgtggaatactttatggggtcactctatcattctatacgttggctttgcttttttatttatcatttttcgattggccgaagcattttctgtaggccgacggagacaagcccgtaaactgcttaaaggcccgggagaaattcgacgggttgtcgtagcccacggactcggcgatgtaggtcatggaagcattggtgtcgattaattgccgctccgcttccatcatgcgcaaattggccaagtatttcatgggggtgtattggcaggtgtggatgaatttattaatgatcgtggatttggagcaaccgaaggtttcttccatctgttctaaagttatgggctcctttaaattttcccgtaaatactgctccatttccgccacgaattcatcttccgtctcttggaaatagcgcttgcgattggcgctcacctgctccttggaaatggtggcgagcagcctgaaggccatcaggccgatgcctgcgcgatcggcttttgccaaggcttcgattaagccgcgggcttcgtccagggcatcttttcgcttcaccgtaaagcctatgtctttgatctcttttaccgcatcgacaaactctcgggacagatccgccaaaaacgtgcgtccctcgatttcatcgggagccaccatcatgttaaaggcgacgatgccctcttgggttccgtaggaggccttcgattcggggatggctttgccgacaaaaacttcgctcgatgtgattaagaccttgctgtcgttaatgtgggtgtagtaattgccgttgaggcaataggctatgcgatagccccgcctgccgctgtggacggcattttccgagtggtagcagctttttatattgatgtaggcgacgaagacgcccggcgcgatgcgataggtgaccatggtgtcctcgtccctttcaatgccttcaaaatacatggtgtcctcgtcgtaatcgacgacgcgaaagccccaagactcaacgccgtcaacccaatcttctaaatttgtcatggctttctcctaatagacataggcatcggagcgctcgaagctttcgatcatggtgcggtaggtggggctttctttcaaaagggcctcgtggcctccgcaggcttcgatttttccctctttcatcacgatgatctgatcaaccccttcgatggatttcatgcggtgggaaataatcatcaccgttttgttttttatcagccgattcaaagattcctgaatgtacttttcgttttccacatccaaggacgcggcgatttcatctaaaagaatgatctgtgcatctttcaaaaaggcgcgggcgatggaaatccgctgccgctggccgccggaaaggcgggagccgttttcgccgatgattgtgtcgtaaccttggggcaattgcttcacgaaatcgtcgcagcccgcctgcttcgccgcttcgtagacctcttcttccgtggcgtcgtattttccgatgcgaatgttatcgaagacggagccgttaaagaggagtacgtcttgaaaaaccatggacacgtgcttaaacagatcctccgtttcaatggatgaaagctctttaccgtccacggtcatatgaccggcgtcgtaatcgtagaggcggctcaccaggcgaagcaaggtggatttgccgcagcccgaagggcccaccaatgccgttaccgtgttttgcttcgcttcaaaggagatggcgtcgatgactttctttttcttgtcgtaggagaagtccacatgatctccggcgatgtcgaaatgctcaagggccgtcgggcttccggtttgcttcggtgcgtccaccaagcttttgattttatcgacgctgctcgaaatgtaggcgatttctgcgtgggccatcgtgaaggcggtggtggcgtcaatgaggcgggccgccgcaaagacatagccggcaaagtagagcacgttgatggtgccgctttgcagcaggcgggtgcccaccaccatggcaaagcccagagacaagaagctgactgcgccggaaaaggtgacgggcagggcctggcccagttccgttcgaatatgcacggcttcgtttcgccgcgccagtcgcttcgcctcgctttttttcgtctcgcttaaatggtaggactgaatttcctcgtgcatatcgatgagctcttgaaaggctttcgccattttccgctgcctgagaaaatacttcttcgagacctttgcctgcatttgctgggacaaatgggcgagaaaaatgctgagcacaatgggcaccaaaacggcgagccccagaaggggttggccgataagaagcatgatgccgatgacgatcaccgtggcgagaaaggcgtagtaggtgggcacggagtgggacagggcgtgctcgatggtctccacgtctttcatcatggtttgggacacatccgttaagtcctttttgttaaaggacgacaggggcaattgccggattccctcgacgatctccatgcgcagattcgccgattccttgtaggtttcgttaaaagtggtgtggtactccttgtttatgaccaaaaacatgaccacgccgataagcgcaaagccgagggcgccgtaagccatgttgaagcttccgaagcccaagaggccgttggtggcatacattaagagaaacatggggagcatgtaggtgatgttttttaaaaagccgtaaaccgtcgctcgccacaggccgtcggctccccgttccgtgagggcgtaggtttttcgtaaatactctttcatccgtcgatcctccattcattggcctcgtgatacaagctgacgaagcgggcgtagcgtccgtcctctttcatgagggcgtcgtgattgcctcgttcgatgatctttcctccttcgataaagagaatctcgtccacgccgcgaatgctgctcatgcgatgggcgatcatgatggtggtgcggcccttcattaggttcgaaaaggccttttgaatctcgtattcgttttcaggatccgccgccgcagaggcttcatccaaaatgaggattttcggatcttttaaaaacaatcgggcgatggcgacccgttggcactcgccgcctgaaagcttcacgccctcggcgccgattacggtgtcgtagcctgcgggaaatttctccttaaactcttcgcagcgagccagagccagtgcgcgatgcacttcctcttggtttgcctcggaatccgccagctggacattgtcgtaaatagtgaggccctcaaaaagtttcgcctgttgaaacaccatgcccaccgtttccatgatcccatctttgtcgtaggcgggcatgggcttctcgccgatcatcacgtcgcctttatttaccggatagagcccggagacgagcttggcgatggtggacttgccgccgccggatgggccgacgaaggcgtagatttttcccgcatccaagtggagggaaaagtcggagagaattttttcgtcctcgtcgtaagaaaagtccacatggctgaaggtaatggagctatcgccgaagtccttttcctttccgaagaccattttcttttcgtccatctctttaaacagggcttccacagtatccacggcgcgattggcctgcacgtgatacatggacacgtacataattttcataatgttggcaaagaacatgcccataaacagcgcgaagaacaaggtctttgccgcccacaggccgccgtcgtctcctgcgcctacgcggtagacggcgtagaaaacgggtgcgacgataaataaatttaacagccactgaaaggtgacatatggaatgcgacaggacatggagtagttgtaagccatgtcggcgtaatcgttgatggtgctgtataggcgcttaaagctcacaatgggcgcggcaaaaagcttcaccacctgcatgccccgcacgtattccacggcttcggcatttaacagatccagctgctccatgtaggcgctcataaattctttttcccccatcattttgaagcagaggaagcccgacaagaggacgatgacgccgaaaaaggccgctagccgcaaatccaccaggccgatgacgacaaacatcaggatcggcgttaaaatggccacggtttgatcgggaatcaagtgggccacggccatgtgggtctgctccacattgtcgtcgatgattttgcgcacgcgacccgattggtttttgtcgtaaaaagtattggacgccgtcaagagatgatcgatgcccttttccctcaggcgggtttccaagcgaaaggccgccaagtggctcatccatgtgccgaggaaataaagaattccgtaggcgataaatgccgccaccacgcggagggcatagtcgctgcccgcaccaaaatcctgttcaataaaaatggcctttagggcgagccacaaacaataatagccgaacaaatgacagcagacggcggctatagaaaaaaatgccgacaaaaagccgttgcttcgcttctccggtatgtaagaaaataattttcgataggtgttcaaatagatctcctttcgttaatgatagtatttatcttttatcttttaaacacagtgtaacgattttccctttccttgtctattcataaaagcgaaattattcatttcgtttgacgaaatcccgatccaataggcatgccgacaataccgaccttccatttgttacgaaaattaaaaacatgcaccgatttttcttgatataataatcaataatagatggattaacgggatgacggcacgaacgaccggtgtgaaggaggtcattatgtatcgaaaagagattaccacctacatcttctcgattctttttattgccatggccgccgccattcagatcatggaagcccgaggcaccttgccttttacgggaaagactttggtgttttttctctacgccctggtctttcttctctgggcgaaaaacatggaaaaccgcgtgctccgcgccgatgtagcccggcgatttaaattcatcgcccttttgcttgtcggctacttggccacccgtacggtaaaatacgaaatcctcatcgcttccgccaccgccgttcgttggattcgctacatatattattttttcattctcaccacggtccacttggtcttttttacgtccctctacgtaggcaaatcggagcgcgagcccatcgacaagcgttggaatcttttttggattcccaccgccaccttgattctcttgattttaaccaacgacttccacggcctcgttttcgtgccctacgcccacgcctcgggctttaagcagtacggccccgtctaccttatgaccaacggctacatccttcttctcgccgccttgaccctgattattacatcgaagcggtccttggcacaaaagcggctgaaatccatcgccgccccggtaggggttttggccctgtgctttgtctacaccgtgctctacatcgtagactggccgccttttcactatgtaaaaatcgcctttcaaagcgcagagtttaacagccttacggtcattctctttatcgagtctttggtttttacgcggctcatcgcctccaatcgaggctacgacacttttttaagcttgtcttccttgaatatgggcatgatggatttaaagggacaaatcgtcgtgaaacccaacaaggggccggaggtcagcaccgatgcagtaagagaagcggaaaaccgcgccattgccgtggacgaaaacacccttctcgaaagctcgcccattggcggcggcagctgtttttggttcgtggaccttacggattttaatcgcctgaaagcgcaacttctctccgtcaacgaggaaatgctcaacgaaaatgaattgcttctggccaacaataaactgaaggaagaaatggccatggttaaagagcagcgggacattcgcgacgccattcaggaaaagctcaagccccaattcgctcagttgaaagtcattatggcccatctgcccgaggcggaagatgcttacgaagacgacctcaaggacgcctgcctcttaaatgtgtacattaagcgcttctccaatttatttttgcttgccagaaacagagcggatctttccctggcggaaatgcgtttggccttcgacgaatccttagactacctgcgattaaaaggcgtggtcacctccaatacctgggacgtgaccggcgctgtggatgccgcagcgggcctgagcctttacgccgcgtttcaaatgatcttagaggcttatctccattgtcttaaggcgattttcattcattttcaggaaaaggatgaatcgcttttgctctcgatctacgtggaaagcgaaaaacaaatctccccggaaagaaaaatccgagcggtgctcccctccgaaggtgtctcctttgcggaggaatttaaggaagggctctctctcctgcgcttttccgtaaaaaaaggcggtgacccacgatgatgaatctatctacagcggcgctcgctattttatttattgcaagcctcgccatccttatcatggcactggatctatccgtggatgcggcccttgccttgcgactatcgcctctctttttcacaagcgccctcttggtcttggcggcacttcttcccgcccaagtggtggcggagctaggcaccgggcattaccacttagccgattattttttacacacgccccttctcgccttcatcgcctatctcctggttttgctcttcttagaaggcgtcctggcccgcaagctttccaaactgaaaaaggaacagctgggagaaaactccgtgaaagaaagcgtggacaatctccccgacggcatttgtttttcaaagctcgacggcacgccccttttagtgaatcgccaaatgcaggaaatcagctaccaagtcttcggcaaaaagctcgtcaacgacttgctctgcgcgcgggacatcgaagccaatcgcattcgtccgcggacaaaaattttgcagcgggagcctttaattatcgcaagcaattccaaggtgtggcagattaaaatcatccaccacggcttggtgaaggaaaccctggcctacgacataaccctggaatgggcgctctatgaggaaatcgagaaaatgacccgggccaatcagcggatgaatgccgaattaaaggcgtatcaagaaaaaatcggcgaatacacgcggcagaaggaaattttacaggccaagataaaaatccacgaccgcttaggtcaggccctggtttatttcagacgctatttggaaaagtcggagaagacgcctgaggatcgccgccgactggagaccctgtggcgggaatgtttgattcttttcgacgaagaagatgaggcgccgaaagcggcctcggcttgggacaagtttatttcgacggcgaaggccatcggcgtggatgtcatggtcgaaggcgacgtgcccgcgtcggaggaagatcaggccctcttggtggacttggtccacgaggcgttgaacaacgccgttcgccacggccacgccaaaaagatttggatcaccttaaaagatcgcggccccacattttcctgcaccattaaaaacgacggcaacttgcccacgggcccggtggaggaaaaaggcggattgaaaaatatgcgccaacgcttggcttattacgacggcaccctggccgtacgcagagagtcgctctttcaattggatttatcctggagcaaaggaggttttcgtgacttataaatttatgatcgtcgacgatcaatttgtctcccgtgaactgttccgccttattctggacaaccaccccggttacgaggtggtttattccgtagacacggccatgtttgccgacacctatgtcctgaatcggaatttggatttggtgattatggacattctcatgcaagacggctccaacggattggatgcggcggaaaagataaaaaggttgaggccggacataaaaatcgtcgccgtcaccagtatgccggaagtctcctggatggagcgggcgaaggccatcggcatcgacagtttttggtacaaagaagcatcggaggcaagtattctcgaggtcatcgacctcaccttggccggggaatccatttatcccgaagccacaccggtaattcagctgggcctcgcccaatccacggaatttacgcctcgagaaattcaggtgctgcgcctcttgaccaccggtgccggcaacgaggagatcgcgacgaaattagaaatctccctgaacacggtgaagacccacgttcaacatttaatggacaagaccggctttaacagccgcacccagctggccattcaggcgagaatcacaggttttgtcatcgaagaaagtgaacaatgacgccgcggaaatcctccgcggttttttattggcggaatttgagcaaaaaaaagagcccgcctcggcggactcttcgcaaggatcaattcactccgagaaggggcttaaatccgttgctcagcggatcgtattctaaaatcgcggtacctgttttgttaataaaaatgtggcggacgtggtcggtgaggttgtcatctacgggattatcttttcgcagggtgacgagaaagccatccatctcctgttgattgtattccgcaagctccggccgggtgtccgtggcgtagtagcttttatctaagcgtcccatggctgtcagtcggctgattacttcatccgctgcattggcgtcgttgacataggcttttaaatactgatcggcggcggtgatccgcaccgcccgcgccgcgccgtcccattccacgttcatatcgaagatttcggcaatggctctgagaggaagcatggtgcgattgttttttataaaggccgccgaatctaagggtacgggccccgccatctctgccgtactgatccatatctctttctttccgatgggaatatagatctgcttgtcgcctttttcgatggagacggctttttcatttttcagataaaaaacctgcgcccctaaattttcggcgatgacccgtacaggcacgaaggttctggaatttttaattaccggcggttgatccggggagatgatttcgccgttaataaaaatcgtcacatccttcggcgccttaaaggccaggctgaagaggagcaagggcaagagccacagccattttctgcgatccgtctttttcatgattttctcctttcggcccgggcggtttttctttccataacgtccggtggatttacttctttttcttctcccctttcatgatcttcttcacgttgtcgccttttaagtccatgtagttttccttcgaaatgcggctcgtggtcacgccgtgttccgagtgcaggtactcatccacacagtccaaattggagacttcgctcctcgtctcgaattcgtaggtatggcgggcatcttgatttctgtatttttttaccatgctgaagaagtagataaaaccgcccacaagcaggagccagaaaatatctcggccctcttgaatcttcgtgccgtcgaataaatccagtgccaaaataattcgcaggacgacggcggcgaagaagctcgcgatctccacgagaagagatacgaggaaaagcttgttgtagttaatggggacgctccccatggtctctttggttctggcattcaccgccacgtagtggagcagctgcttcttgccctttacctgcatgtagctgtaaagccacacgggcaagtaggccgctttccacgcgtcgcctacgacggtaaagtcttcctgcttccagcacacgccgcgatcgtaatccttgagcgtgtctaaaatcgccagccgcgccacatcggcactttgcacgtcggtgacctctttcagcccgcccctattggtgtcccgtttttccgaggtatagcctttcaggtaattggcattgtaggccacgcaattttccgtgtcgaagggcaaaatggaattaataatattggtggtcttggtcttggattggtaatccaacttgtcgctgctggattcgatgaccaagtcgtcgatggcgatgtcgaagtctcgttccacatggtaggtgtccacgtcgtattccctgtgctccccgtcgtcgtcttttaccatatagctgttggtttcaatttccccttccccagacagcttcatgtggccgtttacatccaccagcatatagggcaaatagacgccgcaaatattttctgtggtaaattcccttgcgaatgtgggatgggcgaattttcttcgctcgccgacgaaggtttcgatttctttttgggcctcttctttggaaatgctgaagggcaatagcacatcgggtacggcgccgtttggaatgacgctgttaatggaaagggtgttgcggcaccagtggcagcgggcttgggtagaggcggccgtatcgacgacgacctccgcaccgcagctctcgcattttaaggtgatgacatcctcggcatcgacgtcgatgtcctcggcgccgctttgaacggtgcttccctttaatgtctcgatggccgcatcgtcggccgctcgaatcagttcaaattcgtggcgacagaaattgcagcgcagctttcccgtcttcgtgttggtctgaatgtctgtggcgccgcacttggggcatttgatttggccgttggctttgtcttgttctgtgacggcggtattcatcttttcatcagccataatccacctctaaagtcccaaaagctcagattttattttgttaaactcgtcttcggtaataacgccggcgtccagtaattttttcatttgaatgagtttttccgtcgggtccgcttcctgtgatgcaggcgcctgttgttgattgttcatcccttgattcaccggctgctgtgtcgcgcccatgacattccctgccgcgcccatgcccatgcccataaaggccatgttggcgccgccgccgttttctcccgccgcctgcatgccgcgggccacagattgttgcataaaggaattgcctcgggcgccggaaagggcatcggcacgctttacatctttcatcatttccttcgtatcctcgtcgtattccatggcgagaatggcggtcttcacgatggtaagcccgcgctccgtcttccactgatagccttcctccacggcctcggtgaggctcttggcaaagcccagttgatccccttgaatgcggctcatgcgattgcctttggagggatcgttggtgtagttggagaaggcggcagaaagggaaccgaccacttcgttgaaaagctgttccgccgcgtcgttatccaaatcgccgaagtcgaaaaccggcgcgttttgggtcaggaatttttgcggcacgaagtttttcacgaagagcaagggatccacaatcttcaaggtataagtacctcgggtcacggcgccgacttgggtgccgaaaaaggcatcgtcccagtagatttcgctttgggtgccgaagcgattgttggggatttcctttagattgacgtaaaaggccaattgttgggcgccggcttgtccgccgaattgaatcttctcccaagtcgactgaatcaagctgcccacgggatcttctgtggtgaagatgctttgggcgttggcctcgtcgctttgatagatgaatccgccgggctctgccacaatgccggtgatggcgccgtcttccatggtaatgagggccgtcccttcaggtacgatgatcttgctgcccgaagtaataatattgtcgttgcccttggtgttttcaccgcgaccgttgttgctgcccttgggcttggctgcaaaaatagctgccgtggcgggaatgccttccggcaccatgtaaaaatccttccactgatcagccaggcttccgcctaaagcgccggtaaatgctttaacaaatcccatcttgtcctcctttttctttcatatcttttcttgctttcaggtgatcttcttatcctttcggtaattccactctcgcttcgtcatacaagaggcgtgcggcaaatgccaccgcttcattgcgttgaatctttccgtcggggttaaagcgcatccactcgtcgcctacggcaacccccatgcggtacatcttcaaaatttcttgatggtggggcgtgcttctgtccacatcgggaatgtccgttaagggcacgtcgggatttaaaaacgcccgtcccggccgctggtccacgtgggcaaacatgcccgccacgtcccttcgcttcgccggtgcgttccaattttcgcaggcatagagtttgacttgtccttgtgcaacttttggatttctgtaaattccattttcgtaacagtagcgcaggtattgaccgtaccacggcgcggtgcggttcgcctcaaagtcggtgtatcgttgcattaatctatcgtgcagtttcgccgccatggtggccacttcccccatggtcacgtagccctcggggtcgaaggtggtttcggtgcgtccgtttataatgccctcgttataagcgcattgaaggtagaagccgtaccagctgtccttgtccacgtcgataaagggcagatattcttccccgtcgggcataataccatttcctccggcatatgcggtcgttgaaacgaacgggatgcagacgaaagccgccaggatgaaaagggctatggatttcttgttcatagaggactcctttcttttttcatcaaccgtctgatgacaggttctccggatagctttagtctaatctatatttgtaaagcatccatcacctggaagtatgagatcggggttttttgaaaaatttttccacgacatttgaaaggagggcacaaaaaaagacaccgcccgtaagcagtgcctctatgtagccggacatgccggctattaaactaattcgatgatggccatttctgcgccgtcgccacgacggggaccttttttcagaatgcgcgtataaccgccttgacggtcggcgtattccggtgcaatttcttcgaacactttcgttacaacggattcgtcgaagatgtaagccagtgcttgacgtcttgcgtgaagatcgcctcgtttgccgagggtaatcatcttttcagccatgcgtctggtttcttttgcacgggtcactgtggtttcaatgcggccttcgcgcaatagatcggttgttaagtttcttaacatggcccgtctatggggcgtcgtgcggcctaattttctgagctgtgccacaatggttcctcctttattcttcgttttctctgagagagagtccgagttcgtccagtttttcttgcacttcttccaggctcttctttccgagatttctaactttcatcatttcgtcttcggttttgtccgtgagctcgctcacggtgttgatgccggcgcgtttcagacaattgaagctgcgaacggacagatccaactcttccacggtcatttcaaggactttttccttttgtccttccggtttttcaaccataatgtccatgtcgttgacttcttctgtcatggagacgaacagatccaagtgttccatgagaatcttggctgccagagacgtggcttcgtcggcggtcatggaaccgtcggtttccacatccaggatcaaacgatcgtaatcggtacgcaaaccgacacgggtgttttctacattccaattcaccatacgaataggcgtgtagttggaatccacggcgataacgccgatctcggtgatttcgtcttttttcagttcgctcggctcgtagccccggcctcgttcgatgacgagttccatataaaagttcgcatcgtcgtttaaagtggcgatgtggtgttcgggattgacgatttccacaccggccggcaaggtaatgtctccggcgaccagttccccggcgcccactttctcaacggaaaggcgcacaggttcgtcttgatcgcttttaaacacgatgcctttaatgttcaggataatctccggaacgtcttctaatacgccgtcgatgacgctgaattcgtgttcgacgccgcgaatgttgacgaaggaaacagcacaacccggaagcgaggagaacagcactctgcgaagggagttgcctaatgtgatgccgtagccgttttccaacggctcgacgataaatcttcccttattgccgtcgcttgatacttgttcaactacaatactaggcttttcaatttcaatcatattttcgccctcctgggaatggatctgtagagactttctcgtgagatggtatgctgtttaactatcagactctacgacgtttcggcggacggcaaccgttgtgaggaatgggggttacgtctttaatcatggtaacttccaaaccggatgcttgtaaggaacggatggccgcttcacgaccgctgccgggtcccttgacgaagacttcaacgctctttaagccgtgttcctttgccttggtggccgcttcttgagcagcttcttgtgcagcaaagggcgtggattttctggaacctttgaagccgagttgaccggcactggaccaggagatgacattgccgctcatgtcggtcaaggtcaccatggtgttgttaaaggaagaagcaatatgcgcttgtcctttttcaatattcttgcgcactctctttttggagcgcgtagctctaccttgtttagccatttagccctcctacttcttcttcgatacaatcttcttcggacctttgcgcgttctcgcattggtcttggttttttgaccgcgaacgggcaggcctctcttgtggcgaatgccacggtagcagttgatttcgcgcagacgcttaatgttcattgcgatttcgcgtcgtaaatccccttctacatggtattcgtcgatgactttacgaatcgaggcgatttccgcttcggttaagtctttaatatacgtgttgaagtcgacgccggctttcgtcaggatttcttgggcgcgggaacgtccgatgccgtaaatataggtgagcccgatttcagctcgtttttctctaggtaagtcaataccagcaattcttgccatgccaacaccccctatccttgtctttgtttatgcttcgggttttcgcaaatcaccatgacgcgtcctttgcgcttgatgactttgcatttatcacacatcttcttaactgaaggtcttactttcatttcgtcccctcctaaactatttctttctccaggtaatacgtccgcgggttaagtcataaggactcagctcgacggtcacccgatcgccgggcaatatacgaatgtagtgcatgcgcaatttaccggagatatgagctagaatttcgtgtccgttttctaacttaaccttaaagtttgtattgggcagggcatcagttacgacgccttccacttcaatgacatcttcttttgccatggttgcatcctccttatgcctcttggaagcgagacagttgtttacgaatatagctatcgtttaacggtctatcctcaggtttcagatccacaagagaatgggttttttgcaaatgcatggcctttttccgcttgggattatccaacgttcttctcttgccgtctgccagaagaagatatctgtcgtcaatcacttccaagaccacaaagaaaccttctttgtctctgcccgccttggatatgactacctgaccgaccttaatatctgcggtggtgttcatcgacgattaggcctcgttgtcgagcccacgccgtatttgcgtaaatacatcgtcgatggctttggaaccgtcgatatccagtaacagtccttgcgctttataatagtcgattaacggggaagtttgtctttcgtagacgtcgatgcgcttcttcaccgtttcttccgtatcgtcatcacgttgaatgagctttgtgttgtcgtcgtcgcagatgccttccaccttcggttgttgattcttcacgtggtaggttctgccgcaggtggggcaaacccgtctgccgacggcgcgatcaataagcagttcgctgggaacatggatattaacgacacaatccaatttgatgcccatggcttctaacgctgcgtctaaagagacggcttggtttaccgtgcgagggaagccgtctaataaaaagcctgcttccacatcgggttttttcaagcggtccacgacaatctcgttgacaacttcgtcgggaaccaactcgccgcgatccatgaagcttttggctttcttgccgagttccgtggcatttttaatgttttcgcggaaaatatcgcctgtggaaatgtgaaccacattgtacgtttcgacgatggatgccgcttgggtgcctttgccggcgcccggcgggcctaaaatgactagtctcatgtgatcctccttattttaggaatcccttatagtgtcgcatcattaattgttgttccaaaattcgtgccgtttccataataacgccgacgacgatgattaaactggtgccgccgaagctaaagtgcatgcccgtgattttttctaaaatcgtaggcaaaacagacaacagggccagggccaatgcgccggggaaaaccagacggtttaccatttgttgcaggtattccgatgttttcttgccggggcgaatgccgggaataaagccgccgttttgttgtaggtttttggaatattccaccgtgttaaattggatggccgtatagaagaaggtaaagaagacgatcaacaggaccatgaagatgctgtaaataaagatcccaatattacctgccggcgtaaaccatttggtcatgaatttggccgcttgagaattcgggccttggaacatgacgataatcgatggaatactcataatggtttgagcgaaaatgatcggcatgacgccgctcatgagaactttaatgggaatatgggtgctttgaccgccgtacattttccgtcccacgacgcgcttggcgtattgaacgggtactttgcgttgcccttcgttaagcaggacgacgaagaagacgatggcaatcgccagggcgatgaaaacaacgacccaagcccaagataccatgcctgctgccgccatgcggaaggaagcccatatatcagcggggaatctggctacgatccctgcaaagatgagtagagagatcccgtttccgatccctttttccgtaatcatttcaccaatccaaatcaggaaggtactcccagccacaacagagagaataatgaccacgtcttggaacgggttggcggtgttcactgcttgtctgtagaagccgtaggtgtaaccgatggcttgtacggcagccagtgcaaccgctaaataccttgtatactttgcgatctttttccgtccggtttcgccttctttgctgagcgcttccaagcttggaatcgcaatggtcaacaattgaagcacgatggatgccgtgatgtagggataaatgctcgtcgcaaagacggagaaatgtccgaagttaccgccgctcattaaatccaagaacgagagtataccaccttgttgttggttaaaaatcttcgctatcgccgaccgatccataaagggaacgggaatgtggctgccgaagcgaaagaccacgagcatcaacacggtgaagagaagcttttttcgaatttccgggatcttccaagcatctctaaaggtttggatcatctagatcacctcagcctttccccctgccgcttcgattttttcagctgcggatttggagaagtggttggccttgacgttaacagagacgttaatgtcgccgttacctaaaatgcgtaagccgtttttggcgtcggcacgcttaaccataccgctttcaatcaaggaatccaaggtaacggtcgatccgttttcaaattggtttaatgcgtctacgtttacaatggcatattgttttttgaaaatattggtaaagccacgtttcggaagacgacggaaaaggggcatttggccaccttcaaagccggggcgaacgccgccgccactgcgggccttttgacccttgtggccgcgtccggcggtcttaccggtaccggaaccgataccgcggccgagacgtttctttgccttgactcctccaccttcttgaggtcttaaatcatgcaatttcattacgtccacctccttagtcgacaatttcaaccataaagtctactttgttgatcatgccgcggatttgaggtgtatcctgtttttcaacgacttgaccgacttttctgagacctaaggctttaatcgtgcgtttgtgtttttcaattcttccgatggggcttcttttgagtttaattttaatggtactcatcacatcccccttatcctaaaatttcgtcgacgcttttgccgcgaagtttagctacattttcaacggtctttaaagacgttaacccttccatcgtggcgttcacggtgtttctcggattggacgatccgatgctgtgggtgtagatatctttaatccccgcaagctcgcatacggcacggacgcttccgccggcgataacaccggtaccgggacgagccggtttcaagaacacgcggcctgcgccgaagacgccggttactttgtgggggatggtgtttccgaccaaattaatcttcaccatgtttttcttcgccgcttggctacccttgcgaatcgcttcgggaacttccagggccttgccggtaccgataccgacgcgaccgtttctgtcgccgacgacgacgagggcagaaaaacgcatattacgaccgcccttaacggtctttgcaacacggttgatagcaacgactctttcgtcgagttccgtgtctctatctctggtattgtttttcgtacggttcaatctttccctccttagaacttcagtcctgcttcgcgagcagcttcggctaaagcggcgatgcgaccgtgataaatgtaaccggagcgatcgaagacggcttcttcaatgccgttttcttttgctttctttccgattgcttcaccgacggctttggccgcttctacgttcttcgtgctttccagattcaaggacttgtccaaggtggaagcactggccaatgtctttccgtttacatcgtcaatcagttgagcgtacaggtggtgcgcactgcggtaaatggcaagacgaggtttggattccgttccgttaattttctgtctgacgcgaatatgtctcgcttttcgattgccttggcgatcaacttttttaaacaaaacactccactcctttcttacttaccggtcttaccgacttttctgcgtacgtattcgccaacgtagcgaatgcccttgcccttgtagggttccggcgaacggaagctgcgaatgtaggcagcgtaggcgcctactttttgcttatcgattccgcgcacgatgatttgcgtgttggacggaacttcgacttcgattccttcgggatcttcaagttcgatcgggtgggagtgaccgaggtttaagttcagctttttgccttgcttttgcgcacggtaaccggtaccgatgatttccatttgcttttcgtaaccgttgacgacgccttcgatgttgttggcgatgagggtacgataaaggccgtggagcgcgcgaatgtctttattgtcattgggacgcgtaacgacgacttgattgtcttcgacggcgacggtaatggccggatcgatttcagtttgaaggacgcccttgggcccttttacttcgacgatgtggccgttgatcttcacttctacgccggaagggatatcgataggattttttccgattctggacatctttttctccttcctttaccaaacgtagcagagaacttctccgccaacttgttccttgcgtgcatcgcggtccgtcataatgcccttggaagtagagatgacggcaatgcctaagccacctaataccttggggatttccgtgttctttgcgtaaacgcgaagaccgggtttggaaatgcgcttaatgccgctgattactttttcgtcgtttcttccgtattttaattctacattaattttgccttgcgggccttcttcaagcacgtcgtagcctttaatatagccttcctcgagaaggatacgggcgatttccgcctttattttcgaagcgggaatctcaacagatttatgttttgcatcgttgccattacggattctcgtaagcatatctgcaatagggtctgtcatcatagtcaattcctcctttcggttagccttaccagcttgcctttcttacgccggggatttgccctgcgtaagccagtttacggaaacaaattctgcaaataccgtattttctcagtactgcgtgagggcgaccgcaaattttgcatcgggtatagtttctggcgctgtacttgcttttacgtttttgcttcgctaccatggatttctttgccacagtttaaccctccttctttgcaaaaggcatgcccatcttttcaaggaaagactttgcctcttcgtctgtttcggcggttgtcacgatggtaatatccatgccgcgcaacgtgtcgattttatcgtattcgatttccgggaaaatcaattgttctttgagtcccagagcgtagtttcctctgccgtcgaatgccgtgggtttaatgccgcggaagtcgcgaacgcgcggcagggcgacgttcatgagcttgtcgaggaaatcatacattctgtcaccgcgaagggtaactttgcaaccgatggcgctgccttcacgcaatttgaagtttgcgatggacttgcgcgctttggtgataatcggtttttggcctgcgattaaggtcaagtcgttaatggcactttccagcgctttcggattgtccttcgcttcgcccagaccaatgttaatcacgaccttttcaaggcgaggaatttgcatggtgttggcatacttaaactcgtccattaaagcaggtgcgacttcgttttggattttatcttttaatctcgatgtcatcacaggcctccttacttatcagaaatcgtagcgccggaggacttcaggacacgtacctttttgccgtctttaaactcgtagccgatgcggcttttggtgttggtctttgtatcgtaatacatgacattggatacgtggatcggggcttcaactttgttgatgccgccggggttttgcggtcctctcggtttttcgtgtttcgtcacgatgttgacaccttcgacgacaacgcggtcaagtttcggaatggtacgaacgacctttccttttttgcctttgtccttgccggaaatgacttcgacggtatctccttttttgatgcgcattctatgccacctccttaaagaacttccggagccaaggagataatacgcataaagctttctcctctgagctcgcgggttaccggcccgaaaatacgggtaccttggggatttttatcgtccttaatgatgacggctgcgttgtcgtcgaacttaatgtaggttccgtcggggcgacgaatgccttttttcgaacgaacgatgaccgccttgacgacggcaccttttttaacaacgccaccgggtgttgcgtgtttgacggagcaaacaacgatgtcgccaatgttggcatagcgacggttcgtgccgcctaataccttgatgacgcccagttctcttgcgccggagttgtcagcaactcttaatctggtttcttgttgaatcatcccgagaacctccttatttcgctttttctacgatttggacgaggcggaatctcttatccttcgaaaggggacgtgtctccattgcgcgtacggtatcgccgacacttgcttcgttgttctcgtcgtgcaccttgtatttcttcgtgtttttgaatcgtttattgtaaatcgggtgactcttgaaggtctcgacggctacgacaatcgtcttgtccatggcatcgcttacgaccttaccggagatcacttttcgttgatttctttccataagttacgcctccttttccatgttgagctcgcgctctctttggatggtcttcacccgcgcgatgtctcttttcacgcttttgatggtggacggattgtctaattggcctgttgcaagttgaaagcgaaggttaaagagctcgttcttcaactcggacacctttttattcagctcgtcaccggataaattgcggatgtctttaattttcattgctatcgccctcactttcttccttattcttggcgataaaacgcgtcttgatgggaagcttcatggccgcgagacgcatggcttcgcgggcaacttcttcttcgacgccgcccagttcaaacagaacgcggcccggtttaacaacggcaacccagtactcgggtgcccctttaccggaacccatacgggtttcagccggcttttccgtaaccggtttgtcggggaatactttgatccagatgttaccgccacgacgaatgtagcgggtcatggcacgacgtgcggcctcgatttgattggaagtgatccaggtcggttccaatgcttggatgccaaagtcaccgtaggtgagcgtattgcctctgtgtgcaacacccttcattctcccgcgatgttgtctccgatattttactcttttcggcattaacatagtgctttcctcctcacttaccgtctatcttggccttggccttgatttctgcggcttcctccgcggcgtttgtcgttgttgccgcgacgtctgttgtctcgacgatttctgcgtccttgaggcgcttcgggaagaacttctcccttatagagccatactttgacgccgatcttgccgtaggtcgtgtcggcttcggcaaaaccgtaatcgatgtctgcacgtaaggtttgaagggggatggtaccttcgctgtagccttcgcgacgggccatgtcggcgccgcctaaacggccggagcattgggtacggattcccttgacgcctaagcgcataacccgttggatggtttgtttcatggcacgacggaaggcgatacggcgttccaattgtgctgcgatgttttcggcgattaaggttgcatccaagtcgggatttttgatttcatccacgttgatgacgacacttcttccggttaatttttcaagttcttggcgaagctcttctacgccggtaccgccgcggccgatgaccatgcccggttttgccgtggagatggaaatcttaaccttgttggcagcccgttcgatttcgatgcgggaaacgccggcttggaataagtttttcttaatgtatttacgaatttgattgtcttcgacgaggagatctccaaagtcttttttgtcggcataccatttggaatcccaatctttaatgatccctacacgaagaccgtgcggatttactttttgacccattcttctcccccttattattctctttcggaaacgacaacgccgatgtggctggagcgcttcagaatcggatacgccatgccctttgctttggggcgataacgtttcatcgtcggaccgtcgtttgcgtaagcttccttgacaatgagatcttcgcgatccaggttcaagttgttttccgcattggcgacggcggagtgaagaactttataaagttcacgggcgccgcgcttcggtgtaaatttcaaaagcgccagggcttcatccacttgtttgccgcgaatttccgcgcaaatgaagttgaccttcaaaggagaaatgcgcacgtattttgcaattgctcttgcttccattcgttactcctccttacattctcgtggttttttcgccgccgccgtgaccgcggaaggtgcgagtcatgacgaattcgccgagcttgtggccgaccatatcttcggtgatgtagatcggtacgtgttttctaccgtcgtgaacggcgatggtgtgggacaccatttccgggaagatcgtcgaacgacgagaccaagtttttaccacttcttttttgtttgcttcgttgagggcgtcaatcttctttaacagatgttcatctgcgaaagggccctttttaatggatctggacattgcttcctcctcccttatttcgttctacgacgaacgatgtaacgatcgctcttcttgttcttcttacgcgtcttaagacccagtgctttcttaccccagggcgtcatcggggacggacgtccgataggcgaacggccttcaccaccaccgtgggggtgatcgacggggttcattgcggaaccgcgaacgtggggacgaatgcctaagtggcgtttcttcccggccttacctaagttaatcaactcgtgggcaatgtttccgaccgtaccgacggtggcgcggcagtcgacgctgacgcggcggtattcgccggagggaagacggagttgagccatcttgccttctttagcggaaagttgtgccgaggtgccggctgcacgagcgatttggccgcccttgccgggggtcatttcgatgttgtgcaccgtggtaccgacgggaatggcgtgtaagggaagggcgttaccgactttaatatcggcatcttcgccggattccactttgtcgccgacctttaagcccttgggggctaagatgtagcgcttttcgccgtctgcgtagtttaacagggcgatgtaggacgtacggttcggatcgtattcgatttctgcgacctttgcgggtacgccgtctttggcgcgcttaaagtcgatgattctgtattttttcgctgcgccgccgcctctgtgacgactggtgatgcgaccgtgtgcgttacggccggccgatttgttgaggctgacgaccaagcttttttcaggtttgcttctggtaatttcttcgaaactggcgacggtcatgcctctgcggccgttcgtcgtcggtttatatcttttgatctccatgaatgtccctccttaggcttattgcatgttgtcgaagaattcaatcggttgggaatcatccgttaaggtgacgatggctttcttccagttgggacgcttgcctacattcatgccttgacgtttgactttgcctctcatgttcatcgtgttgaccttggctaccttaacggagaagatcgcttcgatggcttttttgatttccgatttgttgctcgtcttcgctacttcaaaggtgtacttgttttcttccatctctaacatggattgttcagtaatgataggacgaatgatgatatcaaagtttttcattagttatacacctccacgattttgtccagcgcatccttggtgaggatcagggagtcgtattttaagatgtcgtaaacattcatggtgccgaccgtagaaacttcagcattgggaaggtttcttgcgcttaatacgacgttcttgtcgttttctgccgtaacgatcaatgcctttttagcggcgcccatcttagctaatgcttcgcttaacgccttggtcttcggtgcatcgaaggtgatttgatcgacgatgatgagttctttttcttgaactttcgaggttaaaacggatttcatggctaaacgacgaacctttttcggcgtcgtgtagcggtagcttctcggcttcggtgcaaagacgatgccgccgccgcgccattgaggcgaacggatggagccttgtcttgcacggcccgtgcccttttgtctccaaggcttcttgccgccgccgcgaacctctgcgcgagttttggcggactgtgtaccttgacgtctgttggccagaatgttctttacgaccaaatagacgacgtgttcgttaatttctacattaaagatatcgtcggaaagttcgatttcttctaaggacttaccggccatatctatcatttggaacttagtcattattcgtgtcctcctctcgcttatttaccgcttttaaccgtggcacgaacgcgaacgagtccgtttttcggtccgggaacggcacctttgattaaaaggaagttgttgtcggcatcgacgcgtacaacttcgaggttttgaacggtcacacgttcattccccatgcgtcccatcatgcggtggcccttccatacgcgacccgggtaggatgcagcacccataccaccgggcattctgtggaatttcgagccgtgggtttcgcggccacgaccgaagttgtgacgcttaataagacctgcggttcccttacccttgctggtaccggtcacatcgaccttgtcacctgcttcaaagacggttacgtctaaggtgtcgccgacgttgaagtcttcgccttcagccaaggggaattcgcggagtacccgtttgtattccacgccggctttgtcgaagtggccctttaagggtttgttgacgtgtttttcttttacggcgccggttgcgacttgaatggcttcgtaaccgtcgatgtccatggtctttctttgaacgaccacttggggttcaaccgccacgacggtgacgggcacttgtacgccttcttcggtaaagatttgggtcatgccaatctttttacccaatgcatatttcataaaatacctccattacagcggattgcctggcaatcatatagtccgacagcttacagttttatctcgatatctacacctgcgggcagattgagtttcattaaagaatccacggttttttgattcgggttcatgatgtcgattaaacgcttgtgcgttctttgttcgaattgttcacgggaatccttgtgtttgtgtacggaacgaagaatggtgatgatttctttttccgtgggcaagggtaccggacccgatacgtcggcgccgctggcttttgtcgcttcgacaattctttgtgcggagctgtctaataactcgtggtcataagctttcaaacgaattctgattttttgttttacatttgcagacatttagtccctcctagtgcattttcctcaacgataagggaagagcgccgatcaacctagccgggtgttttctgtgccccgtaaaaaaagtcgggcgctccgtcgcccaattcacgattggacattctcgacaataattcccttttccgcaagcctccgatgcgaacacatctttgcgcctgtttcaaagccacctattgtgtcaacgcatgtctcacgcataccttagtattatacataaaaaacaacctaaaatcaagggattcaggcattttctgcggatttttcgggctcgtgcctcgatccgcgggtatttactttggcaacttagctataataaccgaaacaatcgccaattgcaaggctttttctgaaactttacaaaatagccattctgcctgttttgatttaaccctatgataaaatagaaagataaaggatggtgtctatgaaactcttaattttatttgcaagtcctcggcccaagggaaacacggcacagcttttggataaaatcaccaaacgcttcgacgattccgtggaggtcgcccgcttcgatctctataaaatgaatctgaaaagttgcatcgcctgcctgcgctgccaaaaggtctcggatggattcaactgcgttcacgacgacgatatgcagaaaattttcgacgcggcccttcaaagcgatctgattctattcgccacgccgatttattccttctattgtacgccgccgatgaagatggttctggatcggttggtctacggcatgtgcaagtactacggcgaaaccatggggccctcgctgtgggcgggtaaatccatcgccctcgtctccaccttcggctatccggaggaaaaggcctcggatctgttgacggaagggctcgtgcgctacgcgaagcacaacaaattatcgtttctcggcgcctacggcgagcgccagcgctcctataaggagccttttatgaatgaagcggtcgacaaaagagccgaggcatttgccgacaagctgatggcctttggcgaaagcttaaattaaacggaagccatggcttttgcttcatccatagaaaaatccccttttcctcgcaggaaaggggatttttgttcgatggtttacagttcgatgccgtctaattgtttgcccgccatatttgcgtaggacaggctgacattttccaaagtgtagatttcgaagacgtcgtcttccacgctgtagccggcttttgccaacatgggcatggcttccagtgcggcctttttcgattccggggaggtgatgaatttcgcttcgccggtgatgcgcaaggtattcatcttgccgtccagggcgcagaattccgttttcggattggccttcaattgtttgcacatttttttgcggttgtccgtgtagaatgccaattggccttcaaattccatgacgaaaccaatagggcgaacgtggggttggtccccgtctgtggtggctgcgtaaaatactttagcgttctttaaatactcgattactttcattgccattctccttttgtctttcaattgcattacgatgacttctatctatataccccgcccggcttttaccacgcaaaaaacgcccgaggattctcgagcgttttgtcttgattattttcggatgacgtaatcgtcgccgtcgacggcaatttccaaatgatcgccgtccataatgtctcctgcaataagggcgcgggagagtttggtttcgatgtggttttggatatagcgtttgacgggacgcgcaccgtagagcacattgtaagcttccgacaggattttttctttggcttcgtcggtggctgcgatgtgaatgtctctgtcttcgaggcggctttcgatttctgccagatccgtgtcgatgattctgacgatttcatctttcaacaggggcttaaagaggacgatttcatccacccggtttaaaaattccggacggaagtggtctttcatttccctgttgacggcctctttcgcttcatcggaaatggcgccgtcttctgcgaccccttcgattaagtcttgggagccgatgttggaggtcatgatgatgaccgtgtttttaaagtccacggtacggccttgattgtccgttaatcggccgtcgtccaacacttgcaaaaggatgttaaacacatctctgtgggccttttcgatttcatcgaagaggatgacggagtagggttttcttctgacggcttcggtgagttggccgccttcgtcgtagcccacgtagcccggaggcgagccgaccaggcgggagacgctgtgcttttccatgtattcgctcatgtcgatgcgaatcatgttccgttcgtcgtcgaagagggcttcagttaaggccttggccgtttccgttttgcccacacccgtgggccctaggaagataaagctgccgatggggcggttttgcgccttgagccctgcccgtgcgcggagcacggcgtcgcttacggctttggtggcatcggcctgccccacgacgcgctttttcagaatctcgtctaagtggaggagtttttctcgctccgtttcggcaagcttggcgacgggaatgcccgtccacttgctcactacttcggcgatttcttcttcggtaacttcttctttaatgagcttgccatcgcctttttctttgttttgctcttgcttcaattgctcttccaatttaggcaattcgccgtatttcaaggcggagagcttttccaaatcgtagttgcgttccgcttcttcgatttcgtgacgcaccttgtcgatggcttcttttatattcttttcgccttccagctctttcttttccgtttcccaacgggcgatgagggcatcgtaatcggccttttcttcggccaattcttcttccaaggcgtcgaggcgctttttcgaagcgtcgtcggtttctttctttaaggcttcccgctcaatttccagttggagaatgtggcggcgaatttcgtcgatttccgtgggcatggactcgatttccgtgcgcaccatggcgcaggcttcgtccatgaggtcgatggccttatcgggcaggaagcgatcggtaatgtagcgatcggaaaggagggccgattgaatgacggcgccgtcggagatgcgaatgccgtgatagatttcgtatttttccttcaggccgcgcaaaatggaaatggtgtcttccaccgtaggctcttgcacttgcactttttggaaacgacgttccaatgccggatccttttcgatgtacttgcggtactcgtccaaggtggtggcgccgatggtgtggagttcgcctctggcgagcatgggctttaagaggttgcccgcatccatggccccttcgctcttgccggcgccgacgatgttgtgaatttcgtcgatgaacataatgatttcgccttcggagctcttcacttcgtttaagacggccttcaagcgttcttcaaattcgccgcggtatttggccccggcgattaatgcccccatatccagggagaagacggttttgtttttcaaaccgtcgggcacatcgccagccacgattcgttgggccaagccttcgacgatggcggttttcccgacgccgggctcgccgattaagacggggttgtttttcgtgcggcgagaaagaatacgaatcacgtggcgcacttcatcgtcgcggccgatgaccgggtccatttttcccttggccgcttccgccgtcatgtcccttccgtatttatttaaggcttcgtaggtatcttcgggattgtcgctggtcacgtgttgattgccgcgaatttcttttaaggcgcccataaagcggtcttcgtcgatgccgaattccttaaaaatccgcttgttgtttaccccgtcccctttgatcatggcgaggtagaggtgttccacgctgacgtagctgtcgcttaagcgcttcgcttctttcaatgcgtcggttaaaacgccgttcatggcatttgagaggcgaggggtggcgccggtttgtttcgagaggcggccgatttccctatccaaggcgttttccacttccttggcatcgacgcccatatagtccaatacgcggggaataaggccttctgcatcggataccaaggctttatttaagtggaggacgtccacctccgggtttccgtattcttgtgccaagttttgcgcgctttccaacgcagccatgcttttttgtgtaaatttatcgattttcatatggcactcctttcatgctggttattttttcttttattttttgtatttttcacttaattgtttgtaaagcgcttcatcttccgcgcttaaattgtccgggttcacgaggacaaagcgaatgtacgcatcccctgtgcggccctttaaatccttcagcccttttttggccaggcgcagcttttggccgcccttggtcttttcgggtacggtaatgcgaagcttcccggcgggaagatcgcaggtgattttgtcgccgaaataggcttgccaaggatagatggcttgatccacgattaggtccagaccgtgaatttccacgcccttcggcgatgtgacgtgaattttaaagagaatgtcgccgtcgacgccgaatttctcgccgcgaactttcaattttttgccttcggtaatgcctgccggcaccttcacgggaatgtccacggccttgccgccgatggtgaggctcacttgccgctctacgccgtgataggcatcgtccatggaaatggaaagctctgcggaatactgcgtgcgttgcggcttgtgggccctgcgagagcctttgaagtcgccgaaaatatcgcccatgttaaaggtggtacttctgcgcttcgagcctgcgcccccgcccccgcctccaaagaacatatcgaagaaatcgctgaagtcgccgcttccgccggtggtggtgtaggtgtatccgtattgggagggatcgaaattcatgccgccggagaaattgccggcgctaccgaattgatcgtaggtttgtttcttcttcggatcggacaacacttcgtaggcttcgttgatttccttaaacttttcatgtgcctttttgtcgtcgggatgaaggtccgggtgatattgcttcgccagtttgcgaaaggcttttttaatcgttttttgatcggcgcttttatctacgcccaatgtcttgtaataatctttatattccataaatcacctcagttgactttctttgaccttgatttcattataacaccttcgccgcggaatgcaatagattttttgaccttgtttgacttttcttttcattcccgcctaaaacaagaaaagcccgcgtttagcaggctttttcgcaatcgatcagaagcgttccgcgtggttcacaaaggcatcgacgaagccttgcaaaaagtcttccgtgtctttgatcaattcgccgtttttgtcgaacttttcgtggacggcggacagatagacttccggttgttgcagaggaatgagatcgacgaaaatcaaattttgtcgcaaactgaaattcgccgccatgccgccggatgaaccaacgctggcgcttacgacggccgcgggcttggtgccccatttgctcttgccataggggcggctcgccacgtcgatggcgtttttaacggccggtgcgcataggcgattgtattccggcgtaaagaaaatatagccgtctttctcttccacttcttttcggaagcggctgtagctttccggttcgttgttttccctttcgtagtcttcgttgtaaaggggcagatcgccgatttcgataaactcagcttcgtagccttccgggaacatgtctttcaccttttcggcgacttttctgttccaggatccttttctgagcgagccgacaattaaaccgatttttttcgtcatggtatactccttttctttctcttaactgtgctatttgagttatatccgaaagaaaggaaatctaaacattaccggtccacgtagcgctttaagtcgcgttcgatgtcccgcttctttatggcttctcttttgtcgtgaagcttcttgcccttggcctcggcgatggaaagcttcaccctgccccgcgtcaggtgcacgtttaagggcacgatggtgtagccctcctgctccgtggccttggccagctgggcgatttcttttttatgcatgaggagcttgcgctttcgcaggggatccatattaaagcgattcccctgttcgtaaggcgccacgtgcatcccttcgataaagatttcgcccccttcgatggagcagtaggcttctttaatggccacgctgcccttgcgaatgctcttcacctccgtcccctttaagacgatgcccgcctcgtaggtggtttcgatgtggtattcgtgaaaggcttttttgttattggccaagtaatccccgtcgggtttcttctttttagccacgggcatcctcctctaattgaaagtcgatgcgtcccagtatgggatcggcgccgaccacgacgatgcgcatgggatcgcccatgtgaatggtttttttcgtgcgctcgccgacggccacataatggtcttcgtcgaagcgatagaagtcgtccatggaggcatagccgatgaggccttccactgtgttgtccagttcgcagaaaataccgaaggacgtgatccccgacactttcgcatcgaagctttccccgatgtgatcggccatgtattgcgccatcttcacatccaccaccttgcgctccgcttcctgggcgattttttccgtggcggaaatgtgatcggcaatgtccgggaaggttctcttgtataaatcgatgagcttcgtgtccagaacgtggttcaaatcctgcttaatgatccgatgaatggttaaatccgcataacggcgaatgggcgaagtaaagtgggaatagtatttagcggcgaggccgaagtggccggcgagttcttcgctgtagcgggccttttgcatgctccggaggatcatggtttgaatcaaagtctcttcgtcttttcccttgcaggccaaggtcagcttttgaatgtccttggggtggatgtccttggtgagatccaaatggtagccgaaggggcgaatcaccgcatttaaaagggtgagcttttcagcgtccggctcctcgtgaatgcggtagatgaagggcagcttctttttgtggtaggtttcggacacggtttcgttggcgaggagcataaattcctcgataaggtcgttggcatcccggtgatccacgaggccgatgtgggtggggtggccgtcagcatccagctcaatggccggctcgtcgaaggaaaagtcgatgttgccccgcttatcccgcatcttgcgacgatttttcgccatggtgtttaaaatcgtgagctcgtctgtgagatctttcagcgattcgtggatctttccgtcttccaaaaagtcgctgacatgggtgtagaccaggcggcggtcgctgttaatcaccgtttcggcgatgtggaagtgatagactttgcccttatcgtccagctcgaaaatcacgctcaaacaaaggcgatccaccccttcatttaaagagcagatgccgttggagagggccttgggcagcatgggcaggacctcacttaaaagatagacactgtttccccgatggagggcctctctatccaaggggcttcccatgcgcacgtattccgccacatcggcgatgtgtacgcccacttcccaatggccgccttttaatggacgcacgctcaaagcgtcgtcgaagtctttggaatcggcgccgtcgatggtgaaggtgggcacgtctcgaaaatcttccctgcccgccacggcggaaaggctcactttttgaggaatggcctccgcttcgtccatgacgtctctcggaaattccaaatccagccccatggcataggcgatggagagaatgtccacgtttttgtcctcgggatagccaagaacttccacaatttttccctcggcctttttgttgggttccggatatttttcaatgtccaccacgactttttggccatcttcggcgccgtttttccactttttcggaatgaaaatgtcgtcggggattcgcttgtcgtcgggggtgacgaaaccgaagcgcatggcgtcgtcgtaaacgccgacgatgcgatgattggcccgctccaacacggcgacgacgcggccctcatcccctttgtccggatccttggaggggattttttccacgagcacccggtctttgttcatggcggagttcaccttggtgcggtgaatgtataaatccgccattccctcgtcgtcggggacgaagaagccgaagcccttgtcgttgccttcgaaggtgccggtcatgagcccgcggcgaaggctggcgtggtagtttttatcctcgtcccggtaaagggtgccgtcttttaccatatcctttaaaaggcccttcatttccttttgcagattgtcgttgacgtttagggtgcggaaaatttcccgcttgctcaggccgtcgtttttctccaaagcctccagtacccggtctcgaatagtcataatgcctcctttggcttacagtttgctaccgtaggtggttttcgtaaataaattggattcgtagctgtaggtggtgtccttgcgttcatttgcgcggatctcgcctaattcgatgactctacttaacaactcggcgaagggaatgcccacaggctcccacaagtaaaagcccatggagccgggcagggtgttgatttcattgaccaccgtctccccttcggcgacgagaaaatcgattcgggccgcaccgcaggcgtcgatggcggtgaaggcatccttcgccaagtcttcgatttttttctttaaggcctcgtctacatcagccggacagtttctcgcatttttccccttgcttgggccggttttcttgccgccgccgacgtatttatcttcgaagctcaagagatccttccagcctacaggctcttccaatgccgatgcgatcacgtctcctgcatagcccaagacagcgcaattgatttcccggggattttccgcagccttttcaactaaaatctttcggtcgtagcttgcggcgagatccatggcatcgccaagggccgcagcttctttcactttcgtaatgccgatggaggagcccagattggcaggcttgacgaagacgggatagcccagctcgccgatggcctttttcacatcctctttttcctcacgccactgacggcgataaaaacatttcccctccataacgggaatgccgtgggcgcggaagacgtctttcataatcattttgtccatgcctacggcggcggaaagggtggagcagccgatgtaggggatgtccatggtgtcgaagtagccttgaatggagccgtcttcaccgaaggtgccgtgaagggccacaaacaccatatccacgtcggcgtagaccgcttctttcatgccgcctttggaaaagagaccgcccttttcctcttccagtctgtaaagtttcccgccgcttccggctttgaaatacacttcaaaggtgtcggcgaaattgccttctttaaaagttttgaaattcgacagactttcgccgcctaaaaacttgccgtccttggtaatgtagacgggcacagcctcgtatttggatttatctaaattttccatcacttgcataccggtaatgacgctgacttcgtgttccacactgcgtccgccgaaaaatacagcgattgttttcataatgcacgttctcccttcgtggtaattcttgttttattctatcatagacggcgcagggaataataaagatccgtgaagattgcgtaaaaaagatgcattaaaaaagcggcccgaaagccgcttcattattcgtcgtaggaatcgggaaggtcgttttcgaaaagcaccacgtcgcccacggtagccgcatgacctaaagatgccgtggcttcgtcgaggtttcgcaccacgatcatcttctcttcgctgaagcccgcgtccataaggcccttttgaatgggcgccgtgcgctttttgcccacgagaatggcaatatcgcaaactccggcgatttccttgcccagtttatagttttcttcctcttccatatcgcctaattccaccatgcccggcgtgacgataatcttcttgcctttttcgaactggctcagcacatccagcgccgcccgggcgccgacgggattggagttaaaggcgtcgtcgatgacgatgatccccgtgccgccgtcgacgatgttcaggcggtgttccaccggttccactttgccgatgccgcgggccacggcctcaggcgccatgcccagcacatagcctacgctggcggcggcgaggaggttggaaatgttgtgcttgcctaaaagcttcgtttccgcccgcacttcgcccttgtccttaaagcccagagtaaaggagctgccccgctcgtgtacggcaatgtccttggcgtagacgtcgagcttgtcgatggcttccataccgtaacgaatggtgcgctttttcgtcttgtccgccaagggcttcacgtagtcgttgtcgtagttaaaaatggcgctgtcatcctcggacaaggcttcgatgagctcgtacttggtcttttgaatgttttcgatggtcttaaacagatgcatgtgggtgggcccgatggctgtaatgatcccgatggaaggttgcaccagctccgccacttcggcgatttccccgggctctttggcgcccagctcggcgaggaagatctcgtctttttcgtccaactcgttgttaatgacctttgaaaggcccatgggcgtattgtaagaagagggcgtgttttgcaccacaaaggcctcttcaaggacggtggaggtaataaatttcgtggaggttttgccgaaacttcccgtaatgcccacgacctgcaggcccttttccttcagatcccgcacctttttctgcgccgaatcgtaaaacccctgattgatcttcatttccttgggataattgatgcgattggcataaatcaagatggcgtattggaaataataaatccccacacagaaaatggcaaagaccaccgtcgccaacgtaggcgacacaccgtaggcggccacggcgacgagaagggccaccatgaggagcagacggttcaacatacggtgtacattaaaaagccgtgtggcccgctccgtcatcaccaggggcgtcttttccgaggtgggtgcgtagcggaaggctttaattttttcaccgtttgtgcggatccacgccttgtactccccttcgttgtagccttccaattgaagcatatggaggggataaagggcccgctcgttaaacagcttgtagagcgcaaaactcagcgccacgtaaatggctaaaaagatcacaaaagaaactgaatgatacatagtgactccttataaaaatgaacgcaacacggcgtcgaactgaccgtaggcgtcgaggtaactgtagtggccgcctttcaggaccacgaggcccgcttcggggattttttcttcaaagaccttggccatggaaagtggcgtggcgtcgtcttcatcgccccaaatcaacagggtatccgcctgaatcttcgggaagtaatcttccgtggattcatttaccaccttcacaaagaccttgcgcatgatcccatccgccgccttgtaatcgtcggaaccgaagtttttgtaaaaacgcgccatggccgcattcgtgtcctgccagaaaaacagcagcctgtaaagcttctttaaaagcttgaaggtgtaaacctttctgtaataagtaaaagaccttttcggcaacacgccggacgcatccaccaaaaccaatttatccaccttttcgggatagagggcggcgaagacgctcaatgtctttccgccgaaagaatggccgatgcaggtggctcgattgacgtggtagtaatcgtagagcttccttaaaagatccacgtaatcgtcgccgccgatgacttcatcgggcgcgtcgctttctccgtggcccaagctgtcgtaggcgatgacccggtagcgatctttaatgctactcacaatgggcatgaccgattcgatgttcgcgccccaaccgtgcaaaacgaaggccacatcctcccccgtcttcgtgtcgtagacggcaatgttttttccgtcgatgcggataaattctttctccatctcatcccccttaaaaaatgattataccataggagtcgcctcgctccgaggtttacaacgcatttttgtccgcaaagaatatttcggcgaattgttgaatgcatattgtattcaaatttcaaaaattgtggacattgcattttcccggtgttatgattactaataatgaatgtctcttaaggaggttacggaatggaatttttatctttaaaagaccatgtttataattttattgccgatcagatccgtttaggcaagcttaattccaacgaaaaagtaaatgaacaagacatttgtcagcaattaaatatctctcgtacgccggtgcgtgaagcgttaattcaattggccgcagacggcttcttggattccgcacctcgtcggggctttcgggtcaaacccctgacgaaaaaagaaagcgaagatatttaccgcattctcgcgcccttggatgccctggctgcggaactggccgccggcaatctgacgaaggatgatttgagagccatggacgatttggtcgagctcatggattttcacatcgaccgcttccaattcgacgagtattttattttgcaagagcgcttccacgatatttacatcgaaaaatctcaaaacgaaaccttgattaacaccatcgaccgcctgcaacggcgcttcattcgccaaggccacgacatgggcagcaacgaagcctttcaaaagcttttgcacgacaccaatcgacaacactcccgcattacggatctcttccgggaaaacaaaattgaagaactgaaagatttcctcgcccacacccattggacctatcacttttccgaagtgggtcagacagctacagacgactaagcaaaatacagggcgatcccctgtattttttattggaggatgacatgaccatttacatgaacaccatcgcctacgattccccggcccacgaggcagccatcgccctgagaaagcacatcctttttaatccctacgatgaggctttcgacgaggcgcgaaaaacctgggatcgggacaaagtcctctacggcctctttgacgacgatgaattaatcggcgccgccgtgactaaaaaaacggaggaaggccttcacgttgaggaaatccttgtttcctacaacaaacagcgccaaggcctgggcaagcaaatgatggcctttttggaaacccgcctggaaaaagatcagatccttaccgccgaagggcccctctccgcccgcgccttctacgaagcctgcggtttcgcgccgaaatccaaatatcggggcccgaaggaccgcatgcgcttggatttcgagaaaaaggtgacgggaaagacgaaaaatccccttcctcttttcgaccatcgccaaaacctgccccttatgtacttcaccatgggcacgaaagatttcgaactgattcccgtgattcgcaaccacttcccgaaggagcaccttttcgtcgtggaccttttacgagacgacgcctcctggctggatttcgccaaagaaaccaaacgccgcacggggaaatacacctttatcgctcccgcactctacggcaaccgcgcctttcgccctctggatgacttcgatctcccggcgaagtgcgcctccgaagccgatcgcctgagcaagagcaaaaccgcccttttaatcggcaccaaccatgaattttccactaacggctatcgggcggccttcgaatctgaaagcccctccctttcctcggtagaaatgcccctggaagcggaagatctgcgcggtcgttacaatctggatgcggatttctacaaccgcttcgccgaaaaaatcgacgctttaaaggaaaatcccttcgatactttggccgtcatcgacgtgcccttctccacccaatccgatgccatggaaaagttcttagaagaaaccctggcgagaaagctcgcaaaaatcgacgtcttcgatctctttatcaccgggctgcgcaaagatcttctcgagaccaatcgactgcgccacgaggcctcgccggggcagctggtgatcttctctgaaacaccggatcgggcgcgggcggaactggtgcgcgtccatcctgcggaaatgagcgcgaaaatcgagaccattcgatgattcttttaattctcgccgatttggacaatgccatcgcaaaagacggtaagcagatcacctttatccccgaagatctggcccgcttcaaggcccgcaccaccggcgaggtgatccttatgggccgaaaaacctttgaggatacggggacacttccccgccgcatcaccggcgtcatgacgcgaaaaaatctcgccgatgaagaaagcctcttctacttttcctcggaagaggagctggacgaaaaacttaaggcctacggcgacagaaaaatctttctcgtcggcggcgccgggattattcaggccctctttcaccgcatcgaagaggcctacattacgcgggtcaattaccgctccggcggcgatgtgaaaatcccatcattagaaaatgatttcgagttaattgaagcaacccccattaccgataatgccacggaagaacactggatccggaaaaaataaggcagagaacgcgctcgttccctgccttatttttttgctatgttcttttttctatccacgatcccgctcaagagcaagagaccaccgagaaacgaaaagggcggctcgttgtaccacataatcacgatccagccaaacattagctgatttcccgaaaatgccaggtacacgccgatcaaactgaggaccaaaagtccggttccccacagaattttttctctcccactcatgtgagctatgaaaccataggccagcagcccttcgataaataaaaaggccaggcggaaggtccattgggcggcgtacatatcgggtccgctcacatcttcggcatagcgcacgccgatgaattgccacaaaaagcccaggccaatcattagagcgagaaagacgattcgtttcagcgatttcattctgcgcctccttcatttcgaggatctatcttatttaaaatccgaacatgaccgactcctttccgagacgatctactgttttgtttataccccccacccaattaaaaccttcgaaaaccgacctcgccgttcaaaattactattcctcaataaaaatacaggtaaaagcgtttaaaactatgccgatctctagtatacttaataatgaattaggaggtatacatacgatgaaagaatattctgttcgtgaactggtgttcacggccctatttatcgccctggtctacgtctttacgtggctcgtgaaaatccaattgcccttcgcccccaacggcggcctgatccacttggggaatgtgccctttttcctcgcctgcatctttttctccaagcgggtgggcatgctttcaggcgctttaggcatgggcctcttcgatctgaccagcggttgggtggcatggtcgccgatgacggtgatctccgcactgattatgggttatattatggccaccttaaacacacgggacttccgcttaagccgctacgtcctcgccgccattttggtcaccgtcgtcaaggtgctcacttactacatcggcgaagccatcatgttcaaatccctcttggtccccttggccaatattccgggaaatgtgctgcaaatcaccgtttccgccattatcgtcggcgtccttattccgcccatgagccgaatcttgaaagacgtcacactataatttcatccatccaatcaaaaacacggataggctttcgcttacccgtgtttttctttgcccgcaattttattcctacacaagaaaagcccctattccgaagaataagggctttttctcatacattcgtcgccggtccgtggtattcgttgcttccgaaggcgggaaggagcataaggaaggggaagaagacagcgagcacggcgaagagcgtgctgcactcgaagtatttcatcattttgtagttgaggacggcggcgtaaatgacattgacaaagggcacgaccataagcagggcgtaccagtagctgttaaagacgattttcgacgccacggccaggttcacgatgggaataatggccaggatgccggcaaagcccgctttggagaaaagtttccaccaggcgatggcggtgatgatgccgatgccggcaaaaagcgccgtgctcgacgaggaatttgcaaattgttccatattgttcataatttcatcctctagtttaaaagatcgttgatcacgtcggataagagccggcgctctcgtagggtaatgccttcgattttttgatcggcgttaagtgggggcgtgtagatggtttcaaagcccatgcgcacggcctctttgatgcggctcgccatggccggcacgtgtttcagctcgccggtgaggcccacgtcgccgataaaaagtacattggagggaatggggcgattggccaccgccgatgcgatggaaaggaggatgcctaaattggcggcgccttctttcaaccttagattccccgtggtcttcaccaccacatttttgtcgtaaaggcccatgccccctcgctcttctaaaatggagaggagcacgcccagctgttccctgcgcaagcattcggagatgcgctggggatagggggtgaagcttttcgacaccaagctttcgacttccacgatcatgctccgggtgccttcccgcacgatgcacatggcacttcccggcacttcgcttcccgctgcccgctccgtcataaagtgggcggagggattatcgatggagatcatgcccccttcggtcattttgaaaaagcccatttctcccgtggagccaaagcgatttttcgtggcctgaaggatgcgcagctcgtcttgcatttcgtggtcgatgaaaagcaccgtgtccactaaatgctccagagcccgcacgccggccagggaatcctgcttcgtgagttggcccacgataaagacggccttcgggcttttcgggtttttagccatgtccaccaggcgattggcacattccatggtttgggttggggtgcctgccctggcgggaaattcctccaaggtgaaggtctgtatgctgtccaaaataattatatcagcattcacatcgtcgatccagtggcacacatcgtccatggaggtgccggcgtagatccagatattttcggcaatggcgggggcgatgcgctccgcccgcattttgatttggctctcgctctcttctccggaggcgtagagcacccggtggccctcatcggccaaggcatttgcgatttgaaagaggatggtggatttccctgcgccgggtttcgccgcgagaatactcaccccgtcttccacgatgccgccgcccatgacccggtcgaattcttccatgccgcttttcagccgccgcttgctttccccggagacatctttcagccgctgcgccgaccgatgggccttcgcgcggccgccggctttcttttcctccgacacttcttcgaaggtgttccactcgccgcagttcgggcacttgctaaagtagccggcgcttttgtaaccgcagctcgtgcagcaataggccttatgcttcattggttacggtctccgccactttttcttcttcgaaggtgaggccgtcttcttccacatcgatgtgaatggccttttccttatgcaccttgccggagaggatctcgtcggccaggcggtcttcgatgttttttcgaatggagcgcaccaaggggcgggcgccgtattcttcgtcgaagccttccttgccgatgtagtccaccacgccatcggcgaaggtaacggaaaagtcgttgtcttccaggcgggtttgaagatcctgaagcatgagcttcacaatttccttcacttgttctttttccagatacttgaagacgatgatttcgtcgatgcggtttaaaaattccggtcggaaggtttccttcaggcggccctgaatggtttccaccattttgtcgtagcccttttcgttcccttcatcgggggcgccgaagcccacggtgttttgctttttcaaaagggtggcgcctacattactggtcataatcaacacggtgtttttaaaatccacggtgcggccctgaccgtcggtgaggcggccgtcgtctaaaatttgaaggaggatgttaaacacatcgggatgggccttttcgatttcgtcgaagagcacgacagaatagggttttctgcgcacggcttccgtgagctggcccccttcgtcgtagcccacatagcccggaggcgaaccgacgaggcgggagacgctgtgtttttccatgtactcgctcatgtccacgcgaatcatggcgctttcgtcgccgaagagggatttcgccaagctcttggcgagataggtcttgccgacgccggtggggccgacgaagataaagctgccaatgggtttgtcggcgctctttaagcccacgcgggcccgcttaatggcccgggagacggcttccaccgcttgaggctggccgatgacttggccgtttaattcctcttccaaatggaccaagcgctcgctttcttccgcattcatggtggtcacgggcacgccgctccacttgctcacaatttcggcgatttcttcctcgtccacggtcatgttttgggcgtgtttttccttgtcccaatgcttcttttcatcggccaaggcttcttttaccttcttttcttcgtcgcgcaccttcgccgcttcttcgaagttttgcgaattcaccgcctcttccttttccttggaaagcttcttcagcttatcttccaattcctttaaaccattggggctcttgaaattttctacgcgtaatttgctcgccgcttcgtcgattaagtcgatggccttatcgggaaggaagcggtcgttaatgtagcggtgggaaagttccgccgacgccgccaaggcttcgtcggtgatcttcacattgtggtgggcttcgtatttatcccgaaggccctttaaaatcaatatcgtgtcctcaaccgagggctcttccaccataatgggcatgagcctgcgctcgaaggccgtgtccttttcgatgtgtttgcggtactcgtcgatggtggtggcgccgataatttgcatctcgcccttggtcagggtgggctttaaaatattggaggcatccatggccccttccgcgccgcctgccccgatgactacgtggatttcgtcgataaagagaatcacatcttctcgggcttccacttcggcgataacatctttcagccgctcttcaaaatcgccgcggtacttggcgccggcgatgagggcggagacgtccagtgtgtagatttccttgtccttaataatttccggcacattgccttccacgatgcgctgggccaagccttcggcgatggcggttttccccacgccgggctccccgattaagacgggattatttttcgtgcggcgcaccagcacttgaatgatgcgctcgatttcgtcttttctaccgatcaccggatcgatttttcccatgcgggctcggtcgtttagattgtagccgaattcctccagggcactttccgattccaaggcttcctcgtcatttttcttgccgtccacctttcgaatggccatgtagatgctccgctccaagaccgtaatgtcgatgcctaaatttttgagggccaaaacggccacacccttgccttctcgcaaaatgccgagaagcaaatgttccgtgccgatgtaattgtgccccagctcgttggcgatctcaagggccagctcaaagatttttttcgtgcggggcgtgtaggtgagggaggttaccgtcacgtcttccggcgccacgattcccccaatggcctctttcgcccgctcgtagttcacggccacctgccctaatatggacgaggcgcctcccggttcttttaataagcccagcaaaatgtgctcgcttcctatatatgaatggccttgttccctggcttccgactgggcgaaaaccatggcccgttgacttttttcggtgaattttccgaacattgccattaaaatacctcctttataaatcgacgcaccttgttggcgcggtaaatattgctgctcctgtcgtcgagaaagctttcccgctccatttgcaaatgggccttgcccatgtggatcaccgcatcgtagagatcgaagtcccgcatgggttttaagacggacagatcgatccccagcttcatgtggctcaagtggagcatggtctcttcaaaggtaatgatgcgggcgttgcgcaaaatgccgtagctgcgccgcgccatgtcctccagctcgattaagtgatccagatacatttccttgcgcttgatgcgctcgagggccgccacttcctgggaaatggacttggcccgctttaaaaattcctcttcgctgaggcccagggtgcgttcgtttgaaagctgatacatgtgccccagaattttcgagccttctccacccatgcccctgaggacaaagcccatgcgggtaatggagcgctcgattttatccatacctagtgtgtccagtgccggcaggtgcagcatgcagccggccctcagacccgtgcccacattgctggggcaggcggttaaatagcccaactccccgtcgtacgagacgggaagcttttcttcgaaaaaacgggcaagggccgccacggcctcgtactcttcgtctaagtgaaagccctttttcatggcctgaatccgcaggtgatcttcctccatcatcataatggagcggtgatcgtcgccgatgaaataggcgccgcggtctttatttttcaacagggccatgctaattaagttctcttccaaatcgtagagatttttcagcgatccgtcttttaattcgtaaagggtccaaagatcctcgtgttcgtgaagggcctcggtgattttctcccgaagggccttggcctgatccgggtttatggcgccgggatagggatagcccttgatgtttcgcgccaggcgaatgcgggatgtgagtaaaatttgatccttatccatggcgcgcatcctttatggccttgatttcatcccgcaattgggcggcatcttcgtagcgttcttccgccacggcaagatccaggcgactttgaagggcctgttccttctccgaggcttcccgatcctttctgaaggcctcgggcatggtcccttcatggcgttcggctccctgcatgcggggcaggagcgccttcagctcttcggcgaaggtgtcgtagcagctgtcgcagccgaacattcccgtcttgcgaaactcttttaaactgcgcccgcacacggggcaggagcgatccgcttccccttccccgtccttgccttgaaacagagagagcagctcttgaatcatgggctgaatatctatgggcggaatttgcgatgcgggaaattgcttcgccaaaaagtcttggaagcaagaggggcacacgtgcttttgccgcatggcattgccttccacaatggtgtaggtaattttcgcttcattttcgtggcagtgttcacaaagcatggtgcacctccttaagaaaagatacccaacagaatattttgtaacaaatcggctcgcagcgcgtttcgtttatccgaggcgacggccagagcttgatcggaaagggtgaggcccaagagatggcgctcattttccgtcaaatagttcatctcctctaaggtatccaaaatctgattggccttggactgggtgatgctttcgcccacggcctctgtcagccggtcgtaaaattcggcatcgtttttgatttccacctgaacgatgcgaatgaaaccgccgccgcctcgtcgggactccacaaaaaatccttgcaccggcgtaaagcgggtggtgaggacgtaattgatttggctgggggcacaattaaaatgctccgccaaaacatttcgctttatttcaatctgcccttccctttccgttaaaagggcccgcagataatcttcgatgtgattgctaagacgtgccatgattgcctcctatctgatttcagtatacgtttatagtcaaagaatgtcaagatcaggagatggtccgcattgtctatcaggtgacataaaaacaccctccgaagagggcgtttcgattagttattcagcgcggggtcgcgtacccacacatcgttcactacgtcgtatttgtaaaaaacacttttgtttaaatccaggcggtagtgggctgcgggcacgatgtgatccggatgatcttcgatgacgtcgtaggtgtagatccgcttcttcgccagatcatcgcgatcataaaaaaatgagtcgatcaatttaaagggcggcttcttgtattccgcaggcaatttgctgtacatccatgccccggcgatttcctcgtcggtcttggctacattgccttcgatggacacggtgtaggtcgcgccgtcccagaaaattctttggccgaagagttccaccacggcacgcagaggaataaaggtgcggtcctctttgatgatgggcttcaattccaaatttacaaccttggcccgattcagatactcatttacatcttttatggtaaaggtatccttcgtcgtcgcttcataaaaagcggacacgtcctctttttcgatgaccagcgcccggggtgcgtccgttttcaaaacgagggcttgctccggcttgtttgtatcgaaattcatcttcgtgagcaggatgtcgcgactgccttcgttccatagcacttgatagtccagggcttcggcgacgaagcgcacaggcaccatggtgcgatcggaagcaataaaggcggcgggcttcgacaccaccggctttccgtttacttttaatttcacctctcgttgggcgaaagccatggagggcagggccaagagggccagggccagaaccaatacatttctctttttcatctttccccttctttctttatcaagcgatgatacttgtcttctttttaccctttttctctttcccctacccattttcgcacaaaaaaacaactggcctgatagagtgactccatcaagttggacttaatcaagtaagcatttcacttgctcattttcttttacataacatattttttaagcggatttcacgcgttcacggtattgcttcgaactcaagccttctaacttttctttgattcgatcgttattgtagaagcggatacagcgttcaatgccctcttctcgatattgcctgcaccagttggcgatgatggatgggttcgtcaagcctagttcaagagccggttgtcgatagctgcattcgctcgtttcgtagcgtgtaatggcttctaacttaaactctacactgtaaacgcgtttatttcctgagcgcattaacccttcatcgccaaaatgtttgtgattactgacccatagcttgatctgtgattctttaacttgctatttatcctctaaggcgagatagcttgtcttcccatacaagtattcttcgacgattttcctcttaaattcataactgtattttgccattaagataccccctaagattggatttcttggtccaactttagggggtcagtgcacctcaagggatattttggtgccaaaagaaacacttaccgacatttgatatgtcggcaagtgtttctttcatgatctcttcacaaggagtcgtcgtttattttgaatttttatctatattgtatagaacttgtgctacttgggcccgggtaaaggaggtcttcggtgagaagcacctattttccataccttgaactatgccctttttcgccatatctttgacagcttcctgtgcccatggggaaatgtcactctgatcgttaaatggaacgtcttgtttgtcttgaagggttttgcccgttacataaaggtacctagacatgacaactgccatttcctctcgagtaatgggacgattcgattcaaacttaccgttaccgacgcctttcacaatgtcgttttctgctgcccaaatgatgtaggctgtggcgtagttgttttccaggtcgctaaagggattggaagtatatttgctttgatcaatgcctgccatgcggcccaatacggtgacgaaatcgccacgggtaatagacttgttgggtgcaaagcgatcgttgccaacacctttaaagtagcctttttctacgacgtaatcgatggcatgctttgcccagtgaccaatggtgtcggtgaagttaatgccttgtgtctccagttgtttagagcgtatttcaggttgtttcgtttgctcctttattgaggattcgctcggtctggagcttatatagccctgtgtcttaccgggttgtggttttacctcaggtttggtcggctcacttggcgtagggtagggttttgggtcgactttgtcagctgagttacagaacctttgctccgcttgttccaataccttcaccgcttgtgaaatgtcatcattggttttaacggtctttaggctttcttttgccgctttaatcgcctcttgtagtgctttaaaggcttgatcggtttttttgccttgagtgatcttttcaacttcggcgatcttgttctcaaggggttttttatcggcgacgatctccttttcaagggctgctatggctttttgcaggtttgttttcgcctgatccaccgcctcttgtgtcgcattgttattttcataaatggcttgtgccgcatttttggcttttaccatagcctcgaaagaagccttggtgtatccctcgggttttatggcttccgccgcatcaagttgagtcttcaaatctgatttgttgacaacatctttctccgacgagttattgaagacttttattgcttgagaaagagcatttacgacacctgttacttcatcattggttttaacggtctttaggctttcctttgccgctttaatcgcctcttgtagtgctttaaaggcttggtcggtttttttgccttgagtgatcttttcagcttcggcgatcttgttctcaagaggttgtttgttaatggtgtttggttttgttttaaccgtcgcttcaactaaagcggattctttacctgaagagtttttaactttagcggtcacttggctattatcttgcaccgcttcctcagcaatggtgataatacccgtctcaccattaatggcaatgccatctatcgttttttcaagtttccatccttcatcttttatcttatttgcaactatttcatttctattaccattttctcccagatagttgacggttatggaagaaagatctgtatcctttggcggaatgatgctcactgagccatcctcatttgttaaaatgctcggtgcgcctggagcactagggatcggtttacttgacgatgcttcgtcaattacttcttgaagcggtttagttaatttgttccctgcaaaatctgttatggttaagttgatgctctctggctctatgcccactggcagtatccagcttttgggacctctccaagtactatccttattttttgcactcttttctacaagttcaatgtattttaacgtcccgctctcattataagataggtttacatctcgaaccccgctgccttcattcttccccgcggcatctttgtccgttatttcgtttaatgtgaatttccgactcaaagaatcgtaagagcactgtttaatctttgctggggttttatccagtatgattgagtgtatgatagtcttgtagttctgagggcttgtgtatggtgacacttgaataacagcatcataacgtccttctggcgctgattcaccggaccactcccacataggcgaggtataggaccgaggtgctaacatcccataattgaaactctttaggcctccatccgttttataatcgaaagcgagtggctcttcacgtgcaatatcgtcaggtctgtaaatgccaaatttaacattctgataacagcgtgtaaaggtagcaaaaaagcgtattgagtctgcttcattgtccccattaggtgaaaaggcaattttatttgcgtcatattttctattgccattctcatccaaatactcaccgcaaactactcgctcaccatttaatgtcgtctcataatgtgtaaagtcaaagtgcttagagctttcgctatgataaatcggttccttcccattcgctgacaaattgtaaatactatcttcaatcgcaggtagtttttcccagtcaccatggaatgcaacaaaaggtaccgatatgttttcagcaccatcaatcgcttcaaattgagtgtaaccttctaaataatagccatagggctgtaatttattctgctcttcagtaaatggagtggtatcaaggttaatgtgtactttcgcttcacccccagcagggacctctacggtttctccagcatattcgcctaaaagattactctgcaatgagtagcgatcgttttcgatggcatccgtcgttaggaatgtctttggtttgaacttatacgacttagtcgcatcacagtttagtaacgtgatatcaacactgaatttatcacctacgttcttacagagtacagcactgcgaccatctgttccttttgcatacactggtgattttacagcgctctcaatattaatcagaccactaccttgcccacgcggcgagacaaaaactcctttttccataattggcgatgccgtagacatcagcatattctttatgaaggtatatttttctgcaccgcttagtcctatagcatctgcacgctcccctaacagggctaccgcgcctgccacatggggcgtcgccatgctcgtaccactcatagtgacatagcttccattagctattgtcgaaaaaatatttccacccggagctaagatctctggtttaagatcaccatctaccgaaaggccccaagaagagaatgctgagagcttccctccttctgggttagcggtttttatatgatgtgaaccaattcggactttaggttcttcactattttctattttggaaattaaaaacttcccatcctcgtgtccaataaatacagagggaataacggggtatggatttgaaatcatcatactcactaattcagaccccccattcgcatcattatagataattgccccagctgcaccctttttccctacattaaatactttttcaccaaaagttaagtctcccccccgttgaattagggcgattttaccgtataaacctccctgtgactttacagcagagtcaacatcctcagaagaaccataaccacaatctactatggcacaaaaattattcataggcctacttggatcatcaaaggcaggtccgttcccctttcgataagaaataaccttatccgggtatgcctttaactccattactttgctcgttacatgggtgttgttgcaagatgccactgatagagcaagtggtgctatcgacgggctatctaccaggccgtaatccggtgctgccgtcgttggtttgaagaggccacctccgtatacaccttcgttaccacctgccatcgtgaccacaacgcccatgtcacgggctgcctctaaagctcttagggttgcactctcgctgagctgcatatcaccaattttccccagtggtgctccgatactcatattgatcgcatctgcccctagcttgatcgcatcttcaatcgccagtgtgtagatttcagcactcgttgtatcattgttaaatactttcatcgccaatatttgacactctggcgctacgcctcgcacaatatcaccatttggtgaagcctctgttggattggcgcctataatccccgcaacatgcatgccatgcgacactgtatcgcgatctgtcacatttgtattcatagaagcatagttatatgcaaagggtattttattggatgcatacatgccctgattaattttttgagaatcaattaagcttttcaatgctttttggctctcaatccgaggttttgtttcagcgcttagtcgcatggcaggatgatgaatatcaaaccccgagtcaatgactgcgacaatccggcctgcacctttaaattttgactcaatttcctgtaaccggatcattttattgctatcgatatcacgtttagcgattcttttatgaggcactttttcggccttcggcaaagcgtaacttgtgcaatattcaatggacaacacttctggcatcaacgccactttattagcatccgcgtaactcatgcgaagtgcagctccacagaaaaccaaattatagctacatactttttggacatgaatgtcttcatgtgctagtttcttataaaagcgcttcaatgtttcttctgaagcatttataaaagcttgtttttcgacaaatgtttttctttctctaggaaccatctttaatggttcttgcaagacaacaagaaatttcccttcatctgttggctttaatgcatttcccacttgtagtcttaatgcactttgtttttcattgtgctcaatcatatcctcttgctttttagggttctttattcgctgcatatccatcaatgacatttcattcgcaaaaactgaagatggaaagattaaggctaatactaaaacagctagtatcgccttcctaataaattgtttaaaggtcagcatggtctactccttaccacagtctataagtatttaatgaaaacattcgtacctaaaccgctttctctagattctctacatcttaccaaaacattttcaatgcccagttgtttgctgagcattgaaaagtaaatggttgatcttctctttttctattgcttgtcaagattaaacaatacttgtgctacttgggcccgggtaaaggaggtcttcggtgagaagcacctattttccataccttgaactatgccctttttcgccatatctttgacagcttcctgtgcccatggggaaatgtcactctgatcgttaaatggaacgtcttgtttgtcttgaagggttttgcccgttacataaaggtacctagacatgacaactgccatttcctctcgagtaatgggacgattcgattcaaacttaccgttaccgacgcctttcacaatgtcgttttctgctgcccaaatgatgtaggctgtggcgtagttgttttccagatcgctaaagggattggaagtatatttgctttgatcaatgcctgccatgcggcccaatacggtgacgaaatcgccacgggtaatagacttgttgggtgcaaattgatcgttgccaacacctttaaagtagcctttttctacgacgtaatcgatggcatgctttgcccagtgaccaatggtgtcggtgaagttaatgccttgtgtctccagttgtttagagcgtatttcaggttgtttcgtttgctcctttattgaggattcgctcggtctggagcttatatagccctgtgtcttaccgggttgtggttttacctcaggtttggtcggctcacttggcgtagggtagggttttgggtcgactttgtcagctgagttacagaacctttgctccgcttgttccaataccttcaccgcttgtgaaatgtcatcattggttttaacggtctttaggctttcttttgccgctttaatcgcctcttgtagtgctttaaaggcttgatcggtttttttgccttgagtgatcttttcaacttcggcgatcttgttctcaaggggctttttatcggcgacgatctccttttcaagggctgctatggctttttgtaggtttgttttcgcctgatccaccgcctcttgtgtcgcattgttattttcataaatggcttgtgccgcatttttggcttttaccatagcctcgaaagaagccttggtgtatccctcgggttttatggcttccgccgcatcaagttgagtcttcaaatctgatttgttgacaacatctttctccgacgagttattgaagacttttattgcttgagaaagagcatttacgacacctgttacttcatcattggttttaacggtctttaggctttcctttgccgctttaatcgcctcttgtagtgctttaaaggcttggtcggtttttttgccttgagtgatcttttcagcttcggcgatcttgttctcaagaggttgtttgttaagggtgtttggttttgttttaaccgtcgcttcaactaaagcggattctttacctgaagagtttttaactttagcggtcacttggctattatcttgcaccgcttcctcagcaatggtgataatacccgtctcaccattaatggcaataccatctatcgttttttcaagtttccatccttcatcttttatcttatttgcaactatttcatttctattaccattttctcccagatagttgacggttatggaagaaagatctgtatcctttggcggaatgatgctcactgaaccatcctcttttgtaatgatactaggagctcccgggatgattgtacttgcctctccatttttcccagcagtaatcacactacctgtcaacttgttctttataactgcaagtaactcacaattctcttgaaccttgaagtttttggtgagctcctcgtttttgaaaattttatctccaattttccatccgataaactcgtactcgtcatttaaagtaaacttaggcagttgagagacagtaagtttgtcacccttcttcacaatggcgcgcaaaggacagtccggatcatctagatcgtttgaactcactttcatctctggcgtaacagcataattcactaggctccagttctcccaacctcgaatgcttaatgtcagtggttgtcgattattccccgtaaagttaaagatcttttctctctcactttttggttttccacaatcgcaaatcgtaaagaacccttgatgctctttgtaagcatactctcctacagggatgtcaaatataagctgtaccccgtcgttatttataatggtctttttaattggttgatattcttttttagtcttctgattaatcacagtcattgtgaaagattctgcttgtttcgcattttccaatacacaaatcacttggaactgctcttgtggcataatggtaccggcgtcccttaaaaatttaggacgaacacgtttatctttgttggctgtgtttttatctagtgcattgtctgaaaaattaaccttgcttttttcagtatcaattttaagcatatcatcttcaaattgattgaatgcaaatgccgtgtctccaacaatcttaatgctagctggtaacgtaacatcttttaaggcattgcttctaaaggcatctttttcaatggttgcgacttttgaagtcgtttcaaagctaagcgctgacaacctattctccttaaaggcgccttctccaatgatttccacagaatttggaattataactgactgtaaattattaccttcaaatgcatgttttccaatgctttttactgacgtaggcatggttacaacatcaatgcccttgtctttaaatgcattctcacctatgtgaaatacaagttcgttatcaattgttttaggaatagtaatgtttttcttattcccattatatttgcagattgtgtgggtctctttattaaattcccactctacagtaggcgttggctcactgcctattggtactaaatttttccgtgcttcgaaaagtttccttgtaatactgtttacttgagcttgcgagccctttcttgtcgtgaccaaccgttctgcctctgtacgcaaatctatcagagtccccatactatcttttgtatactccgaaggattcaagctatacgtttcctgcacaagaatattcaattgtccgatctcaagacctcccttggtcttatttcctgggcagcttatatggtcgtatttgctaacaattcttggatagacattttcaaatgtttgtagtaatttgtcatccttgtcatatatgtagacagtaagggggaaagcctttttatgcctttgttgctctgttgtatcttcgtaactgttatcccttacctctatttcaacaggattagattttttgtatactttcgctgttggcattacaccaataaaacccttctgcttagactttgtgggtgtatacctctcgggttgaccattagctgcttctaaacatttattgtactgaacatcaaattttgccgcattcgttatattttttactcgaatgtaaacatagccctgatggtgctcaaccgtctttgggttgtcgctctttgtactacctactggtcctccagaaaaataatcacaggtgacaagctctggtttgcctccatcttgctcctccagttgaggaacaaccggtttgtcgcaatcaataatgcgtagcggaacttgggtaaaggttgctaatttttgttctcctttactatcataaacgtctatatctatggtctcaccttctgaatacattatctgccatgaaaatccatgggctggtggcatattggcaatccagaaattgttatgatcataaccagcattacatcgtgttattttaggttctatgtcaaccattggggagtctagtaaaaactaggctcctttttgttttcctacacaccctcactcacttatcttttgaacaaacaaaaagcagtttcgtgcggaaatgatgaaagttacgcattccaaaggccacgcgcttcaccgtcttgatcttgttgtgcgttccttccacgtagccgttactccacgggtaatcaaagctgttggtgatctcctcgaaccagttgttgtaggcacgtaagcagtggcgccactcctttagcccgcttttctttgcctcttccatcc

SEQ ID NO: 29 - DNA, 131885 bp, Peptoniphilus rachelemmaiella
  source 1..131885: mol_type = genomic DNA
gcaaaactttcatcattttcgaaccaaattactctttgtttgttcaaaagatcggtgatggatggcttttaggaaaacaaaaaggagcctagttttcactagactccccaatggttgacatagaaccgaaaaaaactcgtgatgacatcatcaatgcaaaagaaaggctctttcccatcgaaaggatgagaaagagccttttttctgtgttctcttttaaagggccgatgctactccgccacccttccccaatacaaatagttcttgtctccttcttcttccacgaaagacaagatgccgtcgttactgaaaaagacagagcgcagattttcttgtcttgtagaaattttctttgccctcatttcggaaagatccacgaagtcgaggctgacgtccccgtgaataaagaggcggccgtcatctaaaattctcgattctcgaataaaattcgaatagtcgtagcccggcaggatatagggcctgtacccgtcgccctcttttttgtagagagtgcagcgatcttcttccggctctcctttgagattcggcgcgttcaaattgacgatgagatcggcatcccccgccaaataagtggaaagtttggtaataaaggggatctcgtagagggtgtttttctccctgtccaacaaataggagcccttggcttcagtgacattttccgaataatcgtccagttcctgaaatcccacggtatttcccatgccgtagaaattcgtaaacagatgcccttctttcactttttcgtcttttcccaaagtaaaggcttcatttacaatttcatctgccttctctgcgccgtatttcataaaatacatggcgttttccaatttattttcgccgagcactttttccaagctgacataaaatccctctttttcggcaaaggcggcgattcggttgaaatccgaaagagccacctgcttcacttctccgtcgggacggatctcgacggaatccacggccccctccgtattggagccgacaaaataaaacgtcccgtccacgaccttggtggcatcgataaacttgtaaggctgctttaattccacatctttcctctcgccggtcttgagatcggtgattcggatgcttttaaaaacttccttcgtgggatcgcttatgtcttgatataaaatttcctctttcggatcgaatccgaaaaccgagtccttcgagatttcttttttcgaaaaattgcctttgatctcgtccacggatagagcggtaaactccatcgtctccggctcttttaaattgtcggaaagcactttcgtctcccgagccgaattttccaatcctttgtttgctcccgagttttcttgaggcaaggcctcttgtctcccgcaggcaagcaggcaaagcaagatgcacacaatggcaaattttttcatgctaccataccctttctcaagtcgaaataaaatcacaggtctctttcatattcaatatatcttttttctcccttcattgcaattcccattcaaagggggttattgttatgccttttatatgagcgccgaatatgttttttatcggcggtcgtaaagctgatagtaggaactcctgtattgatggcaaccgcttctaaagacaccctttatacaatttgacgccgcttggtgtggaatcacgcacacttataaagaaaagggacgcagcgaaaagactgcgtcctttttcaaaagacaagattatgtgggattttttacttgtgcgcggccagtgcatcaagcatggcttgataattgtttgccgccatgagaatttgttcataagcccagtgcttttcactgacgtccttaaaggaattgaatttcgctctaatcttcatcagatcttgcttgctcatattcctgccatcgtaacgattcagtatcgtcacggcttcagctctcgtaatggcgccgtcgggtttaaaggtgccgtcggggtagccgataattcggccgttgccgaaggcttgattaatggccgcttcaaagggatgaccctttacatcggcgaaaggcgcgatgcgatccgtctttttgtcgatgccggccaatgcccgagcaaattcagccctggtaatgggttcgttgggacggaagtttccgtttttatccgccaacatcaaatcatttttcaccatggcgttgatgacttcgttgtaccaactgctgtccgtgtccttgaaaccgggtttggccttgttgctcgtatccaaaccggccagagaggcgatcatggacgccgcctcggcgcgactgatcttaccttcggagcggaagctgttatcgccgtagccgaaaataaatgcctgatgctttactttcggctccacaggcgtactcggcgttcccggattttccgcagccgtcactgcaaccatatctccgttttcaaaatacgtgtcatttgcaaattttacatagacgataggtttaatatatttggtattttcgggtagcttcgtgatttcgatttcatagccgccggctacttgttttaccgtgtaatcatcccgaggcacttcctgcttcttatatttcggcgtcgccgacgtgcttgtatccaccctcgtcgagggactgcttactgccttgggtttcccttcttcaaaatccttctgtgtcacataattcagcttaaagaaagcttcttcattctcgccgatctttccggcccctgcaagattcgactgaatttcaatcttattgtcctttaatgccacatactttttattattgtgggggttgagctgatctcgcttccccagtaccttataattgacgagagcttttttcgtataatccctgaagaggccggatttctttccattaacctttttataagggacactttcaataaaattcaattcctcttccgtaattttttctttgcctaataaagtcttcgctttttcaacggcgcccttgacttcatctttcacgcccggctgaaattcaatggaatcgctgtcaagaaccttctcttccactgttttcatgtacttttgaagttcggccttggcctgtctaaccctttcggcaaattccacattggtcttgtccgctttggaatttttctctttcgcttgctcgcgttcaaggcgacttatactttggttcccggcaagcgccggattttgattcgcatccattgccctattcgttccggagccggaggcggcataggaggatcccggtaaaaatcctgcaattaaggtaaagcctaaaaggcatgagacgaaaccgacagacaattttcgcattccgtaacgaggtcgttgctctttttgtttcatattttctccttcattataaattccatggcccctttgtccgcatcaaatctatgtatttttccatagcagacctaatccaaagttgtcatgagctaaagtgatcttctaattcgaaattatatcacgctgatattaattatcaactgttgtttttatatttcttctcttttcctttatttttgctttctgctgcctttttattcttatgttctagctcatttaaattatttcttccgcgcggctttttgatgactctgttgaaaaaagaaaaaacctctgcagttgtttttcacgcctgcagaggcttttctcatttcttttttctgattgtccgtttaatttaattgattttttaaattcagcatcatttgggtggcttcttctctgctcgccgtgccttttggatcgaagagattgtcgcccttgccgtgcagaatccctcgcgccgtcaagctcgccaccgccggtcggaagacggggccgatggcattggcatctttaaagggcaggttatgcgatgcatcgtcgtatttcatggcgacgaaaagaattttcgccatttcttcccgactgattaagcgttcggggcggaaatttccgtcttcgtagccgtcgatgagcccggcacgtctcgccgccgccacggctttggcgtagtaggcatcggcaggcacgtcgctaaaacctccgtccgcttccgtcatgggcaggcgtagggcgaggcccattaagagggtaaactcgccgcggttcatggcctcgcgcccttgaaagctcttcaggccgcggaaggcggcggtgttgatgccctcgtggtttgcccggctcggcacgtctttcgcccaaggtgaggtagcgtagcagctcatggcgtagtttaagagggccatggtgtcgtggtagcgttgatcctgtccccgagatcccatgaccacggaaattaggtggcggcctttgttcgtgtaagtcaccgaaaggcattggccggaataggaggccgtgcctgttttaaagccgttgattcccttaaagtggcgaaattttcgataaaattgattggtggatcgatagatttcgtttttgtacttggtctgatgtttcgaggtggtgtttagaatttccgggtagtcgctgatgatggcgcgggtcaaaagggcttgtgcccttggtgtgacgcggttgggcttcaggccgttggcctcggtgtagtaggcgtcgatgcccagtagcctcgccttttcgttcatccgctcggcgaattgggcttcgcttccgccgccgaagtattccgctatggcgatgcccatttgattgttgctgcgaaccagaaagggctcaaagagatcgccgagccgctctgtttcggcgaagtcggtcttgtcccagggagactgggtgcgggcattgacggatatggggatcaccgtatcccaagtggcttcgcctgtgcgcagggcatcgagaatgatgtaggctgtcatgattttagtcatggaggcggcggagcggggcgtgtccgcatttttttcgtagagcacctgccccgtgtcgtagtccatgacgatggccccgggggcgttgatggccggcgcattggcagcaaaggccgccccgggaattaatagaatggcgacgatgagtaaaaatgccgccacagagttaaatcgtttcattgtcgtcctttcaactttatcgaacaattatcaacttaccgtaaaatgccctgcagatttttcgagggctctttgttatttcttgtctgtgtcgaaaagcgccgtaatttcatcgggtttgtagcccacgacgacctttccgtctgtaataatcaccggcacatatttgtagccttttgccttaaattcgcgaagggcgatttgatctttcgaaatgtctttctctacaaagggccggtggagttgatccctaaacatggctttcgccataacgcagtatttgcagccttctttcgtatatatgaccacgtcttccgtcttttgtgcaggcgccgcgtacgctccggcttttttggaaattttcgccatttccgagcggcgaatggggcgatcgccttggaagaggccgtcgctgccttcggcggagaaaatgtcttcttttaccaacgcggccacatagtccgccacgagaatttccacgtccttctcgtcgaagacggtgcccattttatccaggtccttcattttgaggttgctgtgatctttcgttgcggaaagattcagggctctggcgtagtaggcggccacttcttttctcgacggaaaggccatgtcttttgccttgagcttgccgcaggccttggcctcttccaactgcttttgggttataatgcctcgatccaaggcgtaggcgatgctgtctgtggcccattctcctgcgccgcttgcccgcgccatgtcgccataatttgcctcggcctgtttcatggcgtcctctgtcggcgctttgattctcttgataagaacaaggacctcaggcagactgacgggtcgattcggcttaaatgtgccgtcggggtagccggagatgaggtgcttctctgatagctcagcaatggcatcataggcccagtggctttctttgacatctgtgaagcgggcggcataggcaccggaggccggcgtggcgatggtcagtgcggccaaaagaagggcccacgttgtgattttctttttcattgtttttctcccttggatatggatacgatgaaatccggattgatgcgttctctgtgtgcatgaagcgtctcttccaatcggcctttcacttggtcgattctcggacagggaatttcgccgcttagtacggcctctgcaggtaagacgtcgaaatggagcccatcgccccagtgtttgtccacgtaaagggcgtcgggctgaaaagccaccacgtgcgtgcccttctcgtcttttttaaggcgcgcccgcaccatttgccccgtctccacccggctcgtgttcatgtactcacgtcgctgattggagacgaagttccccatggagtaggccacgaaacaggcgccatccttcgtggcgatgttgtcgacggcgaggggcacgtggggatggcttccgaaaataatgtccacgcctttttccgccaaatagtcggcctgctttttctgcgtcgccgtgggctccttaatgtactcttcgccccagtgcataaagcagaccacggcatcgacgccttgcgcctttaatgcggccatgtcttcgtttacctttgcttcggaataaatggccacggcattgggcctgtcgctgttttgcagggcaccgtcgttgccgttaaggccgtaggtgtaggcgagaaaaccgattttaatgttgtttaccgtttttatgagaggcttcgcttccacttcgccggtgcccaccacatccatacccgcctcggtaagggcgcggtaagtggtctccacgccgggtgcaaaggtgtcgtaggcgtgattgttggccgtggtgatcacatcgaagcccacggtttttaaatcccgagcgatttctataggcgatgcaaacatgggaaaggtggtgtagcccttcttcccgtcggttaaggtggtctcaagattaatcacggccacgtcggcatcgtcgataaagggcttcacgtagcaaaaatcttcggtaaaatcaaagccctcgccccgccgcgccgcgttgatctgaggccggtgcaccatgtagtcgccgaacgcgataaagcttacttccgtcggcgggatctttttttcctgcggcttcacctcaggggccacgcagcccgttaaagtgaaaaggagcgccagcagaataagtcgatatcttttcatcatcattccttttcttctgttcattcattaacgtatttattgtatcagtcttttcctattttttgcactaaaaaagcggggtctcccccgctttcgtcgactacgtctataagccgtgttttgtattggttaactatctgtctggtctttccgtcgccggaaagctctagcgacctacctaccggagacgacgagcagccgtctttttccctctttggtcttgctccgaatggggtttacatagccgcacagtcgcctgtgcgctggtgagctcttacctcgcctttccacccttacctttgcaggcggtatctctctgttgcactagccttggggtcgcccccaccggacgttatccggcattctcgctctgtggagcacggactttcctcgctacgcgcagttaactgacgtactcgacgaattattctaccatattcagtcttcgatttcaaagacgaagggcgaattcatcaccacgtgggcacgggcgtcggagatttcttccacccactccgccatggccattaaaatggccttttcgctgtgaaagtggccgatgtccaaaaccatgaggccgatttcgtaggcgtgctggccgtcgtgatgtttcacatccccggtgatgagcacatcggcgcctttaaacgccgcttcatcgataaaatctgcgccgcttccgccgacaaaggcgatcctatccacccgctcttttttctgcccgtagcagcgaatgccggtaatggattcccgttcgaaaatttcctttagatcccttaagcttaaagacgacgtgccgagaatgcccagttcttcgtcatcgctcagtacggttacgtccttaaggctcagcttgtcgatccactgatcgttgacgccgcctttggccttgtccatggacgtgtgagaggaatagacggaaatgttgtggcgaatgagatcgcagaccatttttcctcgaagcgtcgaatcctccaccatctcaaggggcgaaaaaataaagggatgatgggttaggatgagctccgcccccgtttcaagggccagatccaccacatcgcgggtcacatccatggccacgacgacattcttcacttcccgctcgccgagacgcaattgccagcccgttttgtcccaaggctcttgcaattcttccggcgcccaagcgcgcaatttattgatgatctctacactgttcaatgtacgcctcccacttttttacatccctatttgccttgtcgattaaatcctttttgccgctcacttccacagcccgcaccacgccttcgaggcgggccttttctttttccgccatggcgagaaaatcgccacagtgaagaaaatttttccaggagaaggcatcccttccgccggctgcgattttcatcaggggataaaatttgccccgctcttccacgagctccgcctccatgaggcgaaagccccgggcggtgagaaaatcgaaaagatcttccgccccctgcatgggctgaacgatgcaccaatccaaggcatccaccacgtcttttccgcgagacagtatatcggcgatcaattggccccccatgcccataataatggcgccttgaatttcgccgggagccatgggggcgaagccgtcgcctaagcgggtctcgaaacggccgtgaaaggcccctgaaagaagcgtagccgctttgtttaagctcggggcggaaatatctgtggcgatgactttctcggctctatttgcctctaaaagggcatgggagatatagccgtgatcgcagcctatatctcccacacagtgaaccgccggggtcatatgaaagacggccttaagccgcttcgacgattcaatcattccaaaaagtcctttaacttcttgctgcggctcggatggcgcagctttctcaatgccttggcttcgatttgacgaatccgctcacgggtcacgtcaaattccttgcccacttcttccaacgtgcgggcgcggccgtcttccaagccgaagcgcagggtgagcacttgcttttctctttccgtcaaggtggtaagcacgtcgcctaattgttcctttaagagaataaaggtggccgcctcttgaggagagaggatgtcgtcgtcaggaataaagtcgcctaaatgggaatcttcttcctcgccgatgggcgtctccaagctcacgggctcctgggcgatcttttgaatttcacgcactttgtctacggtaatgcccatttcctcggcgatttcttccggttggggatcccgccctaaatcctgtaccaattgccgttggacccgcaccaatttattaatggtttccaccatgtgcacgggaatgcgaatggtccgcgcctgatcggcaatggcccgggtaatggcttggcgaatccaccaagtggcgtaggtggagaatttgaagccttttttgtaatcgaatttatcgacggctttcatcaggcccaaattgccctcttgaattaaatccaaaaagctcatgccacggcccacatagcgcttggcgatgctgacgacgagacgcagattcgcttcggccaattcccgcttggccaactcgtcgccttcttccatgcgcttggcaatggccacttcttcgtcgggctccaagagggggattttcccgatctcttttaaatacatgcgcacgggatcgtcgacgctgccgcccttcatttccgtgggttcttttttctttttcgccgttactttttgctttttttcttcgtcgtctcttaagatttccacatccaggtcctcaaactccgcatagatgtcgtccatttcgtcgctggataaatccacgtcgtcaagagcatcgacgacttccttcgccgttaagctgccgtgcttgacgccttttttaaacaacttttcaatggccggatctttttccaaaatctgttcatctaattgatggagttgatccttgtgatccaagtttttcgtcatctatgattcgtccccttttctacttcctgtaagcgcctgttaatttcatcgagttcatataatttttcagacaagttttgattctcatcccctgcctgaggcgactgttccatatgttctatatcgtggagcaatttctgactgcgaagcctgagcccttcggcgtaaatgcggtcgatgagctcaccgacaatggcttctccatgtattagatccataccctttgtgaggcgatagaaacggtctttcatctccggatagtgatcaaaaaattggcccctgcgttccttctgaggaaggtcttccttgtaaagatccgatacggtggtaaacaaggggccccacgtttctccggccacgtatttccactgatccttcccctcaatgatggcgaaaaaatctttgtcttccaagccgtactgcaagaggctgatccacaaactttccatgggatccgccgcaggggtcttcgccgccttctgcgggcgattcaaattgccccgacgcatttctccttcgaaggactcggggcgcaccccgtaggcttcggcaaattttttcgcaaaaacgtcccgctccaccgggcttttcaccttggataatatggcggtgacgccttgtaaaaattccgagagggaagccgcatcctccaggtgatagtctttttccaggtttttcacctggaattcgacggaggaaaggccccggttcaacttgccttcaaaggcgatttttccgtaatcgcgaatgtattcatcggggtctcttcccccttccagcacgacgattcgcggtcgaatgtcctccgcagccaaaatgtcgatggctcggttcgtggcctttatcccggcattgtcgccgtcgtagcaaataaaaacctgtttgccgtagcgcttaattacccgtgcctgctcacgggtcagtgaggtgccgaggctcgccacggcatagccgattcccgccgcgtgaagggagatgacgtccatgtagccttccaccaatagaatcctggcgcggtcggatactttcatgacgcgatttaatccgtagagctcccggctctttttgtagagcagggtgtccgatgaatttaggtatttcggcaaactgtcgtcgagaacccggccgccgaagcccaccacgcgagattttctgtcgataatgggaaagatcaggcgatttctgaagcggtcgtagtagtggtttcgctcctcgttaaaggagacgaggttcgcttcgaaaagctctttttcgtcgtagccctttttcttcatgtggcccagcaattgatcgccgccggcgggggcaaagcccaagccgaaagccagaatcatgtctcttgcgatgttgcgattttttaaatagttcaggcaatggggattgcggctcaggatttccatgtagtaaagggccgcttcccgattcatggccaccatgcggttgcgctttttttccccttccgtgtctctgaaagagggctttaagtcgatgtgaaggtcttccgctaatttctccacggcttcgataaagcctaatccctctttttccatgaggaatttaatcacgtcgccgccggcgccgcagccgaaacagtggtagtagcccttatccggttgcacagaaaaagaaggggtcttttccgtatgaaaaggacaaagacccatgtaatttcttccttttttctcaagcttggtgtatcgaccgatccactcgacaatatcgctctcttcttttacccggcgaatgatttcgtcgtcgatgattaaagccatattgtcacctgctttctacaaactgtgccaatccttaggcacgtaaagttccttccacacattaatggcgaagcgatcggtcatgccggcgatgtagtcggtgaccatatcttccaccgacatggcgtgggctttggaaaacgccacgtgggccggaggaatcgcctcgacctgcgccgtgaaatagctgtaaagatcttttatgagtcgctccaccttcccgtcttcgcttttcaccgtgggattaaagtagaccttctcaaacatataggccctgagatccaacatggcggcgtaaatggcgggatccatggtgatttcatccgaggattcgctggctgagatcacgctttttaccagacaggtaatgcgctcggaatggctcgcgcccaaggtgtccacaatgtctttgggaatgtcgtccatggaaaggacgccggcgcgaatggaatcgtcgatgtcgtgatttaaataggcgatgcggtcggcaaatttaatgatctgcccttccaaggtgtgggcgggattgacggcctgctctttggagtggtgcaagatgccgtctcgcacttcccaagtaaggttcaagcccggccgatcgcctttggattccagaagatccaccacccgcaagctgtgggcagcgtgatcgaagccatttgggtgcaattgatccagcactgcttctccggaatggccgaagggcgtgtggcccaagtcgtggcccagggcgatggcttccaccaaatcttcgttgaggcgaaggccgcgggccatggtgcgggcgatctgcgccacttccaaggtgtgggtgaggcgggtgcggtaatgatccccctccggcgctataaagacgtgggttttatgcttcaggcggcgaaaggccttggagtgaatgattctgtccctgtcccgttggaaacaggtgcgcatatcacaatcaggctccgccattctgcggccctttgaacgggcggcgtgtgcggctctttcgtctaaaatcgccgcttcaactttctcccatcgttctcgttgaagcataggccctcctaaaaccggctaatcatgtagtcgttaatgatttccgccgtctcttcaatggctttgttggacacgtcgataatggtgcagccgatgtctttcatgatctgcacggagtagtccacttcttctttgatgcggtctacattggcgtacttcgccgaagagtttagccccaatgcacggagacgctcttcccgaatggtatagagcttttgtgaattggcgataaggccgaagagccggcgcttatccttttcgtagacttccttaggcacgggcacttccggtaccaagggcacattggccactttgtaaagcttgttggccaaatacatggagaggggcgtcttcgacgtacggctgacgccgacgaggacgatgtccgctttcatgacgccgcggggatccttgccgtcgtcgtattgaacggcaaattcaatggcctctacttttttaaagtagttttcgtccaggcggcggattaaaccgggctgacgcatgggctcgtagcctaagatggtttccagcttgtccataggcggccccataacatccaccatgggcaggtttaattccgcttcttttcgcttcatgtaggcgcgggtgtccgtgtccacattcgtatagatgaccaaggcccgcttttgtgccgccgcttcttcaaggagtggcttgacctgatccacactgttggtgtaggggtagcgcttaatggcgaagtccttcgtgtcaaattgtttcaccgaggctttggcaattaattccccggtttcaccgatgctgtcactaatgacatagaccatcagttttgagtcgtcgcgtacggaatcaagattcatcgtctccccctaaatctacaactaagcggttaatatttgttttcgtcaggcggcccaccactttcagctgctcatcgccgaccactacgggcagggcgtcgatctcccattgatcgatggcttgagcggctttgtaaatggaatctttcgggccgatggaaataatattgggcatacgggtcataatcatggaaagaggcgtcttctccggatccacctggccgatggccgagcgaagcaggtcttttcgcgacacacagccgacgagaaagccgtcccgagtgatgaaaatagtgccgatgttttcgagaaagacggcgcagatgccgtcgtaaacgctggctttttcgtcgaggaccacaggcacgctcatgatctcttccacgtgaatggtgtcgaagatttcccggaccttcatatgggctggatcgcccttgtagtagtagcccaccttgggcctggcgtccagatagccgagcatggtgagcacgcttaaatcgttgcgaatggtgcctctggccaccgccaggatgccggcaatgtcgtcgccggtaatgggcccttcctttcgaacgatttgaatgatttgctcttgccgtttactcagtttcaccgggcacctacccttcgacgatttggtttccgttaaactcccgttgtaccaaggcatcgattcgttgaatcgtggccaggcgattgtttctcaggctttcgtcttccgccataatcatgacgcggtcgaagtacaggtgaatggcgtcggttaaagaatccaacagttccagataacgggcatcgtcccgtttgctgtaggcttcttcaagtgccggttccactgccaggaccttgtcgtaaagggcccgttcttcttccgtcaaaatggcttcatcgattttgccgtctttcgattcgtttttcgaagcgatgttttccacgcgggtgacggcttcgaggaaggatttccgatctccatcgacgaagaagttttgcatggcctgtgccttttcaaagacgcgcaggctgtcttcgccgtcgatgtcgtttaatgcttgaataatgtcgtagcgaatgccgtcaccgtctaacatggtgtcgatgcgaccgcggaagaatttcaaaatttgtttgcgcacttcttccttgtcgaagaccaggcccatggagtccacaaaggagaacagggaggcatcgatgcactcgcttaagcttaattcccagtgcttttcgttaatcatgcgcaagataccgatggcctttctgcgaagggcaaaggggtcttggctgccggtgggcacttcgccgatggcaaagaggccgcagatggtgtcgaatttatccgccaaggacacaatggtcccggtggtggattcaggcagagccgcaccgcttgcgacgggcatgtattgttcgcgaatggcgttggataccacggattcttcgccgtcgagctcggcgtaaatgctgccgataatgccttcaagctccgtaaattcctgaaccatattggtcatgaggtcggccttggaaaggtggcaggcacgtttggccgattccacggttttttcgccgacggctaaaatttcgccgatgcggcccacgaggtcggaaatacgcgccgtcttgtccgccatggtgcccagtttttcctggaagacgatgccgcctaattggtccacgtaatcttccaagggcttttctctgtcgttgtcgaagaagaagcgggcatcttccaggcgggcttccaataccttttcgttgccttcggccacgacatcggcgtagtcttcgttgccgttacgaatggtgatgaagtagggaagcaaatccccttccgggctgtataccggcgtgtagcgcaggtgctcgcgcatcggcgtggtgatgaccacatcgggaagggagaggaatttttcctgaacattgcctaataccgccgtggggtattccacgataaaggtgagctcttctaaaagatcgtcgtctttacgaatttcgccgccgttggatttggccatgtgattgatttgatagagaatggattcttttcgcttgtcttgatccagaataacgaaatttttctccagggcctcttcgtagtcgcgcacgtcgttgatttcgatgtggctgctacctaagaagcggtggccgcgggtcacgttggacagggcgatgccttctaaatcaaaatccacgacgtggtcgtttaacatggagagaatccagcgaatgggccgtgcgaaacgtaaattctttccgccccagcgcatgttcttcgggaagggaatgtggcgaatggcatcggggatgatttccgcgagaattacctccgccgcctcgccgactttgtggatgtgggcgtaaatgtattcgttgcccttcagctcgcgaacttccaagtccgcttccgtcacattttggctgcgcataaagccttccaaaggcttgttcacggagccgtcttctttgtaggcaattttcttcgccgggcccttgacccagtcttcgatgtcgccttgggcatcatcgatgccgtgaatcatgaggctcaagcggcggggcgtcgcgtaggcggcgatgtgatcgtagcctaagtttgcttcattcagcgccttttctactaaatctttaaatgcgtttaaggcattgcgaatgtaggaagagggcaactcctccacgcccacttcgattaaatagatattctcttgattactcatgatcgtcctccccgttcttaataagtgggtagcccatggcttctcgttgttgtatatatttttgtgccgtcaagcgggccaagttccgaaccctggaaatgtacgaagcccgttgggaaacggaaatggcgcctcgagcgtccagaagattaaatgtgtgcgagcacttcaatacgaagtcgtagcccggcaaaaccagatctaaatccaagacgcggctcgcttctttttcgtacatatcgaataattgcttgagcaagtcaatgtcggcaacttcgaagctgtatttggagtgttcgtactcggcttttttgaagatatcgccgtatttaatgtggccgttccagtcgatgtcatagaccgtgtccacatcttgcaggtacatagcgatcctctccaacccgtaggtcagctccgcactttccaaatcgcagttaatgccgcccacttgttggaagtaagtaaattgcgtgatttccatgccgtcgagccagacttcccagcccaagccccaggcgcccagtgtgggggattcccagttgtcttccacgaagcggatgtcgtgttttaagggatcgatgcccaaaacttccagactctttaagtaaagttcctgcacatcttccggcgagggttttaaaatgacctgcagttgatggtgttggtagaggcggttcgggttgtcgccgtagcggccgtcggccggccgtctggagggctcaacgtataccgtgcgccagggctcgggccccaaggtgcgcataaaggtatgggggctcatggtgccggcccctttttccgtgtcgtaggcttccagtaccgtgcagccttgatcgttccagtactcttgtagtttctgtatcattccttgaaaatgcatttcttcctcccctctacatcctcaactgtagagattgtatgttgtccagttgtaaattgaccacggtgtagactttcagcaaacgataaattttttccaaggtgttgggatccacattttccaaatttatcttatctaaagaagtatatagcaaatggcgcaaagtgtaaatatcccgcccgtccagaacctctcccccggcggaatcttcggcttcgacgacgccgctgtcggcgagaaaaacgtagtggccttcgccggattcgggcagcatgggccggtagcccataaagcttaaatacttaattaaaaaaccgagaaacaccggaagaggcgcgtcacttaaggcaagttcgtgaagggcttttcgcaccaaggaaaagatccgcgccgttccctggccttccatgctgctcttgtccacgatttccaccagggcggaggcatagaccatgttgtcgtaattgttccttaagcccatatttgcctggaggatttttccactgtttaagtagtagaagctcttgccgagactcaggcgatagcggccgaaggtgaagggctcgcttaatgccacggtggcggagcgacgggacttggcacccttcaccaagacggaaagcttccccgcctgctccgtgtaaaggcgaatgatcttgtcgctttcgccgtaggcattagcggcgaggaccacgccttggcactcaatccgctttgtagccaaaggccttgaccttctcgtctttttcccgccagtttttgcttaccttgacccaaaggcgcaggttcacgtgttcgcctaggaaggcttcgatttcttttcgcgcctccatgccgatgcgcttcagcatctgaccgtttttgccgataataatgcctttgtgggaatcccgctccacgtaaatggtggcctggatgtccatgtggtccttcccttccacttccttcatggcatccacggacacggccaggccgtggggcacttcgtcccttaaataaaagaggcctttttcccgaatcaactcggcgacgataaatttctccggctgatcggtaatcatgtcttcggggaagtattgggggccttccggcagatggtcgaagatcacgtccaccaggtggtccacattttcgtcgtttaaggcggagacggggacgatgtcgtcgaagcgattcatggcggcaaatttcgcgataatgggaagcacctcatctctcggcgccatatccactttgttaatgactaagatcgccggaatgtttcgcccttctttttccatggcatcgagaatcatttgatccttcgggccaaggtaatcgctcatatccaccaccataaggatcacgtccaccccttccatggaggagacgctggtctttaacatgtagtcgcctaatttgtttttcggcgactgaatccccggcgtgtcgagaaaaataatttgtccccgatcgtcggtgtggatcaaggtgattttatttctcgtggtttgggccttgtttgaggtgatggacagtttttccttgagtattctgtttaaaagcgtactttttcccacattggggcgtcccacgacgctgacaaatcctgatttatgcatggacatctcctttgacattttccggcccaaagctgtggggcaggagttcgtccagtgtgtggacgtggtaattttcttcgtctttcgccacgacgacggtggcattctttccgaattcacggagcacctggcgacacacgccgcagggatagcccatgtcctcccccgccactacggcgatgatttccaccgtcttcgccccttcgctaatggctttaaagacggccacccgctcggcgcagaccgtgggggtaaaggatgcgttttcgatattgcagccggtgtagatctttccgtcgtcggcgagcagggccgcgcccacggcgtagttcgagtagggcacataggcggattgttgtgccgcctttgccgcggcgattaattgttgaatcatgtcttttcggttcattttatcccatccaaacaaaaataatgacggcgatggccgtgcctaaaacggcgcctgccacggtttccatgggcttatgtatctccccttcgatgcggctttccgccacgagaaaggccaggccgaaagccagagccgcgataaatccgttcatggaaataaaggtaatggatgccgccatgcaaaaggccaatgcggagtggccgctgacggcgccgccttgaaaatagctgcctccgttctcccgcttgtaaagcttcgcgcccacggtcaaaatcaagacgataatcatggccacgaaggtcaggtgggggccggagtttttaatccgcaccaaaaccacatcggtaaaggaaatgatccggtcgaaaaagagcagatagcctgtcaccgccgcgttgattcccgcgagcaacacggcgccggcgctaatgtctttaaccagcttcgccatggggtggtattcctgggtcaccatgtccacggtgcgctcgatggccgtgttaaaaagctccgagacgataacgaaggtaacggcaaagagcagggcaataaattcgatgcgggagagattaaacaacaggctgaaggcgataacccccagcgccgccgcgtaatgaaatttcatgtttcgctccgaatggatggagctgataatgccctgtacggcaaagttaaatgatttaataaaattaccgcgcttcattttcttccccttcaaatgccgcgaggagcgcctcttccttggcgcgcatggccgccttttccccggcttcctcgtgatcgtagccaactaagtggagcaaactgtgtaccgtaaggtaggtgagctcccggcggtagctgtggccgaattcctcggcctgttccttcaccttggtggtgttgatgatgacatcgcccaggtttctgtagtcgccgtagacctcgtccatgggaaagctcaacacatccgtcactttgtccacgccgcgaaaatcccgattcaagatgcggatctcctcgtcttctacaaagctcacggagacttccacctgatcctcctcggtgattctcggaacgacgaatgaaataagggactcaattaaattcctgtcttcctccgataaggcgatggtctcttgtcgatcgtccatgtagaggctaagttcggtcatggctctacccctttttctcctcgttcttattgctgtctttgctttccgattcctcggccttcttttccttctcccgatcgaagcgatcgtaggcgtcgatgatccgttgcaccaagggatggcgcacgatgtcgtttcgacccaggcgaatgatgtcgatgcccttgacgccgtccaaaatgttcagcacggtcttcagccccgattgcttgcctctgggcaagtcgatctgggtcacatccccggtaataatggccttggagccgtagcctaatcgagtcaagaacattttcatctgctcgttggtggagttttgcgcctcgtctaaaatcacataggcattgtccaaggtgcggccgcgcatataggccaagggcgccacttcgataaggcctttttcaaggtacttttgaaaagcgtcttgacccaggatttcgaaaagagcgtcgtagagagggcgaaggtagggatccaccttcatttgcaaatccccgggcaaaaagcccaagctttccccggcttccacggcggggcgtgtgaggatgatgcggttcacttctttttccttaaaggccttcaccgcattggccatggcgatgtaggtctttcccgtgccggcggggccgatgccgaagaccacgtcgtggcttctgatggcatctaagtagcgcttctgccccagggttttcgggcgaatgggccgccccatttccgtgtagacgatgacatcgtccaggagggaggtaaagctgtcttcgatgcccgcctgtaccaaatcgatgctgtagcgaacatcttttttgtccacgcgcttttgcttgtggatggcttcgattaaattttcaaggacgatgcccgcctgttttaccgggccctcttccccttttaccgtaaggccgtcgtcttcctggcgaatggtcacggaaaaagcatcctcgatcattttcgtgtgttcgtctaagtgaccgaataattcctttaataccttgggttcactgatgccgatagctaattgatcttgcaaaaacgtctcctttacttacgcttacactttggtttgttaaatacttcactgtagataaacgggcggtaggcttcgtcgaatttttcgatggcaccaaagggcgagggcttttcggccttcggttccggctctttaacaggtgccgcttccatggtgtgatctgcggcgagggccgtttccgtggcctgttttaaggcctcatccttcatttgccgcttctttttcaggtcctcgtttacttttagggcttcttttttcgccggctttttctcgggcttttgaaaactttttatggcccgctgcacctcgatgggcagatccttgtaatccgcctctcgatgacggcctcttttcgttttttccttgcgtccctgaaactcatttatggcctgcttcatctccgtagaaagccccttgtctttggttttccccttcgttttcgactcggatttgcggctttcttccacataggtcttaatcagaccgaagagggcgatgaggataaggggaaggaagctgctcattcacgggcctcggcggattgtttttgatccccgccggcgatggcttcccgcatggccgtgtcgctctttaagttttcaagctcgtagtagccgccgacggaaagattgccggattttaatgcttccgccaaggccttgggcacttccgattgggcttcgacgacgcgggcgcgcatggcttccacttccgcacgcatttcctgttccctggcaatggccatggaacggcgttccgatgctttcgcttcggcgatgcgcttgtccgcctccgcttggtccgtttgcaggcgggcgccgatgtttcgcgccacgtccacatcggcgatgtcgatggataaaatctcgtaggccgtgcccgagtccaatcccttttcaagaacgacgcgggaaatattgtcgggattttccaacacttctttgtaggttctcgaagagcctacggtggtgacgatgccttcgccgacgcgggcgataatggtttcttcaccggccccgccgacgagacgatcgatattggccctgacagtaaccttggcgatgaccaagacttcgatgccgtcttgggccacggcggagatcttcggcgtctcgatgactttcggattgacgctcacttgcaccgcttccaaaacatctctgcccgccaagtcgatggctgcggcttcttcaaaattcaattgaatgtctgctcgttgggcggcgatgagagcgtcgaccacggcatccacattgcccccggccaggtaatggccttctacggatgaaatgtttaagcccatgccggctttcgtggctttaatcatggggtttacgattcgacggggcttcacgcggcgcagacgcatgccgatgagatcgctcatccgcactttcacgccggagaaaaaggccgtcacccacagaccgatgggcaccatggtaagtatgacggataaaaagacgatgacgacaaaggcgacgatgccgccgaaaataatgccgattcccataaaatcctcctgttataaattcattcgttcatttcaatttaaaataagttcattcccttttatcgaaggggcgaaattattccacctctttcacggaaatactgcgtccgcgaacggagacgatctcgatttttcggtggccttcgattaaaggaccggtggagcgcacggtgactttctcgccgttaaacacgccgatcccttccgggcgaagttgggtcccggaaatacccacgtctcccaccttccacggcatgagcttttctttgtgaggcgcattttgccccacgaggcgcttcaccataggcaaactctcgcctttttcccatagccctcgggccattaaaagcaccacgacggcggaaagaaaaaaggtgagcatggcctgcaggccgttatccatggccaaggcgagtgacgtgaaaaataaaaggatgccgctgatgccggcgatgccgaagcccggcacaatggcctccacgagaacgaggacgccgcttgccaaaaacaaaagcagggtaataatcgatgccgagccgccgaagatgcctgtgaggaaaaagaccaatatggcagccgccccgaagatccaactttttgaaaaggtcttggaaaaaagggcgtaggtaaagctcgccaagccgatcaaaaccaaggccgacctaagccagggcaaaaggtcggcgccggggcccgccgcgtaaaccggcgtagtcgcaaaaagagacaaaagcaccgctaaactatgtttcatgcccacacctccccatttatttatacccgaggaaattgtgcgtaatcgaaagtaacccggagaagctctccgggttactttattttaaaatgcgattgacgattgcgttaaccgccttgccgtcggcgcgtccttgcactttcggcataatgtttttcatgagaagacccatttgttttttctccgtgatgttgttttcttccatcacttggcgaatcaacttttcaagctcttcttcggataattgttcgggcatatatttcatgagaacgtcgatttccgctttcgtggcttcgaccaaatcgtcgcgaccggctttttcgaattcttcgatgcttccccggcgttccttgatttccttggccagcactttcagtacgccatcgtcgtccagttcgactcgatcgtcaacttctttttgtttgacggcggcacgcaccatggtgatcgtatctttcgctctcttatccttcgtcttcatcgcagtttttaaatcctgcattaaggtttcttttaaagacaaattaacaccttctcaattagtatttgcgtttttttctacgtgcttcctcagattttttcttacgctttacactgggtttttcgtagtgttcgcgcttgcgaacttctttcaaaacaccactggaagcacattgtcttttaaatctttttaaggcagattctaaagactcgttttctccaacgcggatttccgacatgatttcccctcccctctttttgaaaagagtgaatagctttttcagctaaattctaaactattatacacgtttcggaaggggaattcaacaaatcctaaggtttttcaatgatttaacccggcggccattgcaggcttcttccgcctaagacgtggaagtgcatatgttttaccgattggccgccgtcttcgccgatattgtgtacgacgcggtagcccctctcgaggccttcttccttagccagatcgcgaatttttttgaatacatatccgatgagttcgctgtcttcatcgctcatggcatcgagggaatcgatgtgttttttcggaatcaccaaaaagtgtaccggcgcctgaggttcgatgtctttaaagacatagaccttgtcgtcttcgtacaaacattgggaaggaatttctccttcgatgatcttacagaacagacaatccattggcttgctcctttctgattcggccggtgatttcaccgcctttttctccctcaattgtaacacattcaagggtgtttctcagatcttcttttccctccacggcaacatacatataattgggcgtgtagccgtaattttttccgtcttttttctcttcaaagagcacgggataggttatgccgattctctcttttacgaaatccgcggccagtttgtccccgagggcgatcatgcgggcggcccgctcttttttcacaggccccggaatctgatcctttcttcgggcggcaggcgtgtttttcctcatgctgtagggaaagacgtggaggcgcgaaaagcccatttcctcgacgaaattcatgctctcacgaaaatcttcctcgctttcgccgggaaagcccacgatgacatcggtggtgagcccggcgtcggggaagacgtccaggatgcgcgccaccgtgtccccatattcctcgggggtgtagttgcgattcatctcccgcagggttttttcagcgccgctttgcagagacaggtggaagtggggcataaaatgcttcagcttggccacgcggtttaaaaagtcgtcggtcacggtcatgggctcgatggaagagaggcggatgcgctcgattcccgccacttcgtccatggcctcgatgagatccacgagagccacgtcttcggaaagatcttttccgtagctgcccacgtgaatccccgtcaagacgatttctttaaaaccgcttgcggcgaggcgcttcgcctcctctacggcatcacgcatgtctctggagcgaataaagcctcgggcgtagggaataatgcagtaggtgcagtattgattgcagccgtcctgcactttcatgtaggctcgcgtatgatcttcgatttctttaatctctagctgttcgaagtcctcgccctgttcgtgggctctgacgtgaacgatttgctccgcgccctgaaagagggcatcgatgtagccgggcagggcggtgcgatcttttgttcctaaaatcaagtccacgccgtcgattttcgccacttcttcggcggatacctgggcgtagcagccaataaccaccactttgcattgggggttttcccgcttgtggcgacgaatgatctggcggctctttcggtcgctttcgttggtcaccgtgcaggtgttaatgatcgccaggtccacgtccatggactcgtcgtgaccataaccctccttttcgagcatttcttccacggcttccgtttcgtattgattgactttacagcctaaggtataggttttaaatcgccgcataagaccccctttctatttttcgcttcatgacaaaagatgccacgattcccgccgtctccgtgcgcaggatgcgctcgcccatggtaataaattgcgccttcgcttcctgcaagagggccacttccctgtcagaaaagcccccttccggcccgatcactacatagattttctccgccgagccgagacgtgcatcttcgatttccaccgccgcctcgccttcgtaacagacgaggagcaaatcacgatccgtgacggagtttattagcccgtcgacggtgagcaagtcgccgacaacgggtacacgccgccgattggattgcttcgccgcctcttcagcgattttttcgaagcgggcctttttcccgtcgtacttcttcgtaagattggccacggagcgatccatttgcaagggaataaagccgtcgatgccgcattccgtggcgtgttttaacacggtttccgtcttttgatttttgcccacgccctgagccaaaatcagctgcgtagacacatctttttcttctacggcttcttccaccagcacaaaggcctcatcgccgatgatctcaagccgccctcgaaagaggctttcgttccatgcgatttgcagggcgtcgccttccttcgcccgcaggacgcggagcagatgctccctgtcttcttcacgcaaaatcgcccgctcgcccaccacgggctgctcgtctacaaagaaatgcctcattttatcgcctcgccgcaagggccgaccaatcgcccttggtttcgctttcgagaatggtaaagccttctttcaccaaagccgctttcacatcctcgagtttttcttttaatatgcccgatgcgatgtaaatgccctcgggcttcacgtggtgatacacatccttcgccatgccgatgataacctcggcgaaaatgttgctcaccaccacgtccgcctcttcattcaccacctgaaagaggtcgccgaagcgcacgtcgattttatcttccagctgatttttcgccgcgttttccttcgtggcttcgatgcactggggatccaagtctccggcgatgaccttctttgcgccggaaatggccgccacaagggacaaaatgccgctgccgcagccgatgtcgatgaccgaatccccgtcctttacatagcgcctcaaatagcgggcgcagagaaagctggtggcgtgattgccgctgccgaaggccatgcccggatccagccacagaattttttcgccgtcacgggcatggtaatcttcccagctcggcacgatggcaaggcccttgtcgacggcgatgggatgaaaataccgcttccagtcgttggcccagtcctgatccgccacatctcctgtttccactgtaaagcccttcgccttcgccgccgatgcgacttcatccatcaccgattgttcgccggcttcaaaataggccttgagttcgaagctgtccgcgggagcctgaagcagttcctcgtcgatgcagtcccaaataaaggcgccgtcctttaaattgtcgatggcgtcggcggagatcacttcgtagctgtccacgcccatggactgaaggagcatctccccttcttcttgttgcgaccgttcgccgcttagtttcagcatgtggtactgtgtcattcaaaaaagtcctttagtttttgtaaaaatcccttttcctgctcggtcttcttgttccctacttcgctgcgcaattgctccaagagctctcgctcttcatcggatactttcgtcggcacgaggatttttaccgtgaagatcaaatccccggcgccttttctgcgcaagaagggcacgccttcgcctggaatgcggaagtctttgccgctttgggtgccggcgggaatatcgtagtcgatgatttcttttaaggtgggcacttgaatggtgccgcctaagacggcatcttcgtagcgaatgggaatgtctacgtataaattattgcctcttcgcgtaaaaatgtcgtcttcttccacgtggaggtacacatacaccgtgcccgcctggccgccgttgtcgccggcgtggccttccccggccatggtcatgacgctttgatcgtcgacgccggcggggatgcgtaggtgaagggttctgtttaccgtctctttgccgctgcccttgcagtgcttacagggcgcttcgatgacggtgcccgtgccgccgcaggtatcacagggcaccacccgcataaagcggccgaaagccgatgcggtggactggcgcacctggccgctgccgccgcaggtttcgcaggtgtgaatcttcgtgtcgtcttcggctccggtgccgtggcagtgggagcaattttccgtgcggcgaatctgaatgtccttttccgtaccgaacaccgcttctttaaaggttaagttcaggtcgtagcgaatgtgggcgccgtctctgggcgccttggcttgattgccgccggaaaaattcgccccgaagccgccgccgaacatatcgaacagatcaccgaaaatgtcgccgaaaccgccggagaagccaccgccgccggaggtgaagtcatttttaatacccttttcgccgtagacatcgtaggtgcggcgcttactctcgtcgcttaacacctcgtaggccagattcacttccttaaatttatgttccgcctcatcgtctccgggatgaaggtccgggtggtactgcttcgctttttttctataggctttttttatctccgccgacgtggcggtacgctcgatctctaatatctcgtaaaaatctctcatagacaccatctctttctcttcgctcaaatagtattatcatatcctatctcccgcgactttaaaagattctaaacaaaaaaagagcaccgaagtgccctttttacccaagtcattacttatcgtcttcgtcatcgaccacttcgtaatctgcatcgactacgtcgtcgtcagctttggcttcatcgccttgtgcgtttgcttgtgcttgggcttgtttataaagttcttccgataccgattggaaagccgtttgaagggcttcggtcttggccttgatggcgtcgatgtcgtctgtatctttaacgctcttcaagtcttcaatggcatcttcgacttttttcttatcttcatcggaaatcttgccgtcgacatctttcaatgcgctttcggatgcgtagatgacggagtcggcgttgtttttaatttcgatggattctttcttcttcttgtcttcttcggcgtggacttcggcttcgcgaactttttccttgatttcatcttccgttaaattggaggaagaggtaatggtaatgtgttgttctttgccggtgcctaagtctttggcgctgacgttgacgatgccgttggcgtcgatgtcgaaggtaacttcgatttgaggtacgccgcggcgtgccggtgcgatgccgtctaattggaagcggcccaaggtcacattgtcttgtgccatttggcgttccccttgaaggacgtgaatgtcgacgctggtttgattgtcggcagccgtcgtaaagatttggctcttcttcgtggggatggtggtgttccgttcgattaagcgggtggtcacgctgcccatggtttcgatccctaaggaaaggggcgttacgtctaagaggagcaagtctttgacatcgccgctcaatacgccggcttgaatggctgcacctaaggcgacacattcgtcggggttaatgtctttttggggatccttgccgattaaggtcttaaccaagttttgtacggcagggatacgggtggagccgccgaccaagaggactttgtcgatgtccgatgcggaaaggttggcatctttcaatgcttccatgacaggaccttcggtcttcttgacgaggtctgcggttaattcatcgaatttcgcacgggtcaggtccatgttcaagtgcaaggggccttcggccgtggcggtaatgaagggcaggttgatgttggtgctcatggtggaagaaagttctttcttcgccttttctgccgcttctttcaagcgttgcaagctcatgcggtcggcctttaagtcgacgccattttcttttttgaagctgtcggcgatccagtcgatgatcttttcgtcgaagtcgtcgccgcctaatttgttgttgccacgcgtggattgtacttcgaagacgccgtcggacagttccaaaatggagacgtcgaaggtgccgccgcctaagtcgtaaatcatgaccatgctggaatccgtgtccttgtcttcgccgtaagcgagggcggctgccgtcggttcgttgacgatacgtttaacatcgagtccggcaatgcgtccggcgtctttcgtcgcttgacgttgggcgtcggtaaagtaagccggtacggtgatgacggcttcggtaatggtttcgcctaaatagctttcggcgtcggattttaatttttgtaaaatcatggccgagatttcttggggcgagtagtccttgccgtcgatggtaaccttgtagtcgctacccatgtggcgtttaatggatgccacggttctgtccgggttggtgatggcttgacgctttgccgtttcgccgacgaggcgttcgccgtcttttgtgaaagcgacgatggacggggtggtccgattgccttcaatgttggggataattgtcgattgtccgccttccataactgcgacggcggagttcgttgtacctaagtcaataccaataatttttgccatattcatttcctcctgaatgtacgtgtttttttaagtgtacgtttttttaatctatattattttgagaccttcaccatggccggtcgaatgacgcggtctttgagtttatagcctttttgcaaaacgtcgatgaccacatcggcttcgacgccttctttttcttccgtcatgacggcgtgatgcagattcgggtcgaagggcgcgttcagcgcgtcgatttccacgatttcatttttcgccagctcccctcggaactgttcggcgatcattttcatgccttcgtaaaacttttcgtcttttacatcatctgtggccagtgcccgttcgaaattgtctaaaaccggcagaatgtccagggccaatttttccatgcccaagagatgcatttgttgcttttcttcgccgctgcgccggcggaaattgctgtagtccgcctgcagacgcaggtagcgctcttccagctcagccatgcgttcgtctttttccgacacatcttctgcaacttcattttcagttgctttggtcgcatccgtttgtttgatttcttcttccgtcggatccatgtccatcggattttccttattatttactaccacttctcacctcaacgttcttttcccaagtcgtctcgacagtgcatcggtaaatgccataatggaatttgccgactttctataattcatccgcatgggcccgattaaggcgatggcgcctaaatccgtgccgttcatgggatagatacgactgattaaactatttttgcgcatcgtctcttccgcattctccgagccgatgcgaaagcgaatggtttcgtctttcggcaggggctgaaagagccgcagaagatttgccttgtcccggacgtaatccatcatggattgcatgcgccccggatcttgaaattcttcgtagcggaacaaatggcccatgccgctcatcaccacgtccacctcttccactgcgtgaatgacgcgggagaggatctccgtgatcttaaggacgaaggattcgtagcgaacaagctcgccggagaggacgaatttcacgccgtcgattgcatcgaagggcgtgcccacgaaggcatcggataagacgcctgaaacgtagcgcatatcgtcttcatcgacagcgaaacccaagtcgatcatgcgcttgacgacgactccgcggtcgccgacgactaaaagcatgaccatgtggtcgttcaccggaatcaagtccagatacttgagccttcgatcgctttttctcggcatcatcataaatgccaagttctccgtgtaatcggccaaggcctccacggcggcagaataaaaatcctcggagccgtagagctccatggggatggcctcttcgaaatgtgccacgagggatttcggatagtcgatttcgggaatcaattcgtttacataaaatcgataagcgccttcggacggaatgcgcccggcggaagtgtggggcttttctaaaagacccaaggcttccaaatcgctcatttcgttccgtatcgtcgccgaggacacggcgagtgacggggatttcgaaatggtgcgactgccaactggcacgggagaggcgatgtaggactcgataatcaggtttaagatgtctatttttctcttgtccaaacaaaacctcctttccgtattagcacttgctttgtttgagtgccaatcgcttatggtttaagtataccacggttttagcacttgtcaagtgagattgctaaaaataaaaaagattccccttttgaaggctcgattcaggaattagtaaaataatctaaagctttgaatttcgctggatcgggactttttaattgccagcggcacgtttaattgattacaaaacaaaacgaccgcaccggggcattcttttaccctgatgtggtcatttttgttctctctcataggaaggcacagtggcgtgagacctttctccgacaaggtctactgtggtgaatgcggaacaaggctcggttcaaaagtctggcattccaacgacaaatacaagcaggtcatctggcaatgcaacaggaactgcaagaaaagctccccctgcaaaaacggcgtgcatcttcccgatgaggagctaaaagccgccgtcctttctgcggccaacaagctcatagagaataaagatgagattcttaatagctttcaagagattgtcggaggcgtttataatactcatgctttggtatgcgaaaaaacaaagccggaaagcgagatggatgtctgtgccaagatgattgaagaccttatccgccaaaatgttgccatcccacaagaccagagcgagtaccaagcaaagtacgaagatctggaacgcttctacaatgaaaaaaggcggccttagcgaaggtcgaaggaaagctcaaaatgatgcaggcgaccaaagccgatatcaatttctgcctgaaacagctacaaaaacaagatacgcttctgcaagcattcaatgctcaaagcttctgtgccctcgcggatcacatcacggtatatggaaaagacgatatccgcgtgatatttagaaacggctcagaaatcaaggtatgaaaaagagcgtacttatgcaacaaagcacactctcagccacccttatttcatcatatgctcaaaataagaaataagcttgcggcaatcatccgtctgtaaatcaagtttctcatatccatcttgtttgatcagaaggaccgtccggcagactttcagtaatagctcgatgtcatgcgtaataataagtgtcgggcgacctttggcaagttcaaagataagctcgacgattttatccatgtgcatgtaatccaaaccgctggtcggctcatccaaaataagaatttgcttttcactcaaaaaagcattggcgagagccagcctttgcttttgcccgccggataagttttgcggatgctcgctgcgtttattccaaagatcaatatgcttaatgatccaagagacctctgacaagtaagcatcgcttatttttttgccgttcgcgagcgcctcattttctacggtatcaaaaaacagctgatagtctacatcctgcatcatgtagtaggcatttttcagtcgttctcgctgagtttttccccatgaaatatcttgcttcttgccggcaagtccgcagagaacacgacctaaactgctttttccgataccatttgtgccgacaatccccatgatttcatcggaatgtaagtcaaaggataaattcgagatgagttcttttttgcctacagagacatgaacatccttcgcagaaaaaacacgcttacctgtctttgtcgtgttgtgcggaacaagtgcggaaaaatcgattgtccgaagcccgaagtctttgcaatcggaagtcttaagttctccggcatcaaactctttgataaaagttccgtctttcatgacatagagcttatcgtagagttctttcaaaaaatacagtcggtgttcggcaatgacgatggttttacctgacgctttaagcaatttcagaatgccttgcaaatctcggataccttcttgatcaagggaagctgaaggctcatcaaagaaaataatctttgtgtcataaactaaggtagaggcaatagctacccgctgcttttcgccgccggaaagttcattcaaatttttatccattaagtgagcaatgctcatgtactcaaaagctttcttcacccgttttctcagttccgcctgcggcatgccgaggttttctccgacaagggcgacctcatcttctgccttgcgggtaaagaattgatcggatggattttgaaatacgttgccgatgaccttagccaaggtacccgtcttaaaatcatgcaggttttgacccaataatgtgactttaccatccagtgttccttcatactgttctggtataagaccgtttagcactctggtgagcgtggtctttccacagccggaattaccggtgagcacgatgaattctccttcggtaatcataaaatgaatatcatgcaaagatgccttctctgcgccttgataattgaagcgctcaatattgactttcatgatgtccatagtgcaactcccaaaagcgccacgccggcaaacaggctgatgccatctgcgaatttaaagcgcatatcataataactggttttttctccttcatactcgatacctttggcaataattgaagagacgagcgtttcgctgacatgcagacacttatataccaaaggaacaaagtacagctcaaaagtgcggacgggatgcaaaagggaagcatgaaagccgcggattttcataccgtttcgaatctcatgcaagcgcaggccaatttcatccataaaacgcaaagctgcaatcatggctacactaacggtgttgggcatatgaagcttgcgaaaacaggctaagattttcgatgggctggtaagaatcaatacaatgccaatattaaagatcggtatgaagcgggcaatgagtgcaaaaagtcctataaaaatgcctgtgacatatcccaaatcagcgaaggccaaaagatacatcatgccataggaaacagaaaaaacaataatctgtctaaggaagagacctgtcgaggcatttaaagcaatcaacaacgtcagaacaagcacagcccaatagaccgtttgattgccaaaaaagacctggaaggacaccagtatcgtaagcgcgaagagcgtaaacggatgcagctgtccttcctcctttttctttagagctgatttctttatcatcagctaagcctgctttgtttactattcttttcaaaaaatttgttattgatgaaaagcccgaagcggccggcgataagctccaaaacaatgtttaccaaaacacaaatcactattacatttccggtatagctggccaccatcatttgcgcttgctctaaactcatgctactgacaaatcgtgcaatgttttcggcacccaacaacacaacaaatagaatcggatgcatggcgtaaataaacattgatgcgctgaaagccatggcgatacggtttttattgctgtaatcacctacaatcagttcagctatgataccggcaacaacacaaatcggtgttgcaatccaatagcccattacaatgtataagagaccgataatcatccaaaagagaaacgatgcacctcgcttttgcaccttgcgtgccatgatgacatagaccggtgcgacaaagaaagcgccaaatcctgcggatacataaagtgaaaccacgcctaaaagtcccgtcagcataccgatgcccatagccagaacaaagccaatgactccaagcactgcaatttgtaccacatttttaagtttcataaaatcctccttaaatgctttttatatcttccaagactcagccgttttccgagcctgaaggaacctggaataaataccgtcttttgcggcaagttcgttatgtgtgccactcgccactactttgccttcatcaatcactaaaatttgatcggcgttttcaactgttttcaagcgatgagcaatcataatgatggttttatctttcattaagctgttcatagcctgctgaagcttatcttcgttttccggatcgacattggctgttgcttcatcgaatatgatgatgggcgcatctttgaggatggctcttgcaatagagatacgctgtttttcaccaccggaaagagatgcaccgccttctccgattaccgttttatagccttccggcagactcatgatgaaatcatggcaagctgctttttgagcagcttgaacgacttcttcatgcgtggcattcatgtttccaaatttgatattgttttcaatggtgtcttggaacaaatagacgctttggaacaccatagagatctgatccatcaaagaggtcaacgtatagtcccgaatatcatgtcctccaattttgatgcttcctgcattgacatcccagaaacgggcaattaaattacaaaccgttgttttcccggatccagaagggcctacgatggccgtggttgtttttgccggaacggtaaagcttacatcatgcaaaatttctttgcttccatacgaaaagtcaatatttgctacctttatggaggcttttttcggacggatatcttcaccatgaatatccataaccggcatctgttttaggttttctacctgatcaatagaactggataccacacgcaaaacagccatagatgaaccggcggaatcaatctgggcaaaaatcataaaggaaataataacggacatcagagcattttccggaagcatagttccttgcacgtaaaggtaaatagctacaacgataatcaaaatgctaaagagctttagcacaaaatcctgggccatattgtaaggcgtaaacattttttcaatagcaaggttggtcttcttgttacgacgaattgccgcatgaacctttttatcacctttccctgtcagattaaaggatttaataatggacattcccttaatctgttcaaggacggcttccaccagttctgcttgcgcttcttggcgtttcggtgcaagatgtgccgtctttttctccatcgccgaggtaacccacaaataaatcagtgtaccgacaataacgatgagaccgatacgccaatcccagatcaaggttattaaagtaaacacaaaagcattgagaaagcctcccatgatattgatcagcacaaccggagctgtgttttctacatcaccgagaaccgtagtaagcgttcctacaatattgccggtgtttgcttcatcaaaatagcccataggcacggtcttcattttgtttgcgaccgcaagtctctgccgagccaccatgaagtagccggcatgcgtttgctcgagctgagcaaagtagttggtaagagcacgtccgaagatgctgataaggagaaaaaggagtgccaaaagagcagggtttatgccgatatcttttcccagcatccctaagatgacgaagtaaacagcaccaatttgaaacatatagaaaatggcaaaaagaaaggaaacggcgatggactttctaatattgccctgttcctctccggcaaaatgtcctatttttttcagtgcattcaacatgttatttgcctcctttcgcgcctacatgagcaagccacatactttgatagagctttgactttttaagcagctcttgatgtgtgccatgattttcgatttttccttcttctatgacgaagatttgatcggcttccgtgatggtggaaagtctatgagcgattgcgataacggtcttccccgcaacaagttgtcccattgcttgctgcatcagcacttcattctcgggatcaatgtatgctgttgcttcgtcgaaaatgacaatcggggcatctttaagcatggcgcgcgcaatagaaatccgctgacgctcacctccggaaagatgagtgcctccttctcctgcaatcgtgtcataaccgttttccagattctcaataaagtcatgacagcccgaaagcttcgcaatgtgctccacgtcttcatccgtagcactcaagcaacccatgcgaatgttgttgcgaatgctttcgttaaagagaaaattatcctgagatacaaaggaaacgctgttatatagttgttctaagggaacctttttcgcattgatgccaccgatagcgatgcttcctttttccacatcccaatagccggctatcagttttgctaaggtcgatttgccgccgccggatggacctacaaatgcattaaagctcccgtcttttatgcttaaagaaacatcatgaataatttctttggcatcttcaccgggttcataggaaaaagaaacatgatcgagaacaatgtcgtgtttgttgaacgatatcgggtgtttttcatgctgctgctcttcggcagctaagagcgcatcaatctgaccgacaaccgttcccacccgagccaaactatccacaaaattcatggcagccatcaaaaggcccgaaagggagaaagagaggatcaccgtcgtcaaaaatgtgcctccgtccaaacttccactttgataaaaaagatatcctgccggcaaaacagcaagcagagttgtaggaagtatcgatttagacagcgacattaagaattgaacgcttttcatccagtcgtagtagtattgggcatttgcgagaattctctcggaaaacttgtgatagctgctctctccttgattgaaagctttaataacttcaatgcctccggcatattccgctatagcggcattcatctgagcgctaacctggaccgagccggcatattgcttgccgtagcttttcataatgatactcataaaaaacattccgatcgggatggacaccaaagataacagtgccatgcgccagtccagtacaatgagataaatcaaaatacagagcggccccaccatatttgccgtcatttccggaataagatgagcaaccggacgctccaaactttccacctgatctacaatgagctgcttccattcaccgccaggtgtcgctgttactctccccagcgagagttttggaagcttgtgcagcattttttcgcgcagttcctgtaaaagttcaaaagtggctttatgggaaacggaaagcgacagtgaatatagaacggatttcacggcatagcctaaaagcccgacaacgcaggctttcatataagcactgaagtctatcacaccattaaataagtttgtcagaacctgtcctgcagccacgtagggaacgataccacctaatactccaagtaccgcaagactcacagagagttttagtccggcgtgctgactggcagccagttcccacagacgctttatgggactttgttttttcatgtttttacctcctcacgatcacatataaagcaaattagataactaagttatctcttggataaaaaaatatagagctacgggctgcggtacttttcccaacccgcattgaaaaaattagacatcgtctttgtcatactgagaagctgttctttatcggatgcgtgtacaacgagttcagagatggcgttgaaaaatgcatgattgatgatatggacactttgcttggtcataatggaatccgcattttctttcccatggatcatctctaaaatcgaccagtcattacgatcctcaattacgatgagtttatctaagaaatgctcatactttgtgccataggatttaaaaataagaagctcaaagatatctttatgtgcatagaaaaactcaacacttttaagcgtcccttcttgtttgagttcaagaacttttaagattttttctttgggaacgggaaacttcgtgccgtaggtggaaaaactttctttttcgtagtagttataaatttcattgatcttatctgctaaaggctctaccaactttgcaaacaaatcttccttatctgtaaaatgcttatagaaagctcctgttgtcacgccagctgatttacaaattcttcttatatttgctttttcatagccttcctccaagaaggcatccagaccactttttagtatgttggcatgagtttcttcaaaattacctgtagtcatagatcctcccatcaaaaatagttcttgtttagataactaagttatctaaacattacacccagctgttgctgtctgtcaagagaaatattttacgtcaataattatgaccagaagaaggcctggttttatatgatcgtgatgctatttgtcctatcgaattgttttcgtgccccccatacctattttttgtacctctgagtatgagtttcgtaccctaagcggctgtgccgttaaaatgtatcaaatatggcgttttgttctcatgaagtaatatcaatgcttacagacactagatcttaaatctatttaggtggattgttagtgctaaaaaccggaatttattagactgttctaacagtcacacgaacgcaaaattactgttgcttagctttctttctatttatcaattctgcgaaaacagcaataatgttcattacaaaaatggtacatatccaaataatccacagattatttgttgctccaccgccagcatctaattcacttgtttggaacaaacacccaatagcaaagccgagtggatatgaaatcgcagagataagaggtactattttaactttagtgaaacagaggactatcaactctacagcgataagtaagcatagcacaagtggcaattgtttcattccgtgtattccaaatacggcatacctagcaacagtaaatgaaaagaccagaataagtaacgagaccgcactaatcttgttaaattttttcataataattatccccacaaattctaatttgttttattctttcattcattccctcaattactctaatcgcaactgctgctaatagttgcaatccatatggactaaccaagaaaccaataattaacgcccgtatacatgttgttgtatctctttgaacaaaacatgctattgcacctatgatacaaaaaagcatcaaaatataaagtattgttgttccaatgccgtgtacaaattttataaaggctgtttgtcactgataaaaatatagatacaggaaaaagtataattttcaaaactattctcaagtttttctccgttacgctgatgtaaagtgcttgttgccttccctttcgaagcatcgtttcattcacatgaatggctccgtgttttttctttctctcatcttcaagggaactcatttttataagcggaagaaatccacttccacccgattggccaggtcgcgtcccttgcgcgttaaggccgcgcggccgtttgttatggtgaggaggccgtcgttcacatttttttcgatggcttccttatagagcgtgtcaaaacgcgcccccgaagacatgagggcatccatggcaatgccctcattgagtctgaggccgagcatggtgtactcgttgtcccgatccacgggcgagagcacttcttcctcttcgatgggcgcgcgcccttcgcaaagggcctcgtcgtatgccgaaaggttttgcacatttctataccgcctgccatttaagtggccacttgcaaccgggccaaggccgatgtattcgcctaagtgccagtaatttaaattgtgggcgcaggtgtggccgcctttttcaaaattggaaatttcatactgcttgtagcccaaagcggcgaggcctttttcgtaggtgtgaacatgaatgcgatccgtatcctccatggcttccatcattttcccgtagcggcgataaaaagccgtctccggctccacgattaagctgtaaagactcacgtgttccggattcagcgcctcgatcatggcgaggctcgccgccacgtcctccatggtctccgaaggaacggaggagataaagtccagattgatgtttttcgctccgccctttcttaaatgatgaaaggcttcctcggcggttttcccgtcgtgaatgcggcccatgatgtttaaaaggcgatccgatgcactttgcacgcccatgctgaagcgattaaagcccgcgtcgattaaggcggccacgtcgagatgaaggacgctttcgggatttccctccatggtaatctcagccccctcgtttataaaggggcgcaacttttccataattttagcgaggcgatccgtgcccaaaagggagggggtgccgccgccgaaaaacaccgtgcttacgccggcgcccatgatctcttcatataaatcgatctctcgcagaagagattcgagatagtcgtcgaaatccgcctcgccctttttcggcagggaatagaaatcgcagtagtcgcactttttttcgcaaaagggcacgtgaatgtaaatgcccggggactttttcataaaacctccaaaaaacggaccctttcaggtccgcctttcttatttgtcttcgtcgtatttgaggacggcgaggaaggcttcttgaggcacttccacattgccgatggagcgcatgcgcttcttcccttccttttgcttttccaagagttttcgcttccgggaaatgtcgccgccgtagcacttggccagaacgtcttttctgacggcgcgaatggtttctctggcgatgatcttcgatccgatggccgcctgaatgggcacggcaaattgatggcggggaatgacgccggtgaggcgctcgcaaatttttctgccccgctcgtaggccttgtccttgtgcacgatcagggagaaagcatccaccaattccccgttgatgagaatgtccattttcaccaagtcgccacgttcgtagccgatgagctcgtagtcgtaggaggcgtagcctctggtcttgctctttaaggcgtcgaagaaatcgtagatcacttcgtttaaaggcagctcataggtgatgacgacgcgggtctcttccaaatagtccatgctgatgtagcggccccgccgctcttgacagagctccataatggtgcccacgtaatccgtaggggacatgatttccgcccgcacaaagggctcttccatgtactcgatggaggtggggtcgggaaggttcgacgggttttgaatctcttccatttcaccgtctacggtgtgcacccgatagattaccgagggtgccgtggtaataatatccaggtcgaattcccgctccagccgctcttgaatgatttccatgtgcagaaggcccaaaaagccgcagcggaagccgaagcccaaggccacggaggtttccgcatcgaaaaccagggccgcgtcgttgacctggagcttttccaaagcgtcccgcacatcggtataggattctccttccgcaggataaatgccggagtagaccatgggcacgacttttttgtagccgggcagggcttccttgggcggattagccggatcgtaaatcgtgtcgccgacccgggcttcttttacattttttatgctcgccgtaatgtagcccacatcgccggcggaaagttccttaaggggaatgcttccgttggcattgacgcccacttccaccacttcgaattctttttccgtggcccacattttaatgcggtccccggccttgaccttgccgtcgaaaacacgcacgtagcaaaccacgccgcggtagctgtcgtaaatggaatcgaagatgagggcctttaagggcgccttcgcatcccccgagggggcgggaatctcgtcgataatggcgtccagcacatcgtcgattcccacgccgtttttcgcgctgattaaaggggcgtgttccgtatccagggccacaatgtcttcgatttcttttttcacttcgtcgactcgcgccgagggcaggtcgattttgttgatgaccggcaccatttccaaatcctgatccatggccaggtacacattggccaaggtttgtgcctctaccccttgagtgcagtccaccaccaaaagcgccccttcgcaggccgccagggagcgggatacctcgtagttaaagtccacgtggcccggggtgtcgatgaggtttaaaaggtattcttcgccgtctcgctcgtgaacgaggcgcacggccttgagcttaatggtaatgccccgctctttttccagggccatggagtccaacacccgggcatccatttcccgctccgtgagcatgccggtcttttcgatgagtcggtcggccaaggtgctctttccgtgatcgatgtgggcgataatggagaaattacgaatatttttctgacgatcggtcatagtacctcctttatgcgtccgttaatgattaaatagagtaaatttcgaaaagggatagtagcgaagcaccgcccgagagcgcacgtgctttttctccaccggaccgaagtagcggctgtcgatggacatgccctcttggcgattgtctcccatgacgaaaaattcgcctgctttaatgtcccaggccttgtcctgataaatccccgtggatacgccgggatggatgtagttttcctttaaagctacgccgttgacaaagaccttgccctcatcgatttgaatgtgatcgccgggcaggccgatgacgcgcttcacatattcttttcccgattcgtccggcgcatcgataatcacgatgtcccctcgtttgggatcggagaagtaattgggaaagaccaaacagatcatgcgctcgcgctcgtgtaaggtgggttccatgctctggccgatgaccatggtggtgttaaagacgaagtggcggatgaccacggccaataccaccgccataattattatttttatcatttctaccaccgtggaagtcgattttccttttctcttcaaaatgttcccctttcttgaatctgactattcattttaccacaaacgcaaattttctacatcttttgtaaacttcctacttccctttcttgcaaaagccacggccatatggtaaaattctacaagttaaggtatcctaagggataaaatcacagtcggaggtgaatcatggcaaatattaaatccgctattaagcgtatcggcacgacgaaaaaagaaacgttgcgcaataaatccgtaaagaccggtattaagacgtccattcgtaaattcgaagaagcgcttgacaaaggtgaaatcgacgaagcgagagatctcctccgcgctgtcgacaaaaaactcaagagagcggcatctaagaatgttatccataaaaatgcggcagctcgtcgcatgagccgtttgaccaaaaaattcaatcgcgccaactaaaagaaaaactgaaaacagctgttttcagtttttttattgcccttttttaattgtctcgcaacatggaaagaagcaaggtttgaagcacgtcccgatccgaagcggaggtgctcttcatgcgaagctcctcatctaaaatcaatcggtagtgccgccgcagctgcgccttcgtgtaagcgccgctttgggcggctatttttttgccctcgtaaggctttatgcccatgaagcgaaagatctctccgtcgcttcttcccgtctccctcatggttttgtaatagaggagattgcccgtttgccgcgcgatcatgtagaggatgcgcccggcgggctcttcccttacctcaaattcgtccaaaaggtttaaaatcgcggctccgtcttttctcgcgatggcggcgagaaggtcgaagatggtctccgcggagaagggatccaaaaaagcgtccaccgccgccatggtcacttccccttccgaaacgcttgcgatttgatccaaggtgttgaccaagccctgaaggtctcccgtaaattgcctgtcactgtagcctgaaaggcgaataaaatgctccagcacctcggggcgaatgcggcgattttgcttcgccaaatagccggcgagaaagcgcctgagcacctgcccggtgagccgctccatggcaataacccgatgggctttatcgaagcgcttgtagagcttttgattcttttttatgggagtctccgtttccattaaaagaagcaccgtggaggcggggatttcaaagactgcctccagaaaataatcgaaggccggatcgctcgccaaaagccccgcatcttttacgacgacgatacgcttttcggacataaagggcaaggtgttggccttggccagaatctccctcacatcccccgacgccacgtcgtaatttaaatccttggtggcggggtccaaatacttcttttctatttgtctgcgcttctcttccataccgaacttttccggtccgtggagaagataggctccgttgtaatccactgattccataaatcgtctcttttcttaaaataccctgcgcctgcatagaccatacccattaagattaccacgcaggcggcaaaaaagatacattgccccatggaaagggcccgcggtttatagacggacacatacaccttgccgtctttcaaattcatggtgattgcgccgtttttcgtctccaaataagaaatgtggtggtcttttaaacgctgaagcaccacttggtggggatggccgtaggaattgttctctcccgccgaaataagggccaggtgcggccgggtggtctccaaaaattcgtcgcaactcgatgtcttcgatccgtggtggcccagtttcacaatgccctcgcgatggcgaagatctgcaagaagcattttctcctgcgccgcaggcaaatcgccgagaaagagcatccgctgccccttcgacgaaagctccataaccatggacagggcattatccgcatcgccataggacggaaaaaccctaagctgccaatccttcatgggaaaagttccctcgatggcttcgatgactcccgcctcttgctgaatcgcatcgtacatggccacatcttcctcgcttcccggcgccggggcaaatatgtgtttgatcttatgcgcctttgccaaggtggtgacgccgccggcgtgatccgcgtcgtagtgagacagaaagatggcgtccaaggtgcccacgccgcatttccgcaaaaagggcaccacgtagcgggccgtagggtcggcgccgaagcggctgccgccggtgtcgatgaggccgcgaaaatccttcgcctccacataggcgcagtccccctgacccacgtagagctgggtcacggaaaggtcgggccgcatccattggccccacgcgaggacgaggatgccgacaaccgcggcctggagcatcaaaagccgccccgcccgtaatttcaaccgccgcatggggaaatacatggcgaagtgaagaattaagtaatatacgcaggcctccgctacggaaaagctcggcaatacccaattaaagggcgcgagggccatgtgttttgtgagaaagagaaagggcagaaagatccatcgagtcataaccgccgccccggccgccacaggcggtaagagaaaggacaagcagcttacggcaatgccgccgtataaaatcgccgcagccaaaggcagaagcaccacgttggcgagaaggcccatgatggaaatgcttcccgaggtaaacagaagaaggggtgcgatggcgaggttcacggcgacactcacacccaaagcctgcatgattcttccccgagccgttccgaagaagggcagcttcggatagatggctaaaatgccgtagacggagaaaaagctgaacaaaaagcccaagcggtaaatataaaagggattcaccaagagaaaaaccgcgccgctgaagcccagggcgtaggcgggatccaccggccgccaaagccgcttccctgcatccgtaaacaaaagagacagccacacccgcatgccgcctatgggaaagcccgtgagaaaaagatacaaaagcaagagcccgtggacggacagcttcccggcgtcgtagggtacggtgagcctctttaatgctgcagacaaaagcgccataatcaacccgatatgtaggccggaaatggacaagatgtgaatcacattgagggtgcgaaaatcctccagcccctcccagtccgcgtcgtttccgaagagcatggcggataaaagtttcgcctctttcggcggaaaatacctttcacaaatggccgcgcctttttttctgaaccgcccccggcaggtgtagagcttttccatggcccttccctcctcgggaaggatctcttccttcgtggggcgcaaggtggccttaatgccgtgagacaaagcgtagtggcgcccgtcgaagccgccggggtttcgcggcgcctccggcttcatggtaatcccccgcacggccacccgcgttcccatggcgggatgggcctcggagaaaacccgcaccctctttaaggggccgatccttaaatcgtagtaattttccttcgatgccatgaccacgcctcgcaccgtgacccgcacagggggcccttgcgtcgactgaagaccggatgaagcgaagacaaacacaatcagggccgccaagggatagaggccattggccttctttccccacaggagaaagcaaaaggcggcgaggatcaaaacaggcgcagcaaacaacaggggcacgcgctccgcaaaaaagcagcccccgcccaatgcgaggcacaagataaaccacaactgtttcataaccacctgctttcgaaaaaaacgaaagatatgataaaataagtaaaacgcgaattaaacaaaaggaggcgcctatggccctgtatctgagggaaccttaccgtaaatccatgaaaatcaccgttcccgacaccgtaaaaagtaaaggctttgattatttctttttagaagacagcatcgtcgccccgcccgtggagggctactacaccggcgataaaatcaccctggacggcgaggccgtagactacaccgtcgaaggcgggcgcattcagtgcaaaatggatgcggcagaaagcggcaaggaggcggaactttccatcgactggccccgccgcctgcagtccatgcaaaataatatcgcccgcattctctttacctgcgccttggaaaagcttctccacgccaaagtcctctcaggctccacggaagaagcctgctacctcgtcgtcgatgccgaagacatcggctttatgtcccttgaaaaaatagaaaactacgtcaatcatcttatcgaatccaatctgccgattcaagaagaaaagggcgaggtgaccatcccctccgtagacaaggtgtacagcgtggggccgctgttgaaaaacaccggtgaggtggctctctttgctattcaaaaaatcgaaaaagaggaagaaggcctgaagctcaccttcgtctgcggcaaatgcgccttagacgattacagaaaccaccgttacctgacgaaaaatctgtccatgtacctgaaggaaaacaccacccagggcatttggcaggcggtgaaaaaacttcacggcaaaatcgacgaacaaaagaaaaaaatcgattcaatggaagaagccatggccatggagcaggttcatgaatttatggccaagcgacgcaccgtcgaaggcgtgggctatatttacaccaccttggaaaacatcaatttcaaaagctttaagtacctgtccaatgccatccaaaaaaaggcgaagaccgtgcaaatctacggcattcccaacggcaacgaagcccagattcacatccttcgaagcgccgatgtaccggtggatttaaaagaaatcatggatcggttaaaaggcgatttggaaggctccggcaatatgtatcacgtgcagatcaatgtgccccgcacgcaaatgaacccgctgatggaacgcttcttaattgccattcaaaagcaattgctgtaacaatcaaaagccctcgggattttccgagggctcttttttatgcattttccaaaatttccacgccggtggtggtaatgtgcaggattcgaatgtcccaggtggcatccaggggttcggatattttttcccagtccttttttatggcctccagatcggcggatttttccgagacgaataagagggtaggcccggcgccgctaatgaggacgcggccattgtggcgctcttccaacgtcttcatcacgtcgtagccggcgataagtttgctgcggtagggctcgtgaattttatcttccaagccgaagaacaacgcctccgtgtcggcggtttccaagccgtgaatcaaaaagcccatgtggccgatgttcgacaccgtatcggcataggtcagagacttggggagcgccgcccgcgccttggccgtagacaaatcgaagtccgggaaggccgcaatggtggcgaagttgtcgatgttgttgatctttctgtagaccacgccgtcgtctgtaggcaaactgatgacgcagccgcctagaagggccggcgccacattgtccggatggccctcgaaatccgacgccatttttaaaatttcatcttgggtaaagggcgcgccaagcaattcattggctcccaccatgccgccgacgatgcaagtggcgctgctgcccaagccccgggcgatgggaatgtccgcatcgacccggtagctgaatttttccatggaggcgtctgccttgtcgaagaccactttcgccgcctcatagatcatgctctctctgtcgcaatcgccgccgtcgagggcaaaggtaaaggtgttgtataaatccaaagccaaaccgataacgtcgaagcccggtcccatattggccgtcgtcgccggcacacgcagtttaatcatgaaatccctcctttaccacttctttcatttcatccaccgtaatgctttcattgaagcgcacgggcaaatcgaagaccgaccttaaaggcctcgggcaaggaacaccggtagcatcttcgatttttttcaggagatccacatccccttccccttcgatgcccaacgcatccgccaccgtgtcggggaatttgtaggggctcgccgtggccatcacgagaacatggttggcggagccgtgtttcttcgctccgtcgtaggctaccgccgtgtggggatccatgacatagccgaagcgatcgaacacttccttgatccgcgcttccccttccgcatccgtggaccaatagcctacgagcttcgagcggttgatgacgtccatgggaatctcgaagcggcccgtggcatttaaggattccattttctcccgcactttataatctttcttcaaaaccaaatgcaggtagcgctcaatattgctcgccacaagaatatccatggaaggcgaagtggttttaaagaagtcgcggtttctgtcgtagacgccggtggtaatgaaatccgtaagcacgtggtttttattggaagcgcagataaaccgtcccacaggcatgcccatttccttggcgtacatggcggctaaaatattgccgaaattgcccgtaggcacgcaaatgtcgatggtatcgcccatggcaatggtgtttctgcgcaccaatgccaaataggaatacaaatagtacaccacttggggcaccaggcggccgatattaatggaattggccgaagaaaattcgatgtccgcgcgtcgagaagcttcccttaaggcgtcgtctccgaaaatttctttcaccgtgcgctgggcgtcgtcaaaattgccttcgatgccgtagacgtaaacattgctcccccgctgcgtggacatttgccgccgctgcatggtgctcacgccgtgagcgggataaaagacaaagatgtccgtgttctcaacatcttgaaaaccggccaaggcagccttgcccgtgtcgccgctggtggccgttaagatccgcacctttcttccctccgccgatgcagccataagatagggaagcatttgcagagcgaagtctttaaacgccgccgtgggcccgtggaataattccgccacggtgatgccgtccaggtcgaaataacccaccggttccgtcccggaaaaagaaccgtaggctttctctgtccaatttagtaaatcgtttttagaaaaatcttcgaaaaataaatggagcacttccgccgccaacgcttcataggaatagtccatgtattgttttaagtcgatcttcggaatttgatccgcaacaaacaagccaccgtcatcggcaggacccttgaaaattgcctcttttgccgttaccacacggcttttgtctcgggtagaaaaaaattgcatcgtcgtctccttttatgtcttttatctttttagtgtatcacagtttacgctattttcgcccctcgatcaagaggcaaacgctaacgaaaaaaccatttcataggttgatatttttctaactatttactataatggacgtacaacaatatagggagggtagtatgtttaaaattttagaaaagaagaatctggcgcccaatgtgtttttgctacgcattcacgcgccgcgtgtcgccgttgccgctcaaccgggacaattcgtcatcgttatctccgatgaacgcgctgaacgcgtgccgctaaccatcgccaattacgatcgcgaagaaggctgggttgacttagttgttcaagcatccggtccgtcgacaacgaagctgtctcaaaaagaaaaaggtgatgaactgaaagacttcgtcggccccttaggcgttccttcggatttcaccgaattgagcgacgaagaattaaagaaaaaaaagtacttatttgtcggcggcggtatcggcgccgcaccggtctatccgcaagtccgttacctgtctgaacgcggtattcactgcgacgtcatcatcggcttcaaaaacaaagatgccgttatctacgaagaagaattcaagaatctggactgcacactttacgttaccaccgacgacggctcctatggcttcaacggtatggttacggcaaaaatcgacgatctcatcgaaaacgaaggcaaatcctacgatacatgtgtcgccatcggccccatgatcatgatgaagtttgtttgcctcaccacgaagaaatacgatctgcacaccatcgtttccttaaacccgattatggtcgacggaaccggtatgtgtggcgcttgccgcgtcaatatcgacggcgaaacgaagttcgcctgcgtccacggaccggaatttgacggccacaaggtggacttcgacttggctatgaagcgtcaaagacaatacatgaacgtggaaaagacaaagggtcaacaagtctggaggaatgcgtaatggatcgctttactagagtgcccgtacgggaacaagatcccaataaacggaacaagaatttcgaagaagtttgctacggctacaatcacgaggaagctgtccaagaagcgaaacgttgcttaaactgtaaaaatccccaatgtgtaaagggctgcccggtttccgtcaacattcccgctttcgtccacgaaatcgccgaagacaatgccaaaggcgctgccatggagctttccaaacacacggcactgcctgccgtttgcggtcgcgtctgcccccaagaaagccaatgcgaaaaatactgcgtcttagcgaataaaggcgatgccgtcagtatcggtaagttggaacgctacgctgccgactacgctcgtgaaaatcacattcaaaccattcaacccgaaccgtccaacggccacaaagttgccgtcgtcggcgcaggccccgcaggcattaccgttgccggcgaacttttgaaaaaaggttacgacgttacggttttcgaatccttacaacaacccggcggcgttttggtttacggtattccgcaattccgtttgcccgacaccgtcgtcgccagcgaagtggaaaaattaaaagacttgggcgttaaatttgaaaccaacaccatcatcggtcgcaccatgtccttagaagccattcgcgacgaaggctatgaagccatcttcttaggtaccggcgccggtcttccccgctttatggacatccccggcgaaaactacaacggcgtcttcagtgccaatgagttcttaacgcgtaccaacctcatgcacgcttacgaagccggctacgacacgcccattatcgccggtcgcaaaaccgctgttatcggcggcggcaacgtggccatggacgctgcccgcgtggcaaagcgtttaggcgccgatgtaaccatcgtttaccgtcgtacggaagccgagctccccgcccgtgccgaagaagttcaccacgccaaggaagaaggcattaagttccatcttctcacctcccccgttgaaatccacgccgatgacgacggttgggttacgagcatgacccttcgccccatggaactcggcgaacccgatgaatcgggacgtcgtcgccccgttcccaaggtaggcgaagactttgatgtggaagtggatacggttattatggctttgggtaccaacccgaaccccttgattaccggcaccaacccggacatcgaaaccaacaaaaaacaaggcatcattatttccgaagtcggccaaagctctgttgaagacgtctttgccggcggcgacgccgttaccggtgccgcaacggttatcctggccatgggcgcaggtaaacaagctgccgaagggatcgatgaatacatcaagaacaaaaacaaataagatttcccttagaaatccaatgaaagaagcagccgcatcgtcggctgctttttttgtttcaggttaattgccgggaccgccctattcgtggtggtggccgcagcaatcgtcgtgatgatggtcgtggccgcaacagtcctcatgatggtgttcatgatcgtggctgcaacaatcgtcatgatgatgatgatgatcgtggccgcaacagtctccatggtcatggtcgtagtcgcagcaatgatcctcttcatctctttcgtaataggcggccaattcgtggatttttttgtgaatggcctcgtcttttaatatggcgtcgaggttaatgtagatttccatggcgaagtccacattgccttcttcctccgctttttcggcgacacgctttaaaatttccactcgatccggatccaaggtgccttgaatgttgcgctctttcaggtaatttaagaaatcttccttcgatgccggcgtgggattgccgaaacgctgaccgatcatcaggagattcccttcggcggcgtcgttgtccggatcgtaatccttggcgatcatgctcatggcaagggccaaggccggtctgttttccttaaagaggaaatagccctcgttggagaaacactgggagaaatccgatgcgagataggccgattcaaaggcctgttgattgtaggccttcgccctttccatatccccttcctggcgagccaccttcgaaagggtcaggtaattggccgtggacatagggttcaccgccaaggctttttccaaatacctgcgggcgccatcgtagtcctttaattccgccgccacgccgccgcgaagggtgagccacatatccacctcgggccctaaaatgggcaggcgatcgccgtctcgttccacgcggcaaatcacttcttccaccatggactggaaggaatagaatttttcgccgctgtccaaggcttcgagggccgttcttaaaaaatccacctcttctaccatgcggtcgataaattccttggccccttccatgtcttcgtccaatgttttggcgaaaaccgcgtctaatagggtataaaacttatcgatgccggcgccgtcttgtttgaggctgcggtagtcgccgccttctgtgcggtgctcggccataagctgttgtccgtaagttaaaagcttttgggccagttccccttcccctgcaagggaaagcttttgtatttcgtcgtagatggcatttaaatcctctacataatcgcctgtcaggctgtttataaaatcattgtattgttgttccattgatacctccacctatagtataccaaagctcgaaaggagttgttatggccagtctcgttacccattatttttttgcacagcgcctcttgcccatcttgcccgaaaaggcacaaaaaatcatcgccgcctaccccgatcactacgccctgggcgctcaagggccggatattttcttttactacctgctctcgaagaaacataaaatcggcggacaaattcacggcaagcctctcatggatttcatcgcaaaaaacggtgattggatccgcaaggggcccgtcccctcccccacttgggcctactttttcggtttcctcacccatttttctctggacatgacggttcatccctacatcgatcgggtggaggagaaaatttccatcgaccacgtcaccttggagcgggacttcgaccgggtgattttagaagaagagggctacgatcccacgacctttctctgccgagatctcctgcctgcccccgccactgtagcggaagccgtcgcccccctttacgcagcctacaccatcaatggccacgacgtccgccgggccctggcctcttttcgcatgggccagcaatttttccacgtggacgatttaaaagcctacgatggcaaacacaggctcctaagggcattgggcgtggacgattccttcggcggcatgcttttaaatcccaatggctacgaggattccgtctacgtcaccaatcccgtgatgaaagagctcatgatgctggcctaccccattgccggaaaagccgtagcggccttcacggagggcggcgagtatccgacctttttccaattaaatttcaacggacagtaaaaaaggcctcatccttcgatgaggtcttacaacattcttctcaagacgataaaacacaagagggcgccgataagcaaatggccggtcaccaggccccaggccttcttctttacgagatccgcaagttccataagccagaagatagcatacaggcccaggctgatgaaaaccgccggcagggaaatgcggctaatccacacaaagaggggatccggataggcactttttgtaaggatcattaaaagaaagcccccaaagcccaccatggcaaaaacgagggccgcctttttcacaatggatttaagcttgttcatggtgaaatacctcttttacatggtcgataaaatcataggccgatgccacgagcaaaatggagcagagaatccgaacccaaattttatccgattcacttaatacgtttgaaaaaataaaaaagcggctgacgtcgtagaataagagtaaatatcgtttcataaacttattttacaacggccaaaaaaatatgtaaaggcatcctttctgggtgaccccataaaatggacttaatcgagcaagcatttcgcttgctcgatcttgttttacataacattcgttctatgcggatttcattgtttacctcccaccccaggtttttaagattgttttaggttagttcaaccgcaggccctttttcatggatgcagtgcctaaataacttcgttgcgatgaagaatatagtagtcttcaagattcgcttggacgggacgggcgccttccaaggtactgcctgtgtagcgaatttttaaatactccccttcataacgcatccgaataatttgaatctttttttcataagccgccaattccgtaaatggaagcatcgtctcaaacacaaggccctccatttttttgattaacttatccgacgtggttttggccctgatttttccgtcgtttaaaataataatgttttttgtaatggcttcaatgtcggaaataatatgggttgaaaaaagaatgatcttgtctttggacatattggacaaaatatttgaaaatcgaatgcgttcgccgggatccaaaccggccgtcggttcatctaaaattaggattttcggatcgttgagtaaggcttgagcgatgccgactcgccgcttcattccaccggaaaaagtcgatacttttttgtctttcacatcctgaaggtttacaaaagcgagaacccgggggattttttccttcaattcccttttacttaatccctttaatgcgcccatataggttagaaactcaccggccgtaaagccgggaaagaccgcaaattcctggggcatgtaacctaaaagaccacgatacttccccttcaactgagaaatgtcctctccctcgtagaggatatggcccctcgtcggcgtatctacgccgaccaataaccgcatcaaggtagacttaccggcgccgttgtcccctaaaagcccataaattccggaatccagttccatgttcacatccgaaagagcttctttctttccaaattttttgcttaagctttcaatttttaacataatcagcgctccttatgcttcaccaaacgacttcctttttcccaaccacaacccgatccataagagcgccccgtaaaccattgggatgatcagtgaaagcaaataacaaccttcaagccccggagaagatacgcgagcgcaaaggccttcaatatttattaaagccaatggagagaggaagaagaatttcccggtaacgggagacgtccacagggattgaagcaagaaatgaatggacacataggccagaacgagggaaaaggtgaccttgacgtctttgattcgatcgcctaaaaaaagaaaaagaaagacaaggcaaaaggtcaatgcgaggccgtttaaaaatttatagatataatactgaagataggtcacctgaataggaaagaggaaaaattctcttgaattttgaatgaaaaggtctcggccgtcgcttccgtaaataaacaaaaccaaaagagaaaacagagccacgccgcccacataggtgaagacgccaatttccaaaccgttgatcagccgagcctgaaagagttttttcttcccgtaaagggtggcttccaccatgtccttcgttttgaaccgctcgtcttctttcattaccggaacgaggagaaaaagcaaggacaaggcgacggcgtaaaaaatcttatcggagttacggaggagaactttccaaccttcacaatagccgataaggagccggtccattggctttgctccttgagcttggcctgccttttttatcagattcattcgatactcgaaaaagccttgtgctcggggtttttttccccggagaagagcgtcatttacactctccaccggcaaaaactcgtcgatatcaatatcctctttgatcaaattttcttgaggcaagtcgtactttgcaattaaatcctccacttttgtatcgtcgtaccaggtctcctccatcagatagcggtattccgtaccgtcagaaatttccacgtgcaagctctcttgaagatacctcatctgttccgccttgataaggcagatcgacgaaagcaacaaaaacagacagagggccggaaggtaggggaagggaagcattctttttctattgacttccagtaaaaacttcatttgccctctcctccttttaagtaatagcggttcattatcggcatggccaaaattcggctactcgcaatgtaaatcaaagacagaaaacaggccatcgccgtaaagggatagacgtggttttgaaggacaaaaagcttggatgcggagaaatcacctcgcacaaagttttgcggcgtaaagtaggccagagtattcgcccaaggctgcggcgaatccgcccacttctcaagccaaacaaaggcgagcaccaagacgagcagggagactttcgacttgcgaaagaccagggagaataagagaatgatattgaccaccacgagaacggcggcaaaaccggataaggcttccagaaaatacccttgccaagtagtgaggttgaaaatcgccggtccggcataaaattcgatggaggcatcggctccgtgaagggaataaatcatcccgtggtagagaagtaaaaaaaacaaataagcgaggtacgcgagtcctgcaaataattctgccgcccttaccttggctaagtagagggaaaggcgcccattcttcgcgtgcacatccatttcagtaaatccctgcgcttcgtcggccgacgttaaggaagacaaggcgagggccaagtagattaaaaaaatattaaaagtcatgtgcagggcatcgcccatgtaacgccagccttcgttgtaagcatagtaaaggggcgttttcacttctccggcttggcgaagaatgatttcaacctccgaccggtcgtaggaccgatacgaggtgtgagtccatgaaccaatggcctttaagcgatcttggtaaaaattttcaatcccttggtcgctcatatgaattgaaaagtcctggatttcaatctctttcggaaaattcaaactttgcgcgagccactggaagggataaatcagcttcaagcccaactctttttcttccgttcgtgcgccttccacaaagtctttttctttgctttcgttgtaaagggtctggacctttttcatttgctcttcggttaaaaggccgtcgtatttaatcccttcttctttcatcaatttccaataggaaaggccggagccaaactttcctccctctaataccatgtccagggattggctatagggaagaatcttggccacacaaatcaacaaaaacaggcacgcaatcagggcattgttcttggtcgctattttttttaattccagttttacgacagcaaacatcgacttctccccctttttactaacactggccgtcctgttactgctcttcaaaagaatttttttcgttttttgcccttattgaaccgcctttttcaagtcgtagtaagacccggcaaagaccaccttccattccttctcgccatgaggcttggctaggagaagttcgtcataggacccgtccagccgcctggcttcatagacaaagagttcgtcattcttaagaccttgaatcggtccttttcgcgcttccgcagggatggtgccaatcatctcatcaattcggtaatccaccgtcggcataaagaccaactctgcgtcattatcgttctcgtgtccctcttccctcggtggatagatgtccggttttgatttaatataattcgataccgcttgatccaactcggcaaataatttcgggtctctttcatccctcctcggcccgaggacgatgtcgccgcctctggtcaccgagccgatacgaccttcttcgagccaatcctttctgttcttcgcccgttgcttggcaatctttttgtccgcagcaatgtcttgcgggcttctctcatcgggaccgtcctgtgttttaccttggctatcttcacttttcctttggtcctgcaccatggaataggtggattctttttttagatacagcgccgaggccagaacgactaaaaccacaaaaattcctaaaaccacttttttcttgttcatcatcttccatctccttttctattgattataggcaatttacacctcggtcacagttaacttttgtccgaacttttcacaaaaaaagaagaaggcttgtggcgcttcttcttaaaagggatcgatatagccgatttctctggctttttgtaccatttcttggtaattctttacgttcaacttgccgtaaatgcgatttaataaaacggctagggaagaggtggacatataggcttcttttgcgacttcttttcgtgattttcccgaggcatagaggcggagaatttttaattcgttttccgtgagcttttcctgaagatgtttcttagaagaaaaataccttttgttctccaggcaaacccctcgtatcttcgctaaaagactttgggtcgattcttctttcgaaataaaccccatacagcccatatccttggccttttcccggtaaaaatcaagattatagcccgataaaatcaacactttcacaccgtaatcccgtatcaacgcttcgcttaacttcagaccgttttctcccttcgccaagccgtccagattaatgtctataagtagaagatcgtaggtctcttcttgtaatttgtcttttatgtccttcattttctccggaatatccacacggatgtccccgccggattctaaatccatcttcagacattgggccagcattttatgatcttcgattaacataatcttcatagatccgctccttcttaatcggtacattcacataaaaggccaggtacttttcctccccttctcggccctcttctacctgaaatattccgtccaaccgtttggtttcgaaatccaacaatctcaagccggttccccgccccgcaccgtcctccaagtaatcgccgtaatttgtcatggacaaacgaatctcattttgttttttctccaaatgaatttccacgtaatcgccctttccgtgtttaaaaagattgctcaccaactcgtaaagggttttatacagaaagcggtcgtaaggaccgggcacgaaaaagtcctcggaacaagtaaagtcgattagtatgcctcgattttgatacttgtcttctaaatccttaataaggccgtagtaattgttgcttaagcttaccttgggactaaagattgggtcataggcattcaattcttgacgaatttttttaatgttgttcgagagaatttccagaacttgctccctctcggaaaaagacggggccttttgaaccagcttctgtacgagaataatgtcctgcaaaatcatatcgtgaagaaagcgagtgtttttctcggaatagaggcgcgaatacttatccaacaggagattttcctttcccctgttcaagagattgtctatctcttcccggctcaagtcgcggtaattgaagtaattggagaccatgacgaaaaacgcgctcaagtaaagggagagaaagaagatttcggtaaatttccttggaaaaccattgacgataaaaaggatgagaaaaagcacagagcaaaacttcgcccactctttaaaagacgggacaaaggctttgagggataaacgacacgcttttgtaagcaaatagattaagatggcggctaagacggccatcatataaaattcctcgtaattctcaaaataattccatagggaagagagatagaaacttccccataaatacaagaccaaaaagaccgcagttgacatcataatccggtaactgtaaaggccccgcccctgtatttctttctttttgaccaggataaaaagaaggggaaacaaacaaaaaattaagtagacccccatgtatagaaagttgacctccagagaagaaaaggtcgataaaagatagatcgctaaaaaagcgaggagggtcaaaagacgaaaaggaccgaagtgaaaatttccttctaagacgatatccatataggaaaaaatcagctgaagaacaaaaaagtaacgaagaagaatgtcattgaccagatacgcgacgatgaaatcttccgagataaaataaaggggaatcaaaagtagggtagtgcaaacccgatagacgtaatttttttctctctcctccagcagaatgaaataagagataaaatttgtgagcgtaaaaagaccggttaaagcggcgatatgaaaactgccgccacctttttttacggcaactaaataaaaccaataaagggccagctgggttaggctatggctccaaagcaagatcggttttttatacggcaaaaatcgattcacggcttcctcctcacgtccattagtctctattttaatcatactgaattgaaaaggaattttcacctaacttttgtccgaacatcattggagccgtcttccgatgtttgatgattgatctaaagttaaagtggattcctcgcctttcggcaaagaatttgctcttgctcaacgcaaaaacacgccacaaactaaagtgacccccaaagattggatttcttggtccaacttttgggggtcagtgcaaccctttcggatgccttttttgatttattctttgtttgctttttcgataatttcttccgccagttgtgcgggtacgtcttcgtagcgaacgaattccatggtgaaggaaccgcggccttgggtcatggcccgaaggtcgatggcgtattcatacatttccgcttgcggtgcttcggccataattaattgaccgccgccgggttgttggtccatcccgaggattctgccgcggcgcttgttcatatcgcccatgacatcgcccatgtattcgtcgggcacggccacttcaacggccataatgggctctaagagcacaggtttcgcttcggcaatccccttcttaaaggcgatggatgccgccattttaaagctgacttcgttggagtccacgtcgtggtagctgccgtcgtagagcacggccttgacgccggtaacggggaagccggcgaggacgcctttttccatggattcttccaagcctttttcaacggcggggaagtagtttctcggcacgctgccgccgaagacttcttcgtcgaagacaaagccttcgtcggtgggttcgaagcgaatccatacgtcgccgtattggccggcgccgccggattgtttcttgtgtttcccttgaaccgatgcagtgccgcgaatggtttctctatagggcacgataaagggcactttcttcacttccacgccaaaggtgttctttaatttgtctaagatgacgtccaagtgaacattgccttggccgccgatggtcatttgtttcgtttcggcgttgcgattgatcacgatgcccgggtcttcgtcttgaagctttcgaagggacagggtgagtttttcttcgtcgtttttcgatgccgcttcaatggcatagaagtaaaccggttgcggcatttttacgcgcttgtaaaccactttgtgggccttgtcgcaaagggtgtcgccggttttggtgacggtgagcttcgaaatagcgccgatgtcgccggcgtggatcacatccacggggacttgttccttgccgcgaattacaaaggggccggtgttcttttcatctgcatcttgggagctgttgtagagagccgtgtccttggtcatggtgccgctcaagactttgtagatggaaattttaccaacataggggtcggtaatggtcttaaatacaacggcggagaaagcttcgtcgtcggaaatggtgtgttcttcgccggattcgtagcggaagccggtgtgggcacgctcgtcgtcgggtgcgggcatgtagttgacgatggtgtttaataaaatatcgataccgatgcctttttccgcactgcctaccaaaaggggcacggcgtcaccgttaatgagggcggcggtaactccgcggagcaattcgtcgcgagtgaatttttcgccgctgaagtatttgtccatgaggacttcgtcgctttcggcgaccacttcggcgatttcttcgtacatacgctccgtggctttcacttgatcgtgatttaattccacttcttccggggcggcgtttttatattcaaagcctttttggaaaataacgtcggtgacgccgacaaagctgtcgccttcgccgatggggacggagaaggggataactttcttaccgaagaggctttcgatttgttccattaaggcgcggaaattaacgttttctccgtcgatcttgttcacgaaaataatacgcggcaagccgatttcttccgtatatttccacattctttccgaacccacttggacaccggcggtggcgtcgataatcatcaatgccgcttcggccgctctcaaggcgcccatggcttcgctgataaagtccatgtagccgggcgtgtcgataatatttaatttcatctttcgccattcgataggaataatgctggtgccgatggacgttccccgttctttttcttctttagagaagtccgacatggtatttttttgatccacgtgtccgatttgtttcgtggcaccggattggtacaagagcgcttcggttaaattggtcttgcccgatccgctgtgcccgacaagggccaagttacgaacttctttcgtgttatatgctttcattcaattattcctcctatcgtgcgatttccttacggaaacgtttttatggttacaattatatcatagcccgatgagatttgcattcatcctcccctcttcttgtcataatttatagtcgcggccgccctcggcgctgtttttgcgccacgaaaaaaacgagccgaagctcgtttctctctttattcttttcgcaacagggcgcgaatttggcttcccgtccatccgaaggcgccgccggagtggatgaagaggatgtttttatccgcctcccaacggccttttaaaatttccgaaacaaggccgtacatggctttgcccgtgtagacgggatccaaaataatccccgtttgggagacgaagtcccaaataaattccagctcttccggccggcttaatgcgtagcctcggcccacgtagtcgtcgataaccgtggcctcggcggaaatgctcgtgccctttaattcgttcatctcacccacgatgcggggaagcaatttttcctcgatgacaaaggccggtgcggcgacagaaatgccgacaatgtcttttttcgactccctgagggcgttggcgtaggcgaggcctgcaagcatgccggcgctgcctgcgacgcaagccaccacatcaaaggtgatgcccatgtctttttcccgggcgaggatttcgtcgaagcagtccacatagccgaagcttcccaggccgttagagccgcccatgggaataatcaaggtcttctttccttctccgtccagttcttctttccacgccgccatgatcccgcggtgattggcgtcgtaggcttcttggctgataaagcgcacctcggcgccggccaggcgatccaaaaagagattcccttcatcgggggcatcgtccggccccactaaaagcaagtggcacccaaagcccaagcgggcgcagaccatggccgtggctcgggcgtggttgcttcccacggcgccggtggtaataatatccgtggcgccctcgtccagggcctgttgaaacaggtattccaacttccgaattttattgcccgtcaccgagacgccggtcatgtcgtcccgcttaataaataaatttgccggcaggtccgcatccatgagttgtatcgattcgatacgcgtcggcgtattggctaaagataattttttcattgaacacctcaataagacaatccatcttctgcatcggcccgtcggagcacctgccaggtgcccttctcgtaggtgcagatgcccaggcccacgggagcggcaatgggccgggaccagaaatccttcaccgccactccttccatgacgtggtagagggcccgtatgctcacgccgtggccgacaatgagcacgtggtcgtaatccgacgtttcaagcctcatgagaaaggctgaaagcttctcgtagagatcgtagaaatccattaggccttcgcggtgataaacatccggcgcctttaaataaacttgggccagaggatcttttaatatatctttaaaaagcatgccttcccaagggcccaagggcaattcccgcagggcctcttcttctataatgggcacggcgcgggatttcagcaagccttcggccgttttcctcgcccgcatgagatccgaagtgtagcagcaatcgaagggaatcgaagcaagacatgccgccatggcgtcgatggccgcctccccctcccgggtaatgggcgaatccatttgtccctgaatgcgatcttctctgttccactcagtttccgcgtggcgcagaagataaagcttcatggtttagatgcgtgtaagaacaaaggcgatggtgccgtcgtttaaatcggtcttttccgcatccacggatttcagttccatggcatcggccaaagtttcttccatgatttgttctttcgcctcttccaaagcggcctttacatcgccttcggcgtcgtatgcgatggcaatgtggtcggtgacttcgtagtcgttggccttccgttgtttttgaaccttggagacaaattcgcggacatagccttcggcgattaattcttcggtgagttccgtatccaggatcacgaagagattgtcttccatgcagacgtcgaagccttctttcgaggaaatgtctacgagcacgtcgtcaaggctgacttccgtgtcttcgccgtttaagttcatggtgacgctgcccttcttcagctcgtcgtaaagggctttggcgtcgctttgtgccaattgtttttggaaatctttgatcttaggaccgaactttctgcccacttcttggaaattgggctttaagctgtaggtcatatactcggttaagtcgtcggagaagaccagctcttttacattgagctcttctttaattaaatcggtgagatcgccgatgatgggttttaaatccccgtcgaccaagacttcgcccaagggttgacgcactttgatcttggcgttttcgcgaccggcgcggcccaaggtcaccaattgacggacgatggccattttttcttccagcttttcgtcgatggccatctcatccaccgtgggatagtccgttaagtggacgctttcgccgccgtctaaggtttggtaaaactcttcggcgataaagggcgcgaagggggcgatcattttcgcaaggccgaggagcacgtcgtaggtcgttttaaagactgcatccctcgagggggtgtccgcttcgtcccagaagcgccgtctgtttctgcggatgtaccagttggacaaatcttccgccacgaaatcttgaatgtcgcgaaccactttcgtcacttcgtgaatttccatgttttccagcacggatttcaggaggctgttgtatttggaaagcatccagcggtcgatttcgtcgtaggtgacgtctttgatttctctgggatccacgccgttaatgttggcgtacatggtgaagaaattgtgcgtgtttctcagggagcggaagaatttcccgttcacttcccgaaggccgtcttcgtcgaatttcgtcggcgtccacggcggagaaacgtacatgaggtaccagcgcacggcatcggcgccgtatttttcgaagagctccgtaggcgatacggtattgcccctagatttactcatcttcttgccgtctttatccaagatcaggtcgttgaccaaaacgctcttgtagggcgcttttccggtcatgtaggtggagatggccaaaagggagtagaaccaaccgcgggtttggtcgatgccttcactgatgaagttggcggggaagagtttgtcgaaatcttccttgtgttcaaagggatagtgccattgagcgaaaggcatggccccggagtcgaaccagcagtcgataacatccgtttccctttccatgacgccgccacattcgcatctcaggtgcacgtcgtcgacatagggtcggtgcagctcgatggtttcgtcgatgtcttcgatggattcttccaccaattgcttaatgcttccgatgctgcgaagcttgccgcaatccgggcagcgccagatcgggaagggggtgccccagtatctggaccgggagatggcccagtcgtttaagttttcaagccagttaccgaagcgcttttcgccgacaaaatccggataccagttgacgccttcattgtttttcaccaattgatccttcatcttggtcacttcaatgtaccaggaggggtgagcgtaatagattaagggcgtcttgcagcgccagcagtggggatagttgtggacgatggtttctttgctgaagactttgtcttgcatcttcaggtagtcgatgatttcttcgttgacgctgtgaacgaattggcccttccactgggtttcggtaaagttcccgtcgtcgtcaacgggtttcacgaaggccaggtcgtttctgcggcccgtttgatagtcgtcctccccgaaggccggtgccgtatgcacgatgccggtaccgtcttccgtggtgacgtaatcggcgaggacgacgacaaaggcgttgccgtccacgtgaatttgatcgatgagttgttcgtagcggcgaccctctaaatccttgcccttgaccacttcgatgacttcgtattcatctttcagcaccttgtccataagatttttcgccaggtagtaaacattcccgtcgccgtatttcaccttggcgtaatccacatccgggtgtacggccagtgccacattggagggcacggtccagggcgtggtggtccatgccaggtagtaggcatcttcatccacggccttgaatttcatggtaatggtgggcgtcttgtcttcttgatagccttgggctacttcgtgggaggcgaggccggtgccgcagcgggggcagtagggcaggatcttgtggccttcgtagatgaggccgtcgttaaacattttatctaaaatgtgccagacactttcgatgtagctgttgttcagggtgatgtaggggtcgtccaaatcgaccaaataacccatgcgggcggtcatcttccgccacaggccttcgtattcgaaaaccgattcgcggcactttttgttaaacttttcgatgccgtatttttcgatgtcttgtttgttgtgaaggtccagcttcttttccacttcaatttctacaggcaggccgtgggtatcccaaccggctttgcggttgacccgatagccctgcatggttttgtagcggcaagtcaagtcctttaaggttctcgccatgacgtggtgaataccgggtttgccgttggctgtcggcggcccttcgtagaaaataaaatcgtcgtttccttctcgaatttcgacggatcgtttcaacagatccatgtcttgccagaagtcgacgatgcgcttttcacgcacgtcagcgatgtcttgggacagtgttttaaactttgccataattctctcctctttcttcataatctataaaaaaagccccttcgtctgttgacgaagggacgcttttatacgcggtaccaccctacttataggattctatcactcaaagccttaacgcggcggacgacccgtagggttctaaggaaggtgatgcgacttctactgtaatggcacgtctcagctgctgtacctctctgtgaatagggagcaaaagtcttcggcttctatttctcgatgaaatttgtaattgtcatgtcctttagacggctcacgatgtctttttgcaggccgtaaatggtgcggtgaaaaatgcagcctttaatttcttcggaatcaaagcggttgcaataaggatcattggcgtgcatgcatcgatttaattcgatggggccgtcaatggctaagataatatcatacaacgaaatggtttcggccggacgattcaggctatagccgcctttcgcgccgcggcgtgacttggtcagcccacctatgttcagctttcgcaagatacgcaaagtaaatctggaaggtacgcccatagcctcggcaatcgtcggtgcgccgacaacttggccttcatttgccgctaaataggcgataattcgaaaggcgtagtcaatttcctgtgtcagcttcacaatgtcacatcctcctttatttgtcaggtacgatattataccatgtttatatttttcggtaaagcgtaaaagccatcgtgctcccgattaaataattttaccaaggtgctgtttcgatctaaaaccacatcgtcaaggcggagtcgggcgcctttttttacgggacgggccagtttcgtctcgccgacgatgagcccgatgggcagcagcttttcttcgtaggccgtttcgccttccaccaaggtgccgtagcaggtgtcggatccaatgccttcaatggcatcgccggcttccatgtctttttttgcgacggccacggtgtgggccacatagccgacctccggtgcgatggtgggttcattatacataacagcttttgctattgtcaaaggggtttcgatatttgtcaggtgatagggccgataaaaaatgtaattgggcccgtcgcccatggataaataaggcatttcccgacggatcatgggttcgtcgctttccacggatacgaagacgccgggggcgatgccgtgcacgaaattaaccgtgccggtgcggttcatctccccgccgagatcttttgtgcgaagctttcggctcaattcatcgatggtggcgtgcatgcccacgcagccgccttcatcgggcaaaagccccgtggcattacatacggcattgagctcgatcatggtgttggtggcatcgacaaaggaggtgagcatgcgggggctgattccctttttctccgcctcgtcttttaacgtcgccggcgtggcctccacattcatgggattattttttccctttcctgcggcgacgacgcgaaaacctaaaaaggtcgcaaagttatacagttccataatggcgccgggctcatctccggccgtgcctgtgtagcaaaggcctttttccttcgcctttttcaaaaagtagggcccgaggagcacgtcgcattccacattaaagctgataatgtgtttgcccgcgttcagtccgttttcattgatgcaggcgccggcttccgtgttgccggtgcagtcgcaaatggcatcgacctcatttagtcgccatgccagggaattgtctgtggttaaaaccatcttcccttcattgactagaccctccgcctcgtttgcatcggcggtaaatgtgtatccgtcgtcctttaagcccacatctttcgccttggccaaaaggccttcttctcttctggacgaccagaggatgacgtctatattatgaattgtttttaattgtgcaaccaatcccgatcccattaagccggcgccgacgacggcgatgcgaatgggaccgcgtttagacaaatcttcttgtagtttcatatttgtcctcccatcattctttagaattatagcatacattttccgtgtctgtggcacgaggtggccaccggcttgtaatcttaacgctatttttgatttttaccgcctgcttcgggtatgaatcattggaataggagtgaatttatgaacagaaattatacattaatcgaaaagcgagccatcgacgaattacacggcgaggtttctcttttaaaacacaatcagacgggggcggaagtcctcctaatcgacaataaaaaccacaacaaaactttctccatcggctttaaaacgccgccggaagattccaccggcgtcgctcacattgtggaacactccaccttgtccggatcgagaaaatacaagaccaaggagccgtttatggacatggtggcatccagtgtgcagacttttttaaacgccatgacctatccggacaagaccctctaccccattagctcccgcaacgacaaggatttcaaccagctcatggacgtgtatttggacgcggtcttttacccggccatgaaggacaatccgaagatcttttaccaagaaggttggcatccggagattcaagacgatcgtctcgtggcaaacggcgtggtctttaacgaaatgaagggcgtctactccgatcccaacaatcgcatcagcgacatgattcgcgaaaagctccacccgacgggcacctattcccacgattccggcggcaatccgaaaaatattcccgagctcacctacgaggattttttgactttccacggacgctactaccacccgtccaacagctacattcttctcgccggcgacttggatttcgacgagcgcttggattatttagacaaaaactatttaagccacttcgattacaaggaccccgcctcggccattgtcggccacgatttctacgacggcctcgcggaatttcacgagacctacgatttaagtgaaggggaagatcccgcggggaaaaattacttcgccttcgcccttaccgccaaggtggatcccgcgccggaagatcttcttctgcgcaatttcttccaagagctcttcatcgaatcggaaaacggcctgttgaaaaagccgctgcaggcggcgggcatcggcgaagatgtgtactcggagctttccgccaccaacacctgggatttttccgtggtggcctaccgcgccgatgaacatcgcttcgaagaatttaaatccatcgtcacggacaccttcacccgctacgccgaggaaggcatcgacgaagatgtccttgaagcgacccttgaaaaatttgaatttaccgtgcgccgcggcggcggcagccacgccgatctaatttcctacatcggcgccttaaacacctggctctacggccaaagccccttggacggtttggaactcttgccccttttgaaaaagctccgtgaaaaaatcggcacgacctactaccaagaaaagatccgggaatttttcctcgagcccacccaccgcatctttatgaatgtggcaccggagatcggcaaacagaaaaaagaagaggcggcactcgccgaaaaacaacgggcgaaacttgcggccctttccgaatcggagagaaaagacatcgaaaccttagtcgaggacctgagggcgtaccaaatggcgccggattctgccgaagccaaggccaccattccgaaattggatctaaaggatttaggcgagggcattacgaaaattccacggaccgtcacggagatcgagaaggtgaccctgacggaaaatccgctgaataccaacggcatcgtctacacaaatctggccttcgacatgggccatttgtcggaagacgaattggcctacgcctctctcttaggggaagtcttgacgaaagtggccacagaaaattacgacgaggcggcgctggaaacggaaattttcctctccggcggcggcttcaccttcgatacgccggtggaagaaaccgacgacggatataagccctacttctttatctccaccggtgccctaccgcggcagcttcaaagaggctacgccgtcttggatgaaatccttacgaagagccgcttaaccgacgccaacaggctcaagaccattttagaggggctcaaggcggacatcgccaacaccctcttgcaatcgggccacctcatcgtctccaatcgcgtgcgcacccacttcagtgagggtgcctatgtggatgacatcatgaacggtctggccttcttcgacttcgtctgcgatttggtggatgaaaaagattacgccgccgccgggaaaaagctcgaagacgtggcgaaaaagctctttgcaaaagatcgcctcaccgccaatctcatcgccgagaaagaggatttgaaagcggcggaagaggccatcgcgcctttcctgcgatccttcaaacacctcggcgcgaaagactacaccgtggcctttaaaccggaaaaggtgcgagaagcctttactctaaattcccaagtcaactacattgccaagggcggcaattttaaggccctaaataaagcctacaccggcgatatggccgtccttgccaatgtcatcagcaatctctatttgcaccgggaaatccgcgccaagggcggcgcctacggtgccggcattcgcattgcaaaaagcggcaatgtggccacctactcctatcgcgatccccatgtaaaagaaaccattcaagcctacgacaccatcggcgatttcctccgcgccctggagctttccgacagagacttggcggacatgatcatcggcgtcatgaacaccttcgatccccacatggcccccgccgcctacggcatcttggactttaagcggttcttaaacggcaccggcgtcgaatcccttgaggcccttcgccgtgaggccctggccaccaccgtggaagccttaaggggctacggcgatatgctggacgccttaatggcggaagagcaaatggtcgccatgggctccgaagccgcactgaaagaagccgatgccttcgatcgctacgaaagtttaaatcgataaagaaatcccccccgaggggatttttttatgcccgcaaacaaaaaagcactcggttgcccgaatgcttttgctttacttttcttcgtttaaggcctcggaggcttcgtgggaaagatcgtctttctcgatgcgctcgccggttcccaagggatcgtcggtgaggctgccgccgttaaacagggtttcgaattccttgccgctaatggtttctcgatccaaaagggcgtcggaaacccgaagcaaggtatccatattttctttcaaaaggcccttcgccttgttgtaggcatcccctacaaagcggcgcatttcttcgtcgatttcggcggccacttcttcggaataatccttggtgtgactcatgtccctcgcgacgaaaactgaatcggaatcgctgccgtaggttaaggtgccgatcttttcgctcatgccgtaggtggtgaccatttcacgggcgagcttcgtggcccgctcgatgtcgttggaggcgccggtggaaatgtcgccgaggaccaaatcttccgccacccgtccccctaagaggctcaccaattcattttgcatttccgtttttgtggtgaagtgcataatgtcgtcgtcgggcaaaaaggccgtaaagccgccggcacgcccgcggggaatgatggtgatcatgtgcaccgaatcgtagcccgggagcattctggaaaccacggcgtggcccgcttcgtgtaccgccgtcagcttgcgctctttttctttaatgacggcgctggtcttttcgggaccggccaccactttaatgctggcttcgttgacgatgtccatggggatctttcttagattcgcccgagccgccaaaagggccgactcgttcatgagattttccagatccgccggggtgaagcccgccgtacgcttagccaccacggtcatgtccacgtcctcagccaaaggctttttcttgccgtggagctctaaaatttcttttcgcgcccgcacgtcgggaaggcccacgtaaatttggcggtcaaaacggccgggacgcaagagggccgggtccaaaatgtcggcgcggttggtggctgccatgacgatgaccccttcattggtgccgaagccgtccatttccacgagcaattgattcagcgtctgttcgcgctcgtcgtggccgccgccgagacccgcgccccgtctgcgccctacggcgtcgatttcgtcgataaaaataatacagggggcgttgttttttgccgtctcaaaaagatcccgcacgcggcttgcgccgacgcccacatacatttccacaaagtcggaaccgctcataatgtaaaacggcactttcgcttcgcctgccacggatttggagagataggtcttccccgtacccggcgggccgacgaggagtacccctttgggaatcctggcgcccatggagacgaatttattggggtttctcagaaaatccacgatttccgagagctcttccttttcttctttcagccccgccacatctttaaaggtgatctttttcgtttcgtcgtcttccataacccgggccttgctcttgccgaaattcatcatgcggccgccggcgccctgttgggagcgcataaagctaaagaataaatagcccataaacaacatgaccacaaaggtgggcaggaagctggcgatggtaggcccttggggattcaccggcgtggaggacagagcgatttcgcccttttccacgggccccttcaggtattgatcgtaaaaagaatcgccgatgaccggaggaatattcgcccggaaaacgtctttatttttcttcgtaaccagagcttcagaaccttttaagtcgatggacttgatctgatccttttgaatcatttccacaagcttcgtgtaactgatctcttccgtcgaacgttgagacggattcataaagtagatgccgaaaatcagcatgccgagaagcacgagataaaaggcgacgccgctccattttctattcaatagtacaaacctcctctgctatcgtatctgtcagtatatcataatttgccgagttatttctcatacacttccggctttaatacgccgacataaggaaggtttctatatttttcggcaaaatcgatgccgtagcccacgacaaatttatccgctacttcgtagccgatatagtctacattcaccgcccgctccctgcgagacggcttggtgagcaaggtggcgatggcgactttttttacgccgcggctttccattactttcgttaaatagctcagggtgagccccgtatccacaatgtcttccacgattaaaacggatttcccttccacggtggtggaaaggtcttttaaaatccgcacctcgccgctggaggtggtggaagtgccgtagcttgagacgtccataaagtcgatttccatgggcaaatcgatggcttgaattaaatccgccataaaggcaaaagcgccctttaaaatgccgatgacgattaaattttcgccgcgaaaatcttccgttacggccttgccgatgcgcgcaacggctgccataatttcttctttcgataccaatatttctgctacatcttgttcaatggaatccacgcgagtttctgccatgatttttcctcctgcctctcggcttttctgagtcctacgacccacaccacttcgcccgcctcggtaacgacgggccagcggtcgcgtcgtctgcgttcgatttttgcgtcgataaatacatcttttactttcttgcggcccacgttcaggcgaatcacatcgccggggcgcctgctgcgaatcaccacgcctgcgggatctttgacataaataaaatcctctccgtcgcctaaatagaagcggtggcccataaactcggccctgccgtcgactaacttagcttccgcctcggttttgctttcttcctcgggaatgaaaaaggcgacggtgccgtagcttttttccacgcgcaggccgggaagatccagccccttgcccgtctgagtatgttctaattcgtcgatggcggcaatgtgctcgtagctgatgtttttcacatggcccctcaccttttcaatccccaggcgaaaggcgcgccgccttagggcgtcgggggcgcggaagatcgcctcatcgaagaagacggatccgttatcttcccttgcgagggcggcgtagagcttcgccccttccccggacagatagctttcatcctcttccgccatggcccgaaaagaggccatgacccggtcaaaggcggggttaatggccttcatctcgggcacgattgaaagccgcaggcgatttcgcgagtaggtgggctcaaaattcgtctcgtccaacacatagggaatgtttttttcggcgagggccgataaaatcgcctccttggtcatggaaagcaagggacgaaagagatcgccttccaacacgttcatgcccgccatgccctttaggcccgtgcctcgaatcaatctcaggagcatggtctccacctgatcgtccaagtggtgggccaaggcgatgagcccgccgggggctttgtggcgacggaaaaaatcgtagcgcaattcgcgccccgcctcttccgtgcctaatttattttctcgggcgtaggcgcccacatcggcccgctcaacgacaaggggcacgccccaacgcttgcaaatgtcttccgtaaaggccatgtccctgtccgccgtctccctcaggccgtgatgcaaatgggccgcctttaaatcaaaggggcaatgctttcggtactcttttaaaagatagagcaggtacatggaatccggcccgccggagcacgccgcgaggacgtggctgttttcatggatgatgcccttaaatagatcttccacaaaggcctccgttcaaaaaaagagcgtcgctcggcgacgcatactttatcttctcttggtcttaccctgtcttacatttcgacgttgcttggcgctttcaatcttttcattgctgaccttcatgaatttgctcaacatgtcgtcgaagctggacgcatcggatttatggacttctctgttcagttgaaccgcctggggaaggggctttttttgttccgatttcggttgggcctgtttcatgctcaaggcgatttttccgccgtcttcgatggtaagcaccttgaccttaaccttttgccctttggacaaatgatccgagacttccttgacgtattcatcggaaatttccgaaatatgtaccagtccgttgtgatcctcgtcgagttgtacgaatgcgccgaatttcacgatacccgtgaccacgccttctaatatagctcctacttcaattgccatagattaccttgtgtcctcctcattgatacttttcgtgcgatctttttccttgtccacataaataacttcccggggttttaccatgcccagatcttccctggccactttttcggcaaattccatgctgtcgctgtttcgaatggactgccccgtcgcttttatttctttggaacgggcttcaattttcttttgattctcccgcataatggcttctttttggcgcgtttctttccatgtattgaaactgacggcaacgcaaaggacggccacggcgatgatcgcccaacgggccgtttgaacgggaactctgtgaacttttcgaacctttgccatgcactcacctcgatactactagtatcgcacgtttcggcgatcttttcaatcgtccgacaggatttcgtagagatcttcggcaccttttttctgaacattgtctttgatgtccaatacccgcaccttttggctgcggttgccgaactgcacggtgacgatgtcgccgacggccacttcgtcgcctgccttggcggtcttgtcgttaatgctgacgcggccgccgtcacaggcctccttggctacggttcgtcttttaatgattcgtgcgttttttaaatacttgtcgatgcgcatgcattctcctttaaaaaaagggcccttcagggcccgtggattatttattgaccgattcttttaatgccttacctgcgcggaagaccggagccttcgatgcgggaatcttaataacttcttccggatttctcgggtttctgccttcgcgagctttgcgatcgcgaacttcgaaggtaccgaagccgactaattgcactttgtcgccttcagccaagctttcttcgatggtggacaagaaagcgtttaatgcgttttcagcgtcttttttggataagttgctcttttcagcgatattggaaataagttcagatttgttcatcatagcctcctaaatatttttatgttcgtcgccttcatcggaaagggcgtcggtgagccgaccaagggccgtagccaaggcgctctccgcatcaattccaagatgttcggcatcgatcaacagtttgataagtccttcgacgattcgtcggctgtcttcatccatcccatccaaaacagagaaatgaagggcctctttcggcaaacgactcaggattttctgcccccgcatgatggccggcagtccctcgtaatgacgaagtttctctgccaagctttgctcgccccgctccttcgatttcatggcttcccaatcactcgccccgcctttaaagacgtggggatgacgacggatcattttttctaccagagcttcagacaaactcgccaacgtaaaagtgccttcttgcgccgccaattcggcgtgaaaaacaacttgaaaaaggacatcgccaagttcttcttccatggcgaagtcatccttacaatcgatggcataagccgcttcgtacgcttcttcgattaaatgggccttcatgctctcgtgggtttgtttcccatcccatgggcaaccctccgggccgcgaagccgtcgaatcaatcgtataacgtctttgacatctttgtacgcgtcggtggcgggaataaagaggctggtttcgtaaccgtagtcgtcgaagcgatccagcatatacacgggccgcttctcgacaaaggccttgtcttcgtgcccggcgtgagagaggacgaaaacctcgtgctcgtcgccgtacagctcggccagggccaacttcaactcccctgcgatccgaagattatacacttgggtcacgatggtgtccacgtgcaaatcaaaatccagatcggtgaagtcgtcgccgttaatgatcttcatgccgtcgatgggatctttctttaccgccgccagtaccggctcgataaagcttaatccgtcgacgatgtcgatgctcgggtcctcttcgagaagatagaccaccgtcttttccgcgattaaaggatgaccggggacgaaataactgatatcttcggtcttcgccgcttctaaaagatcgtcggcgatggcccgatagatggcgtcgaaatcatccaaggtctcgtacaggtaatcataacttttgtaaggaatgtgatgggagtgaaaatacgcaacggcatcgtgcgcttccgtcctgagaaattttttcgactcgtcgtgaatggcctccaaagcttttaccgtaaggtctttttcgttggtcggaccgagaccgacaattcgtaactttcccatgacgtcccccttttaccttagttattgtactattcacggcggcctttgtctagttaaaaaaggattttttagcccaatgaagccatttatacggcttttcatcctttccttgtatcatttgtaaaaaaacagcccgtctcgcgacaagctgtttcttttgatcgatgatttacttcttttcttcttttgctttttttgcttcgcctttggcttggctgttttgtgccttggcttcacctttggctttatctttaggcgcttcggcttttttcaccggttcgacgggaatgtctttcgccgtgttcaccgtgcgtttaaccttggcttttttctcgagcttttcgttgtatgccttgagtttgtcacgaatgaccgcttcttttaaggcgtctttcgcgcccttgaaatcgctggtgattttttcaagcttgataatgtggtagccgaattgggtcttgacgggatcggaaatttcgccgggtttcatagagaagactttttcgtcaaattccttcaccatttggcccggtgtgaattgccccagggaaccgccgttttgtccgctgcctgtatccaagctcttttccttggccagtttcgcaaagtcggcgccgccgtccaattcttttttaatggcttcggcttcttctttggtcttgaccaaaatgtggctggcttcggcagttttaaactcgtctttgtgcttgtcgtagtaagcctttaattcttcttccgtgggttccaattccttcagcattttttcttggtattgtcgcatgaggagattggtcttcatgtattttttcatttgatccacggttaagtcgttttctttcagggcgtcttgcaatttttcttcgccgccgtacatatcgaccattttcttgtattcgccgtcgacatctttgtccgtgatcttaatgcctttttcttcggcatcttgtttgtagatttcgaagcgaaccaaattgtccagggtgttttgacgcataatttcgcccatggtttgtttgccgtcagggctcttttgcatgaggaaaccgtcgccgtattgtgccatggcttgtttagcctgcatcttgtattcccgttcgtaatcttcaatggtaatgggcttgccgtttaccgtggcggcgacatcttttttgccgcaaccggttaagagaaccgtcgctgccaagcagacgacaccgatttttttcaatgtagttttaatagtcataaatatcctttccttacttttcagatcttcataccattataacaaggaactagccttttcgtgtgtgcgatttgtgtattttcataagatccaggactttttctacatcgtccagggcatttttctccgcagaaaggcgaatgctgtgttctgcagccatggaaaagaccaatcgcttgccgaagacgctggtaagttcgtttaaaagagacaggtccagttcgtagcctttcacgaagtggaaggtgtaggtgtcgcctttttgctgaatggtttccacattgagggtggaggccatgtggcggatcttggcgagatggatcagttgcaagacggccttgggcggctcgccaaaacggtcgatgagctcgtcgataacatcccgcacgtcttcctcgtcggcgatgacggcgatttttcgatacatttccatgcgctgggattcgtctttaatgtagtgcttgggaatgtaggagtcgattaacacgtccatggaggtgtccacttcttccacatcttcttcgccctttgcgcggcgcacggcctgtttcaagaacttaatgtagaggtcgtagccgatggcgttcatgtggccgtgttggctttcgcctaagatgtttcccgatccgcgaatttccaaatcccgcatggcgattttgtagccactgccgaattccgtaaactcgcgaatggcggcaaggcgcttttccgccacttcggaaatgctggcatcccgcttgtaggaaaagtaggcgtaggcgatgcgattgctcctgccaatgcggccacgcaattggtagagctgagaaagccccaggcgattggcctcccacacgatcatggtgttggcgttggaaacgtccatgcccgtttcgataatggtggagcaaaggagcacgtcgatgtcccggttgtagaattggagcatggtgttttccagctcccgctcgcccatttgcccgttggccatggcgaagcgggcctcgggcaccaagtcgcgtaagtcgccgagcattttttccatggagcgcacccggttgtagacgaagtagatctgcccgcctcggtccagctcctttaatatggcttcacgaatcatcatgggattgtattccaccacataggtttgcaccgggaagcgctccccggggggctcgtcgataacggacatgtctcgaatgcctgcgagagacatttgcagagttctcggaatgggcgtcgccgtcaaggtgagggtgtccacattctcttttaaaagcttcagccgctccttgtgccgcacgccgaagcgctgctcttcgtcgataatgagaaggcccagatctttaaacttcacgtctttcgacaagaggcgatgggtgcccaccacaatgtccacggcgccgatcctgagccgctccaggtcttcttcctgttcttttttcgagcggaagcgggagagcagggccagatccacggggaaattggcgaagcgctcccgcatggtgttgtagtgttgctgagcgagaatggtggtgggcacgagaaaggccacttgcttgccgtctaagaccgccttaaaggccgcgcgaagggccacttcggtcttgccgtagcccacgtcggcgcagagcagtcggtccatgggcttggcctcttccatgtccttttttatctcttccgccgcttccaattggccctcggtttcctcgtattgaaaggcggcttcgaaatccttttgccagggctgatcctcggtaaaggcatagcccgccacatcttcccgcttggcatagaggcgtatcaaatcctccgccatttcctccacgctgcgcttggctttggccttggtgtttttccacgtctgggtattcagccgattgatcttcaccggcgcatcgtcggaggcgatgtagcggtgaatcaaggccatttgatccatgggcaaaaagagcttgtcgcccccttggtaaaacagactgatgtagtcccgccgtatgccctgcacttccaaattggtggttcccataaattttccgatgccgtgcatttcgtgaaccacgtaatcgcctacggacaagctccccaggtcgatgacgtcttttttctttcggcgccgctttcttttttttgtttcgccgaaaatttccgtggcatttaagaggacgaagcggtcttcttccatttcaaagccgccgtgcacgtgaccggaatcaaattgtatcaccccgggcattaagacatccttaagggccacgggttcgaaacccatgtcccgcaccgtctcttccaggcgccgggtcttctcctcgcttccccctaggagaacgacggaatagtctctctccaggtagcgcttgatttcttctttaaagtggcgcatgcggccgccgaaactggtgacggtcttcacattgaaattggcgatgcgcttaagcttcaccttggcaggtgcccgcacaatgtggcttgaataaatgacatcccgcgcagccatatctccctcgatggtgtcgtagtcgatttggatggccaaatgggattttaaaagctccccggcctccgccaaatcgcttagggtgtctaccaaagacagctcctgcttctctgccacttccctcatgcggcgaggctcgtcgacaaagatgaggggcgtttcgttaaagtagtccacgaccgaagcccgcgcattttccggaatatagggaagcaggagatccgtgtgcgacaaaaaactgcggtctttcagcttctccacaaagggcatgaatttttcttccgcccgctcttgggacacgcggctcaatttttttattttcttcagatctttttccatggcggcggcgattttatcccgcagggtgtcgtcgaaaatcacatcgtgcacgggaaaaatttccgccacgtccacatcttccacggagcgctgggtctcggggtcgaagcggcgaatggaatccacttccacgtcgaaaagctccacccgatagggatagtcttgtggcgcgaaaatatcgatgatgccgccacgtatggaaaattggcccatgccttcgacaaaatccacccgcttgtagcccgatgccaatagcttttgggtgagggcctcggtgtccacctcatcccccacttcgagagaaaaggctgccttttgtaaataggcgggctcaaggaaaatgccgcccagtgcttccggcgtggtgaccaccaccttcgcgcgaccgtctagcatggcctgaagggtcttcaacctcgcgcttaaaagctcgttgcttcccgcatctcgctggaagaaaaacagttcccgggcctggagttgatagacgccttcctcagcgtaataagacaagtcctccgccaatttctttgcccgggccaggtcgtaggtgacgaggagcacggggcgggcctgatccttaacgatcgtatccacggcaggggcgatggccgcctccgccaggccgtagcagcccatggggacgtctccctcgctcagcccttccaatacctgtcgaaaggcggggttctttgaaaaaagctcattgtaaatacgcgtcattttgcctcctaaaaagcagccccttggagctgctttctactttccgttatagatattcatggcggcatccgcgccctcttttataaacaaaagaatggcgtccttcgccttgtcaatggtggcatccatgattttttcctcctcgccgtgaaaggtgctgaggacgaaatcggccagatccatatgaggatttttctttcccacggcaattttcaggcggggaaattgatccgactgcacttggtagataatcgacttcagcccgttgtgggtgccggcgctgccggattttctgaggcgaatggtgccgaaggcgatgtcgatatcgtccaccaaaacgagaacctcttccggcggtattttaaagtaatccatgcaggctctcaccgattggccggactcgttcatataggtggtgggctttaaaagacgcaccttctttccaaaggcgcgcccttccccgtaaaggcctttaaatttaatggtgtttacgggaatatttaaagcgtcggcaacggcatcgatggccataaagcccacattgtgtctggtgtttttatagcgatctccgggatttcctaaaccgacgataagcatattacacttcttcgaagatcttgctgatggggcgatcggtgttgatccgcataatggcgttggcgagaatcggtgccacggatacgatgtcgattttgtcgatgtgtttttcttccggcaaggcgatggtgtcggtgatgacgaagcgttccatgacggaattgtcgatgcgctcgatggccggtcccgaaaggacgccgtgggtggcgcagccgtagaccttcttcgcgccgtattctttcagggcgtctgccgctttgcaaaccgtgcccgccgtgtcgataatatcgtctacgaggatgcagtctttgccttcgatggagccgatgacattcatgaccacattttcgttggctttcggccgtctcttttcgatgatggcaatgggggcgccgtttaattcttcggcaaatttacgggtgcgggtcacgccgcctaaatcggggctgacggcgacgatattggatgtatcgatgtgttctttaaagtatttagccaggtagggaacggcggttaagtgatcgacaggaatgtcgaagtagccttggatttgaccggcgtgtaagtccatgcagatgacgcgatcggcgccgctcacggtcattaaattggccacgagttttgccgtaatcggctctctcgcgcggacttttctgtcttgacgggcgtagccgtaatagggcacgacggcattgatccgaccggcggatgcccgcttcagggcgtcgattaaaattaaaagttccattaagtgatcgtttacagggcccgaggtaggttggatgacaaatacgtctctgccgcggacggaatccgtaatgtcgatggcgatttctccgtcggagaattgtttgacctcgcaggcgctttgtttgatacctaaaatcttacagattcgttccaccaagggctggttggaattacccgcaataacgacgacttcaccgtgattgttcatactagctatcctttctccggttccaaccggcgatcattctctgttcacttctttctactgccaaacttccctctgccacatctttcgataccgtgcttccggcggcgataaaggcgccttcgccgatggtgataggtgccaccaaattgacattggatccgataaatgcatcgtcaccgatggtggtgcggaatttttccttgccgttgtaattgcaaaagatgacgccgcagctgatatttacattttctcccacgtcgccgtcgccgatgtaggccaaatgacccgctttggttcccttgccgatatgagaattttttacttcgacgaagttgccgatgtgtacattttcttccaacacgcagttggggcgcaaatgggcgtagggccccatggtcacgccgcggcccaccacggatttttccacgacggatgagtcgatcaccgcgccgtctgcaatggtgctgtccacgatgcggctcgcgccttgaatcacgcagccttcgccgatggtggtctcgcctaccaggtggatgctcggccctaaaatggtgtcgcgaccgattttgacgccgctgtcgattaatgtggaggcgtcgtccaggaaggtcacgccgttttccatgtggtatttgttgatgcgacggcgcatgattttttcacaggcggccaattgcacccgggaattgaccccgagcatttcttcttcgtcgcaaatggtaaaaccgccgattttctttccgccgtctttaagcatttgaatgacgtcggttaagtacagttcgctctgtttattattggaactcaagttgccgatattttcttttaatgcccgtccggtaaaggcgaagatgcccgtgttcacttccgtaatggctttttctttgtccgtggcgtctttttcttccacgatgccagcaatggtggagtcttggtcgcgaatgattcggccgtagccgaagggatcgctgaccacggcggtcagtacgcaggcgtcaaagtcgtggctttccacgaaggcgcggaatctggcgatggtttcttccttaaacaagggcgtatcgccggtcaatatatagaccatgtcttcgtcggaaaattcatccatggcacagctgacggcatagcccgtgccgtaggggacgccttcgcccagggtttgctcgataaacgtaagcggcgcgtctttaaagtagtccatgacatcgtcttttttatggccgacgatgaccacggttttgtccatggcattggtgatgcagttgtccaccacataacttaatatggccttacctgcaactttgtgcagcaccttgggcatatcggatttcatccgcgtgccttcgcctgccgctagaataattgatacattcactcttacacctcactcgtaatccttctgggatctattatatcgaacaggacaaattctcacaacttttcttcccataaagaaacggcgtgcgcaaggcccgccgcttcgggtattttacttctttttcaggttccctcgatgttataaatcgatcttatctaaaatgcctttggcctctgcgatcaccaggccgtaatttgtgacgggaacttgagcctcctcgactttggccacccgtgcctgtaccaccggccgctgaaacatgcagctgccgcacataatgattaaatcgtagtcgcctacattttcgggaaagctcagcccccgactgaaatccaccgtgatctcatcgcccagtcgctttcggagcatggcggggattttcacccggccgatgtcttcttccttcggcgcatgggtgcaggcttccgccatgaggattttcgcatccggaggcaagctacgcaaggtctttgcgccacgaaccatggcttcgatgtcgcctttggcacgggcaaataaaatggagaaggatgtgatctttgacgatgccggttttttcttgtacacttccgaaaagacttgggagtcggtgacgatccaatccggcgcctcggccagtttttcgatggcctgatccatggtgttcaaatcgcaaatggtggcggtgagtcctttgtcgatgacttccctcaaggcctgtacctggggcagaatcaatcgccccttcggcgccgattcgtcttggggcatgacgaagagcagatgccctcccatgtccatgccgtcgaataggcccggggctttctttttttctttaaaaaggtccgtgagggcgtttaaaatcacattccgctcgggaaaaggacgattcagttttaaaaccggcagatcttttttcgccaagggctccaaaatagcgtcgcccacctcgccgattaaaatggcgccgtcgatttcatctaccactttcatggtgcgggccacgcgggcttcgcccagctccgtctcatcggcggtgcctgccgtgtcgataaaagtcaccggccccagaccgtctacttccatgttcttatacaccggatccgtggtggtgccggctttaggcgaaaccatggacgtggtttgctccgtgagcaaattcatcaaggtacttttgccgctgtttgtctttccgaaaatggcaatgtgcagccgaaggcctctttgcgtttccatatcagaacctgaaatcccgctcgccgccttgaatgcgcttcacgtattccgcggcctttactcttaaatcgtctcgttccacatcttttaagaagtcgtggattttttcttcccctaattcgcgggtgctaccggcggcgtagtcggagaggtattcctgcagcgtcataatggcgttgggttgacagaattgggcgatttggaagctctttacttcttccataaaggtttcgccggtacgccccgcccggtagcaggctgtgcagaagctgggcagatagcctaaatccaagagccagtgaatgacttcatccaagctgcgggagtcgtcggtatcgaattgagcggagttgtcttcttctctgtcttcatcgtagccgccgacggaggttttggagccgccgctgatttgggagacgcccagttccaatgcctttctgcgcatttctttgctttcacgggtggaaataatcatgcccgtgtagggaacggagacgcgaatcaaggcgacgatgtcttcgaaaatatcgtcgggcacgccgttttcaaattcatcgggatcgatgtcgtcggcggggcgaatacggggcacggaaatggtgtggggaccgacgcccatgtaggcttccaagtgttccgcatgcatcaattggcccacgaagtcgtagggataattgttcaggccgtacaaaacgccgaggcccacgtcgtcgatgcccccttccatggcccggtccatggcttccgtgtggtaggcccagttggacttcggtcccgtcgggtgcagggcttcataattttctttgtgataggtttcttggaaaagaatataggtgccgatttccgcttctttcagctttctgtaattttccacggtggtggccgcgatgtttacattgacgcggcgaatggcgccgtttttatgtttaatggagtaaatggttttaatgctttccaagacgtattcgataggattgttcaccggatcttccccgagctccagcgccagacgcttgtggcccaagtcttgcagggcgatgacttctttttcgatttgttcctgagtcagtttcacccggtccaggtttttgtttttgtagtgataggggcagtagacacagccgttgacgcagtagttggacagatacaggggcgcgaagagcacgatgcgattgccgtagtatttctttttaatttctctcgccaattcgcggaaagattcgcgaatatcttccagctccgacattaaaagaaccgccgcttcccggtggtccaagcccttcatcttccggcctttttcaagaatggcctcttgcatggcgcggttggtgcgattcttgttggcctcttccagcgtggccataatttcgtcgtgattaataaattcctctgcctttgcagacatcttgttatacataatggttctcccttcccgtaaaatctcctcgactcatcactatttcataacctaatttggcgatttgcgccttcagttcccttaaattttccgccgcttccagggcaaaggccgccttgttgtcgtaaagggcgtagctttttcgcacccgcgtcggcgacagattgggcataaacacattggctccggctaaaatgccccgattgcgtccgtcctcggccagggtctgcatggcggtagtagacggaatattggccgtgggaaacagcagacgcaaaatggcgatgcacatggccgtcatctccacgctgccgttttcaaaatcccgaaaaggcgtggcatgatgacgcacatagggaccgataccgatcatggccggctgaaattcctgcaggaacataaagtcctccactaaattttccgtggtctgataaggactgcccaccataaagccgcttcccacctgatagcccaaagcctttaaatccatgaggcatttcagacgtttttcacggtccatctcgcttggatggagctttttgtaatgctcgggattgtaggtttcgtggcgcaacaaaaagcggtcggcgccggcttcttttaagcgggcatagctttccatgcttctttcaccgacggaaagggtgatggcacagcccggctgaatctttttgattcgccgcacccattccattagccgctcgtcggtaaaataagcatcttcgcctccttgaagaacgaaggtttgaaagcctgcctcggcgccgacggccacggatgtttccaactcttccgtggtgattcggtagcgttcgacctcgtcgtttgcccgacgaatgccgcagtagtagcaattgttatgacaatagtttgtaaattcaattaaaccgcgcacgtaaatttttttgtgaaagtgcaggtcggtaatggcgcgcgccttttcaaacaccgcctcttccactgcctcgcggttttcgagtaaatagcgaatgtcgtctcgtccaagtccttgaccctcatctacttttctgaataattcctgaatcatagatctccggccagcgtggtacgcacagtgacattgtccagcatgcccagttttcccgacagggcattgattctatcttgtttgccgtcgacgacgacactgataagcgacaattcgcgtttcgggtagggaatgcctaatcgtcccacaataatgtcccgctcctcgtgtaagagatcgttgatgctcttaatgatttcaccggagccggtctcgacgattatggcgatgattcccaatttttcgttcatagacacctcctacctcttcctcaaggccgtacctctcggaaaaggaacctattctacttcttacagtcttcattttagcacagcagaggcgattcgccaccctgtgagagaaaatttagatatttttttcaccaatccgtcttcaattggaatgccccttccatttcgccatcaaaaaagagccggcgatccgactcttttcatgcctatggtttaaaacatcatttggttcacgccgatgccgtcgttgaacgttcgatcgatgacaccctttatcgggcgaatgaaaatttccgccgtgacggaaatcaccgccgattgcaagtgcccaccaaagacgcggccttccgtgttccctaaatttatgtgggcatgaaggtaaggcgcaccatcttttctcgaaagatttccaaccagcgaagtgacctcaaagggctctttcaacgggatgtcgttgtatttttttgccttcgtatccataattccgaccactacatcgtcagcggcaccgaggccgtagaccgtggccgcctgaatattttctttttcagccaagtcgagaatgctcgtgcaaatttcgtcgccggggtccaaacgcagggcaatcatgccgtcatcaaatactttgtaatccatctttttctcctttacttgtttcgcttatagggaatcccgttggcgctggggccgcgggcttcgccgacaaagacgaccatggcgaacatggtaatgatgtagggcagcatattcaacaagtccggtgccactttcaatgaggttgagcccatgaagataaccaaaccttccgctgcgccgaagaggagacaggccaagagggtggtgtggggtttccatccgccgaaaataaccgccgccaaggcgataaagccttgcccggagatcagggtttcgcggaaattggccaccacggcaagggacaagctggcgccgccgagcccggctaaaaagcccgaggtcaagacgccgatgtatttgatcttatacacgtccacgcccaaggtttccgccgcgtgggggtgttcgccgacggagcgaatccgaaggcccagcttcgtcttgtagaggacgaaatagaccagggccacgacgataaaggcgatgtagaccgtaatgtattggccgaaaataatgtccggcgcacttcccgagggaaagaggtggtttaatacgcggggcattttgttttttaagggaatgggcttggtcatggccgcgccgtcgaaaaacatgcgggcgaggaagatggcaaggccgggtcccaaaagatttaatgccgtcccgctgaccacgtgatcggcaccgaagtgaatggtggcgatgccgtgtaagagggcgatggccatgccgccgaagccggcggacaaaaaggcgatccagggattgcctgtgtaatagcccacggtggcgccgaccacggcgccgatggtcatcatgccttcgagaccgatgttgacgacgccggtgttttcactgacgacgccgcccatggccgtataaattaaaggagcggcgtaaaggagcgtaatgcctaatatgccggcaaagctcataagaagattatccaacttgttcccctcctttttcttttttcgatgcgaaacgcgtgcgaatccagtccataaattgcggcatagcaataaacaggacgatgatgccgataacgatgttaatgacttccgagggcgtctttagcgcggagtttaatttgccgccgccgtagcttaaggccgcaaacaagatccccgagggaatgcaggcgatgggatggttggccgcaattaaggacacggcgatgccgttaaagccatagccctgttgcgccgccaagaggccgatgttttgcgacacacctaatacctgtaccgcaccggcgagtccggccaagccgccggagatggccatggaaatcatggtgttctttttaatgtcgatgccgccgtattccgccgcaaagcggttgaaacccacggcttttaattgatagcccaaggtggttttctttaagataaaccaggccaagacggcgacgatgacggcgatgaaaatcccccagtgaatgggcggatttaaaatgccgcggagaaattcgttgtttttcagcatggcgcgtccggcttcggagcgtttccattcgtttaaaatgcgaatgcttgccgacggctgaatagtaaaggaatagttgctgtcgggctttcttaaaaaggctttggtaagcatataattgctgagataaaaagccacccagtttaacataatcgacgaaataacttcgttgacgcctcgcttggccttaaacaaacccacgagaccgccccacagggcgccgaagagcatgccgatcaacagggccacgatgccgtgaatcaccggcggcaggtggagaaccaccccggcggtaacggcggcgaggctgcccataatgaactgaccttccgcgccgatattaaagatccccgtttgaaaagcaaaggccacggcgatccccgttaaaataatgggcacagcttccacaatggtccatgagaaaaatttcggcttaccgaaagcgccgaggatcatgaccttgtaggcctccaggggattgacccccaccaaggcaaagataaccgccccgaccaacaggcccaagaggatggacatgcaggtatagtagagcatttttttattcactgtccacacctcccgccatgtagtagcccagtcgtttttgatccgcttccccttcgttgaaggtctttgtaatggctccttcataaattatgccgatgcggtcggaaagactcataacttcatctaattcaaagctcaccaaaagcacggcgcgccccttgtcccgctgttgcaccaaaaattgatggatgttttcaatggcgcctacgtccaagccgcgggtgggttgtgcggcgattagaatgtccggatcgtcgtcgatttcccgggcgagaattaccttttgttggttcccgccggacagatcgccggccagatagcggctttttctcggacgaatatcgaaagattccattaatttatccgtatgctcaccaatgggggcttcctgcaaaattcccttggaggaatagggcgcttggtcgaaactgtgaagcaccatgttttccgccacggtaaattcctgtaccaggccccgtttgttgcggtcttcgggaatgttgttcatgcccgcctcgcgaatggtcttgggcgtggcattggtcacgtccttgcctgcgatgaccaccttgcctgcctcgacttttctaagaccggtaatggcttctaaaaattcgctttggccgttgccgtcgacgccggcgacgccgaaaatttcacctttacgaacttccagattcagtcccttcaccacttccacgccgcgaacgtctttcacgtggagattttcgatgtgtagcgccacttctccggcgtccacgggctttttattgaccttaaattcaatggcacggcccaccatcatttcggcgaggtccgcctccgtggtgctcgctacatccacggtgtcgatgcgcttgccccgtcgaataatcgtgcacttttccgccaacgccttaatttccttaagcttgtgcgtaataatgatgatgctcttgccttcggcggccagggccttaatgatttcgatgagctcttcaatttcctgtggcgtcaaaaccgccgtaggttcgtcgaaaatcaaaatctccgcatcccggtaaagggcctttaagatctctacccgctgctgcatacccacggaaatgtcttcgatctttgcatcgggatcgatttttaaaccgtagcgattggaaagggccacaactttttcacgggcggtttttttatctaaaaccacgcccttcgtcggctcttcgccgagaataatgttttctaccaccgtgaaaggctgaaacagcatgaagtgttgatgcaccatgcccaagcctttttcgatggcatctttcggtccttggaaattcaccgattccccattgatcttgacttcgccgaaagtaggcatatacaagccatataaaacattcatcagtgtacttttgccggcaccgttttcgccgaggagggcgtgaatttcgcctttctctacgaccaggtcgatgccgtcattggctttgaaatcgccaaataatttcgttatcccgcgcatctcaacggccggcgcgagtttattctcaaccatcattacccccttcatctattgagtcaattatacactatggacatgggctttttaaaggcataaaaaaagagggacgcgccctcttttttacgatcaaatttatttagcttcaaattttttgtagtcttctgccgtggccggaaccttgatttcgcccttaacgattttttctttaatcgccttgatcttgtcgagaatttccggttttacattcttgtcgctggaaggtgcgatatcgacggtgtcgccgtctttaagaccgtagctcaggtttttgccgccggggaattcttcgcccttagacataccttcgagcactttgtaaacagcgctgtcggcacgtttcatcgccgaagtgagtacattgtcgggtgcgatgtcgttttgatcgcggtctacgccgataacccacttgtcttggtcttttgccgcttcgataacgccgtcgcctgcgccgccggatgcgtggaagatgacgtcgcaaccttgttgatacatattggttgcaatgctcttgcccttggcagcgtcggagaagttaccgacatattggctaaccacatcgaccttttggcctttttccttggctgcttgatccacaccggctctgtagccatattcaaatacttgaataaccgtggattcttgaccgccgacgaaaccgactttgttggattcggtagtgagaccggcaatgtagccgacgaggaaggaaggttcttccgctttaaattggatacctgccaagttgtccggtgcattttcgtaggtatagtctacgattaagaattgcacgtcgggattggcttctgcggcttcgagcatggcatcgcctaagttgaagccggcggcgactatgacgtcgtttcctgcttcaagcaacgtttcgatgttgggcgcatagtcgttggcttctttggattcttggtaggatacgtcgaatccgaagtcgtcgtggactttttgcagaccttcccatacaccttggttgaaggattggtcgttgataccgccttcgtcggtgacgaagcctacttttaattttttgccgtctttatcgccggcatcggctgcggcattgttagcagccttattatcgttagctgctttgtcgttggatgcgccgccacaggccgtaagcacgaaaatggacagcatcgtcactgcaagaagtagcgatctttttttcataatttcccccttaatttgatctgactttattataatatgcttcatacaaaaattcaacgagagaaggttttccgttaaaaagagcgcaccgaaaggcacgctcatgcattatagataaaatcccttgggtacggcgaagagataagtggcgataagaaagaccacaatggccatggccagcgcctgtttaaagtccgccgtctttaatttcaagcgacttcttgccattaacttaaagagcaaatagcccacaaaggccaacacgggcatggcgatgaaaatgccgccgttggtcggcgcctttaagcgaagggccggaagggcaaaggccaacagcatcatggcaacgtagaccgcggggaaaaggcgccgccggtccaaaagcaagatggcgaggccgagcaccgtggatgcaatggccgcgacaatggcgacggttctcaccatatgggcgcggctcataacgccttgatccattagctccaaagtattgatgtagatgccggattgatttttcgtcgacgtttccggccggagtcctttgtcttcaatgcccaaagcatcggagaatttatccacttttgcattggtcaaaaagacgccgatatcggccatggttcttcccgtatagacggaaaccgtggcgggatccgtgacgacggtaaaggcataatcttccacctcttcacttaaagggatacgcatttccgaggtgggttggaaagtgagcttctccttgctcagcacttttttcagctgtaaattgtcgtaaaccgccccgttaatcttatcgtattcgcccttgagcgttaccttgctcttggagccgttggcacctttcggcaaatacacattgcgcacgggtacgcctaaaacacgcacactggtgtcttttccctgatactggaattttacatcgtaacgatacaaaaccttcgggccctttacgatccgccgggtcacctgtaaattgtcgatgcgggcggggtcgtcgaagatcaagccgtcgaaggcggcatttttttcctcatccgacgacaacgccactttatccatcatcaggggcgtgaacgtgagtagaaagcacaataataaaaaaacaacgaatataattccatttttgaattgtttctgcatagtcatcccccttatgcgtactgattttttcttatcataccatatactttcacatttatcaccgataaattgaaaaaccttttcacgaaaaggcggctatgctatactaaaagcggaggttgacatgacgatagaaaaaagcaaattcttaaatatactgaaagctgtagactacctggccatgctcaccatgataatattggcctttatccatcccttctttcccgtctacgacgaggcgggcaagcttatggaaaatgcggcgctccttcgaatcgccgtggttatcgccgtcttatttgtcggcatcccgattttcagcaaggaaattaccgccattcgtaaaaacaaaaagccctacgacttaaaaaagaaaaacaacacggtgtttttgcccaaagtcaatttctttttggccgccctcttcgccgtggccaccgtcgtctttgtgcccatggccatcgtccattacgccgacaaaggcccgcagtggcaagcattttacgccctcttctacattttcgtctacatcggcatcggctcccgcctgcaactgaagccggggctttttccgcaaaaaaagattaaatcctgattaagtaaaaagctcggcaaaggccgagctttatccccgaaaggggatttttttatttcttatcgctttttaaagggatacacgctgtccaatgcttcttcgatgggcgcgttggcctccaccagtttgcggtaggtgctcatggctttcgtgtcgccgtaaaggataacgccggtgactttgccttcttttgcgtagaggcgatggtgttcgtcgccttcgtcgtagaagtagatgtcgccttcgtcgataacgcctgcggagaagatttgaacggtgtccagatccagcttcgtgtggctcttcggatcttcgtaggatgcgtcgccacctgccatattggcacctgccactttgcccatggcgcgagcggcgggccaaatgcccagcacgcggccttccacttccgccacgtcgccggcggcccacacgttttcaatcgttgtttttaagcttctgtctacgaccacgcctcggttgatttccaggcccgtgtctttaaacagggccgtattcgggctaacgccgacagagagtaagaccatgtccattttcgccgtggtgccgtcgtcgaaggcaatggcttccaattgtttgtcgccgataaaggcttcggtgttttttccgccatagaccataaagcccaggtctttcatttcttcgttgagcatcatgcccagttccctgtctacttggcggttgagcaggtagtcgctgcgattgatgatggcgacgacgtgtccactttgcttcaggctgttggccgcttcaaggcccaaaaggccgccgccgatgacgccgatcactttcgattcgtcgagatttttcaaatagctttgaatggcccttaggtcatggaaatttctcaaggtaaagatgccatcaatgtctttgtttttgtagggcggtacattggcatggctgccgtttgccaagaggattttctcccctttcaggcattcgcctgtttttaaggtgacggtcatggcgtcgaaatccaccgctgccgcttcgccgtctacattgacgtcgatgccgattttttcggcccaatcttctttatctaaatagggaacctccggggcatcttcccctaaaagatccgtaagttgaatgcgaaaatagggctgttccttttcgttacccaaaaggatcaagctgccttctttgtcgtgttttctgatttctttagccgccgtgacgccggcaatgccgccgccgatgatgatgtatttatatgttttcaatccttttatcctcctctattcactgcccgcttaccttgccgtgacttccgtccatattctatcatacacttctacaaaatcgtgtaggtcccgatacacctctaagggtggcagacgatcgaagtccggataggccacggggtcttctcgaagtgccttgggcagcaaggcgatggcttcgggaatgggcgtggcaaatcccacattgtgggtcgcattttgtgccgcaatgtccggtcgggacatgaaattaataaatgccatggctcccttcgggtttttcgattgcttgggaaccgcaaaggaatcgtaccatatatttgtaccctctttcggtataatgtattccaaggatttattttcttggcgcatcatggccgcatcgccggagtacataacggaaagggacgcatcgccttggctcatgacgtctcggccttcgtcggcgaggtaggcgtagaccaagggtttttgcgcaattaaggcttccttcgcctcttccagctctttcatggagcggctgttcatggaatagcccaaatatttcagggcaatggcgatggaatctcgctgggaattatacatgatgatttcgtttttgtatttcttatcccacaaagcactccaggaatccacgggctcttttacataatcgcggttcaccacgatgcccaaagtcccccagaaatagggcacgctgtatttgttcccgggatcgtaatccatgtttagaatccgcttgtccagctttttcatgttggggatttgatcgtagtccaagggaaggagcatgtcttcgcgaatcatccgctccaccatgtattccgacggcacgatgacgtcgtaggggtcgttggattttttcagcttcacatacaagtcttcgttggaggcgaaggtgtcgtagatgaccttgatccccgtttctttttcgaaggcacggatcgtggccatgtccatatagtcgccccagttgtagacgtggatggtctctttgctgctccctgtttttccgcaggccgtaagaaagagcatcgccactaaaataaaaatcgatagtcgcttcatattacacctctaaatccaccaggtcgatgtcccgcttgtttaacaggagcaagagcgccagcaccgccgcaaaaagcagggtagacaaggcattcatggagggattgatcccggttttcgccatggaatacagggtgatggacagattgctcacgccttgccccgtggtgaaaaaggaaataataaagtcgtcgatggacagggtgaaggccatgagggcgccggtagcgatgcccggtttgatttggggcacgatgacgtaacgcagcacttccggtgtttttgcgcctaaatcgtaggcggcttccacggtgtttttgtccagctgatccaatttcggcaacacggaaagaatcacgtagggaaggcaaaagacgatgtgggacagaatcatggtcaaaagcccctgttccatggccaaaaaaccgaagagactcatgagggcgatggcggtgacgatgtcgggatttaagacgggcaggtagttgatgtttaaaatcacggcctgactccgcttggaaaaggcccgaatgccgatggcggacagggtgcctaccacggtggagatcgccgtggccacgacagccaccaagaccgtggtgtaaaagctttttaagataatggggtcggaaaataaatccgtgtaccaatgggtggtaaagcccgcccacacgccgcgcaatttcgtgtcgttaaagctgaagacgataagcaccacaatgggcagatacaaaaataaaagcataagccccaagtaggcgtttctgattttatttcccacggcgacctcctttcgggcgcttttcgcctacgaggcgaaagacgacgagcataataagcaaaatagcgatgagcaccacggcaatggcggagccgaaggcccaattgcccgtgaggcggaattgttgttcgataatattgcccaccaggtaatacttgtttcccccgagaagggaggagatgacaaaggtggacagggccggaataaagcacattaagatgccgctgtagattccgggcatggataggggcaaggtgacttttaaaaaggccgtggccggaccggcaccgagatcctgtgccgcttccaaataggagcgatccattttctgtaaaatcgtgtaaataggcagcaccataaagggaagaaagttgtagatcatccccatgaggatggcgccctgattgtacatcatatcgaagggtcccaggccgagaaggtgaaaggctttgtttaagacgccgtttcgcccgagaagggtgatccacgcgtaggtcctcaagagaaaattcatccacatgggaatgacgaagaggagaatcagcatggagctcgtcttgggcttggtgcttgagatggcgtaggccgccgggtagcctaccaagaggcaggccgccgtagacaaggtggccaagaccacggagcgccacaaaatcctcaggtaaaggggttgaaagaaacgggcgaattgggccgtggaaaagcggtattcccccatgttcatggtgcccgcgccgttgaagctcataaacaaaaccaagaccaagggcaggacgataaataatacggcccagaaaatataggccgatgcgtagcgcctcatgcttcggcctccatgacgtggagattatccggctccacatagatgcccaccacggcgccgggctcccgcgccacggtggattgcaccatccacttctcgccgtggacttctaaaatcatttcgtagtgtacgcctttaaagacgatggaggtaaccgtgccctgcaggagatcgtcgcggcccgcttttaattccacatcttccggccgaataacgatttgcaccggcgcatctttttcgaagcccgcatccacgcattgaaattctctgccgtagaaagaaaccactttgtctttcacgaagcggccgtgaataatgttgctctcgccgataaaattggccacaaaggcattttccggctcgttgtaaatatccgttggcgtgccgatttgttgaatggcgccgtctttcatgaccaccaccgtgtcactcatgctcagggcttcttcctgatcgtgggtgacgtagatgaacgtaatgcctacctgttcctgaatccgcttcagctcaaattgcatctgctttctcagcttcaaatccaaggcgcctaagggctcgtccaaaaggagaatcttcgggtcgttcactaaggcccgggcaatggcgatgcgctgttgctgacccccggaaagggactgaatgtttcgcgtggccacgtgggtcagattcaccaattccagcatttcgaggacgcgattgtcgatggttgatttcggcattttcttcagcttcaaaccgaaggccacattgtcgtaaacatttaaatgaggaaacagggcgtatttttgaaacaccgtgttcaccggccgctcgtaatgcttgattcgaagcatgtctttgccgttaaagagaagtgacccttcatcgggctcctcaaagcccgcgataattcttaaaagggtggtcttcccgcagccgctgggcccgagaagggttaaaaactcgccgtcccttacgcttaaatcgatgccgtcaagcacccgggtatcgtcgaaagatttcttcatgtttttaatttcaattaattgcattccctgtcacctcctaaaaattcggcgggttactcacccaaaggaccgtcgcttcctcagacgacagattcctgaaaaaacagggggcatcgccggcggcataaatcgtatctttttcttccacggaaaacacatcgtcgcctcgacaaaaatccaatcgtccggataagacataggcgaaaaattcgccctcgaagggcgcgagaactttcgacgaacccatgggcgcgatgcgccacagggtgggctccatggcatttttctgcgcgttgggcacgatgtaatccacgccgtagcccgccgcgtcgtcttcaaaggtaaaggcgtcttcttcggaaaagacgatttgcgtctcttcctcgtctttgaaaaaagcctccggggagatgcccagtgcttctaaaatgtccataaatgtcgccacagaggggctggtgagatcccgctccacctgggaaataaagcccttcgtgagctcgcttcgttgggccagctcctcttgggtgagctgctgcacctgcctgagacgacgaattttttgtccgatgctcataatcaccactaaactttaaacttaatttactaaacaataatcgtattataaacgtcgcctttccttcggtcaatagattcgcccaataaaaaagcccgcacatggcgagcaatttcgtttacttgttttcgctgtaggctttggcgatggccgcgcccaatttcgtgttgttgtaaaccaaggcgatgttcgcttccaaactactgccgccggtgacttccagcacccgttgaagcaagaagggcgtagaggctttgccgaagatgccttctttttccgcatccgcgagggccttttcgatggcggcgttaatggtatcttcgtccatggcgtcggcttcgggaatgggattggccacgacaatgccgccgtcgatgcctaaatcccatttcgtcttcatgagtttagcaatggccgcgggatcgtcgtaacggtagtccaatttgtggccgcttcggcgagtgaagaaggcgggcatttcttccgtttcgtagccgatcaccggtacgccgaaggtttccaggtattccaatgtgaggccgatgtccaaaatggatttgcaaccggcgcagaccacggcgatgtccgtgttcgcaatttcctgcaggtcgcgggaaatatccatggtggtttccgcgccgcggtgcacgccgccgatgccgcctgtaacgagaatgggaatgccggcgagacgcgccgtcaacacggaagttgccacggtggtggcgccgtttttcccttcagcgacgatgtgggcataatctctcgtggagctctttacgatggcgtcggaggtggccataaattcgatttcgtcttcggaaaggcctaccttaatgcggccgccgataatggccgttgtggccggggtgacgccggcgtctcttaaaatggcttcgcagtgcttggccatttccacatttttcggatagggcatgccgtgggagataatggtggattccagtgctaccaccggtttgttttcatccaatgccttttgtacttccggggcgatgtccatgtactgctttaaattattttctttcataatgaatctcctttttctctttttcccattcttttgcatcaaagaaaggaagttcactttgatcgcgcttcagcaccatgcgtgatgcggccatggcaccgacgacggcatggtcaatctttttaccttttaccatctctgccgtcaacatggcgcaaaaggcatccccggcaccggtggctccccgaatggtcatggggctcgtggtgtagtggtacgtcgcctcgtccttaaacaagtaggcgccgtcggctcccgccgtaatcaccacattctccacacccatgcttcgtaaagccgcgccctgggtggcgacagcatcgcttccccggccgcttaacacctgcgcttccagaatgttacattttaacacatggatccgatttaagaaaggggcaaattttttcaccttcacggcgcttaccccgtccaccacggccttgatgttccaggagaaaatctccgccaaggtgtcttcccgcaaattggcatccacaacgacgtaggttgccccttcggccaccttgcggcgcgcctgtattttttcgggggtgagcttttccatgaccgccatgtcgtttaccgccgcgtgcatttcgccggcctgatccaaaagcaccaaatagcttccggtcgatgccccttcaaatgtaaaagcgtggtcgaaggataaattttccggcgcgcgagccaggatcatggccttcttgtcgtcgtcaccgaaggccgtcaccagctccgtttttatgcccaggcgggccacggtggcggcgatgtttctgccaacgccaccggggcttaattccacggcgccgggattggaatcgtgaagatccaaatgctcgtagggccttccgctaatgtctacattgcagccgccaaagaccacgacgtatttctcactcattttctccccctttcgccgcggttttgtatccgcttaaagcaggcacggcacagcggctcataactttccgtagcgccgatgaccacccggcccccttccccggtggtgcggtggctcacccaggcgtcgctgccgcagtgggcgcagacggcgtggtgcttttccacgtaatcggccacggccataatttcttttacgatctcaaagggatgggcctcgtaatccatgtcgagccccgcacagaccacggtcttcccctcgtctaaaagggtgtcgaaggccgagagaatcccttcggtctcgccgcctaaaaactgcacctcgtcgatggccaccacgtcggccttgtgctccgccgccgcttccaataccccggcgatgtcttccaccaccacggcttcaagcgatgtgttgtcgtggctcgtaatggcggagtggataaagcgggtatccagcgtgggctttaacaccagcgtgttgtagccggcgatgcgaaagcgcttcacttctcgctccaaactcgatgtctttcccgaaaacatactccccgtatgtaaaattaatcgtcccctgtactgatgcatttcttcctccttagaagaaaattataacacaaattttgccgattaaatcaccgcccgtctttgctcttttcttgcaatcctgcgtcccgtactatattctaataatggaaaattattcgcattttaaggaggttccatgcttcaaattcagcatttaattaaatattacggcaagaaacaaattcttcacgacgtgagttttgaattggatcccggggatatttgcgccttcatcggatccaacggcgccgggaaaaccaccaccattaaatccgctctgggcctcatttccttcgacggcggcaagattttcatcggcggccacgacatcgagaaagagcccctggaagcgaaaaaactttacagctacgtgccggacaatccggagctttacaaatttatgcgaggcatcgagtatttaaatttcatcgccgatatttttgaactggattacgaaacccgcagagaccgcatcgaatactacgccgatctcttcgccattcgcgaccgcttaggcgagagcatcgacaattacagccacggcatgcagcaaaagctcgccctcatcgccgccttgatccacgatccaaagctcatcgtccttgacgagcccttcgtgggcctggatcccatggccacgaaatccattcgggaaaccttcaagaaaatggcggcggaaaaaggcaccaccattctcttctccacccacgtcttggaagtggcggaaaaattgtgcaacaaagtggccattattcgcgaagggcatctcgtcttcttcgggcccacagaagaagtgcttcaaaagggcagcttagaggatctgttcatggaaaggatgcaaagccatgaacaagcttaagcttttaaatcggctggaacgaaagcgcactttcaatcaattcacccaagggaaaaagaaaaagggattcgccatttttatctacctcctctccctttggggctacttttggatcggcgggctcttgccaatcttcgcctccatggcgattttggattcaaaaagcgcagctttttccgtggcggaaatcttaaacgatggggggattctttcctccatggacgtcatggctttggtgtttttcctcgccagcctgatcatcgcctttattcagattcgaaccatctacttcaatgattttgaccagtccaccttgtggagcctgcccgtggatacgcggctcatccttatctcgaaaaacacggggcctaccgtgttcagcctgcccctgatcctggcctttacattgccttcggcgatcatcacttacgtgaccacggaatcgtttttaaaggcgctcctcgtcctcgtggtgtttttctgcgccaatcagctgggcgaatgcgtgggctgctttttacgcatcattctggcgaagggcaacaatcgccttcgcctgtcaaaaggtgtgaaaacttttctcggcttcgtcctcttcgtcgcctttatggtgggcttttacacggagctggcccgggattttaaagacctcgtcgtcttcctgggcttttataatcgcctgcccgcggcggcacggcccgtttcttacgcactgaatcaccatctgtggctcatccccctcttcattctcgtgacggggctcgtgtattggggttttctcaactacacggcgaaaaacttctacaccatcggggaaagcttggcccctcgagccacgatgaaggcggtgaaagagggcgactacaaggtgcgcagaaaatacgccgccctcattcgcaaagaacggcgcctctttttctccaacagctccgtggcctttaacaccttcttcggcacggtgcttcccgtgattctcgcggccattctcttcgtgcccgcagtgaaagaaatgtttctcgactttttaaacaaccaacccttcgtctcccccgatgcggcgatctttttaattctcaccggcctcggcgggatgatgaacctctccggcttcggcttttctctggaaggcattagcgcttacaacacctacacccttcccttaaaggggcagtcggtgtttctcggcaaactccttatggcggcgagcctcatcgtcccggcctatgtgatgacctggctcctcgtgcttgtgaatttgcggccggatgcggcctacctgcccttttaccttttgggcccactgagctacgccctgttaatcaacggcatctccctattcttcgactggaaattcgccaattacaactggaccaacccccaagagctggcaaaaaattcaaaacaatccttcttctccggcctcgggagccttttggtgagcttcgccattttactcatcggcgtcggcgtcatgaccaaggcgccccttctctacgccgccctgctcaccgccatttttgtggtgggcaatgtggtgctctatttcctcacccgagacatgaccgtctaccatcagtagaaggagtaaatcatgagcgaaaaaagtgcatccattctcctggccgccgtcatcatcgcccgggccacgagctactacttcattaaaatcggcatggaggggctgggcgtgtttaaccttctggccgtccgcttcttcgtcgccgtgctcctcttggcccttttgtttcacaagcggctccatcccatgaagcgaaacaccctgattcacggcacgatcttaggcgtggttttcttcgcccttatggcctttgaatttatggccctaaagacatccccctcctccaccgtgtcctttttggaaaacacctccatcgtcctcgtgccccttttaatcgccatcaccacacgcaccctgccgacaaaggcggccatcctcggcgtgatcattaccatcataggcgtcggctttttaacctacacccccggcgggtttgccctgacccgcggcgaaatcttcgccctatcggcggcactgagctacgccatcgtcattctgctcaccgcccgcttcgccgaagaagacgatccctttcatctgggctttttgcagattctctggatctttatcctctccaccctcgccgccttccttgcggaaacgccccgctggccggaaaatcatgtggaatggggcgtcgtccttatattggccgtcgtctgcaccggcttcggctttacccttcagcccgtggcccagcgacacaccacaccggagcgggccggaatgttctgcgccctgaaccccatgtgcgccaccatcatgggagtgaccctgctgggcgaaaccctatcgagttataaaatggcgggcattctctgcatcgtcattggcctcaccgtgcccatcctaatggagagcagaaaaaagaaacaactgcaataaaaaaagcaaacagccgctgccgtttgcttcgccggaccttcgggcccggtttttttattcgtaaataaaagtgtttgcccgttggatcaccacgtcttccgtgggcttatccatggaatttttttccactttggcgatggcatgaaccacatccatgccttccaccacttggccgaagacggtgtgtttgccgtcgagccagaaggcgccgccacagcttttgtagccgtcgatgacatcggcggtgtagccgtatcgttcgccggcatcttccatttggcggaggatgtcatcgctcacggccgggccctgaacgatgaagaattggctgccgttggtgttggggccggcattggccatggaaagggcgccgacgaggtttcggtagtcgggggtgcattcgtcttcgaagcccttgccccaaatgctttcgccgccgcggccggtgccggtgggatcgccgccttgaatcatgaagtcgtcgatgacgcggtgaaaaataatgccgtcgtagtagcctcgatccacgagggtggtgaagttttccacggctttcggcgctgcgtcgggaaaaaggcgcagggtgatgtcgccaagggtggtgatgagcttcaccatggtgtcgccggttttcggcgcttctaattgttttagcatattagtatccttgttcggtgaggacaatgacgccgtcttttgtcaccgccagggtgtgttcgtattggcaggacagggagccgtcgcgggtgcgggcggtccagccgtttttgtccatggcaatgggccagtcgccggcattaatcatgggctcgatggtaaagaccatgccttcttccaggcgcagccctcgattgggcttgccgtagtgaaggacttggggatcttcgtgcatttctttgccgatgccgtggccgacgaaatcccgcaccacggaaaagccgttggcttcggcgtgggtttggatgatgtgcccgatgtcgccgaggcgggtgccgggttttacaatgtcgatggccttatacaaacattctttggtgacggtcatgagttttttgccttcgtcgcttaaattgcccacggcgtagctccaggcggaatcggccaggtagccgtctacattgaccaccatgtcgatggtcaagagatcgccgtctttcagctttcgctcgcttggaaagccgtggcagatttcgtcgttgaccgaggcgcagatgctgaagggaaagccctgatagcctttttgttccgggtagccgccccgatcggtaatgaatttttctacgaagcggtccagctccagggtactgaccccgggcttcacttcgtctctgagggcgcggtgcacttggatcaagagatccgccgctatttgcattttttcgatttctttttcggttttaataattatcaatcttttacctcccgaacgatgtcttttaaatccacatctctcgacgcccacaatttcgcgtggggattaatggcgatggcacgctctaaatcccgaatcgccgccgctttttctcccagccggatatggctgcatgcgcgattatagtataaattgacgctgtttaggtttttgtcgatgccttgggttaaaatggcgatggctttttcaggcgatttcatgcgcaagtaaatggccgacatattgagataagtcggcgcatagttttcgtccagggccaaggcctcttcgtaggcggccagggcctcgttgtttttaaaggttttttggtagataacccccagattataatagccgatgctgtaagccggggacagggccacggcttttttcgccagggccagggcttttttatagtcttttcgctcctcgtaaatggaggccatgtcggaatagaccacgccgttttcgggaaccaatcgggcgcagcgctcaaaaagttccagggcgcgatctttgtagccgattcggtcgtttaaaagggccagttcgtagcaggcgctttcgtaatcggggtcgatcatgagcgcgtgttcgaaatgctccaccgcttccgcaatgtcgccttcttcttgcgcgaaaacccctaagccgtattccgcgccggcatagtcgcccaggcgctgaatcttgcggtaatactttgcggcctgtgtctttttgtcttcctgccaatagagatcggcaattgaaaagtacacatcggccaaggcttccttgttcggcgcaaagtccactgcctttaaataggcatttaacgcttctttgttgtcgcctgcatcaagaaaatctttcgctaagatctgataatttttccatttatctaccatcgtcgcctcccgatggtattataccacagttagcttcgtcccttgtatttcaaaaggctcatggcaatgacgacgcagatcaaggatacgcctacgtcagcgaagacggcaaaccacaaatttccgatgttcagcatgtttaataccacgacgaggactttgacgatgagcgcaaaggcgatgttgccgtagcaaatttttctggtttgtttggacaaatcgaagaggaagggaatgcggccgatgtcgtcgcctaagatgaccacgtcggcggtttcgatggccatatccgatccgccggtgcccatggcaatgcctacgtcgcttttggcgagtaccggggcgtcgttgatgccgtcgccgacgtagacgactttttcatttcgcgcgagagcccggtccagcgcctccaccttttcgccgggaagaaggccgccgacgctttcgtcgatgcccagttcatcgccgacggcttgaaccaattcttttttgtcgccggagaagaggtaggtttttaagaagccctttaatttcctcagcgcttctttcacgccgggcttcacggaatcggcaaaggcgatgcggcccagaagggcgccgtcttgcaccacgtagacggaggtcatggggatgctgttcagggaattgtccacgcccagttctttaagcatggcttcgttgccgacggcgagggctttcccgttcacggtgcaggcaatgcccttgcccgaaagttcacggtagtctccgggatttcccatgggcttcgctttttctagaatggagcgggcgatggggtgattggagtattgttccgccgtggcggccagggcaaggagttcttcctccgtgccttttaatacgtccacttgagccaaggtgaaattgccgtcggttaaggtgccggttttgtcaaaggcaatggcgtcggcttcggccaaggcttccagagacgtggagcctttaataaacatgccgtctttcgaggcgcggcccacaccggcaaacatactcaggggcacggaaagcaccaaggcgcaggggcaggagatgattaaaaaggcgcaggccttgtagacccacgtgttccaatccccggaaaaggccaggggcggtacaatggcaacgagtacggccagggccaccaccaccggggtatagatggaggcaaagcgagtgatccaggcttcggtcttgcctttattcagtcgggcgtcggctaccaggccttgtatcttcgccatggtggattcgccggccactttcgtgacccgcaccttaaaggcgccgtctaaggcgatggcaccggccataagttgggcgctttcattggccaaaatcggggtggattcgccggtcatgtgttgattggagatatggccttccccttccatcacttcaccgtcggcggccaaggtgtctccggcgcggagcacgatcacatcgccgacgacgacctcttccgccgcaacttcgatgagtttgccttctctttccacatgggccgtgtcttcatcgcgggccaggaggctttccacggagtccgtggcgcgatccagggcgtagtcttgcagggcttcgcccaggcggtagaacaagagaacgcccagggcttctccatgttcaccgatgtaaaaggcggcaatggatgcaatgctcattaaaacattttcgtcgaaggcttctccgttttttatgcccttaatggcattcttaaaaatatcgaagccggcggcgattaaaagaatcccccacaaagccgtttgaaagcggcctttatagacgaattgtaccaaaagcgccgccataatggcgcttgcaatggggaagagttcttttttcaggctgccctcttcatcttcttcgtctatttttttgccgggatttttttccacgaccacgacgccgtcttcgatgctgtccaccagttgttgcagctcttgtgtcgagatcccgccgtctactaccaaacgcttggaaataaaatccagcttcgcctccgcaacctgaggcaagtcgccgacgcgggcttcgattttcgccgcacagttggcgcaatttaaattctttaattcataggtgcgcatatatttacctccatttacatgattgcttgctcatgtatagtgtacctgcttccccttgtgatgtcaacaaaaaaagaagcgcccctcgacgctccttccttattctgaatcaattggttctattacagagaaattgtagccaccggttccaaaccctttacatcggccccttcgattaaggtccaggttttttctgtgcccgtgctctttaacatggcttcgtagtagtacatgacgacgccgatgtccacgtagctcttttcgcctttgctcttgtccagataaaggtcgatgttgccgtcttcttttaacacgaaacgccagggttgtgcattgacgtggctcggtgcgaaacgaatcgacgagaagacgtcgaacaagccgtagttttcgagatcggttaaggatgccggggtaccgacgcgatctttaaacacgattttatcgacgctgaggcgggggctgactcggtcttcttcaaaaacatcttgtttttcagctttaccgaagccgataatgtagtcgacaaattcgccgccttcgccaaacagggatttctttaagtccttgtccacatgggccgtggtaatccagcaggtacctaaattcttttcgatgagttccgtgttcagcatttcaagataatagcctgtgcgaatcaattcggccttttcgtggctttttgcacgcaaagcgatgtaatagggcgcttcgatcatgacgccgccgtagccggctttgccctttaaggcttcggcaattgctgcgccgttttcatagagagcgaagctcacattgctggcttcggattgtttttccaatttggccagggtgtcttttaaccaatccatttccatggccgacagcttcgtcggttgaaattcgcgcactgttcttctcttttgcaggaaattcgtcattaccatattatcttcctcctcctcttacaaccagtttgccaggttgtcgtaaacatacatatgtaccacgaaaccgacgatgatgccgatgatcacacccgccaagacgtcggtgggatagtgaacggctaaataggttctggatacagccactaaaaatgccatcacaataaaaagcgcagccattttcggataatacagagaaaaagtcgtcgccaccgtaaaggccgcagtggtatgccccgaaggaaaagaataatccctcaggtcgatgccataggtgtttaaattcttactcacccaataggggcgactccggctgatgacacgctttaaaatttgcgcgacgattgtagaaatcacaagggccaaaaccatttccgtggcggcacttccgatccaacgttttccgacgaaaagcataaagactgaaaagacgccgagaaatcccggtcccgcgatgttcgtatagttgtaaaagaagaaatcaaaatacttgtttttcaatttcttgtttatacgatcgagaaaataatcgtcaaacgctttaaacggatttttcatcttcaccatcctgtacatacctacttcccccattatataccaagcatctcgtcttgaaaaggacaattcccgcaagtcgtgatatactttccccgaggtgactatgaatttaacggacgaacaattaaaagccatgggccacaacggaggtccggccttggttttagccgtacccggcagcggcaagaccaccatgctcttaagccgcacgaaacggctcatcgacgagggcgtggacagaaaaaaacttttaaccattaccttttcaaaggcgtcggccagggatttggccctgcgctataaaaaccttttcgcaaacagccccatgcccgccttttccacgatccacagcttctgttactccgtcttgaaaaacgacgagcgccgccgaggcacgagctacaccttaatcgaatccaatcgggccttgagcaagtggcgcatcgccacggatctttggaaggagattatgcacaaaagccccaatgaggagcaggtggagaccctgctaagggaaatcagctacgtgaaaaacaaaattctggatccggaggcatacaacaaagaagccgccacgcccctttttctgaaattttataaaagctacgaggggctcaagcgggacaggcagtggatcgacttcgacgacatgattaccctggtgccggaaattttcaaggaggacccggggcttcttcgggccgtgcgcgccacctacgactacattcaggtggacgaaggccaagacacctccaagggccaattggccattatcgaagccattgcggggtccaagaacaatctctttatcgtcgccgacgacgatcagtccatttacggctttcgcggggcggattttcgcgagctcctgcacctcaatgaacgctacgacgatttatctctctactacttatcaaaaaatttccgctcacaagagagaatcatttccctctccacccaattcatcgagcaaaacaaggcccgctaccaaaagacgcccatcgcggtaaaggacccgggcccggaagtgcgcgccgtggagctcaataatttagacaagcagtacgcctttatcgcctcggaaatagaaaaacacgagctgaaggatgtggccgtgctttaccgaaaccacgtctcttccatcggcttggtggaatttttggaacgggagaacatcccctttgccgccaaggagcgaacgagccgctttttccgccactgggtgcttcaagatttaatcaccatttacgaattcagccaaaatcccactgatctcgccgctttttccaccttctactacaagattcgcggctatttgtcgaaaaaaatgatcgaaaccctgcagaaaaaaggcgtggttggatcggtctttgacgcccttttggatttaaagctcccggattatgtggtgcgggacgtgaaggccctgaagcgggattttcaccatttaaaaacattggcccccgccgaagcttttcgcttcatccaaaaagatttggaatacgaagcctacattgcgagccacgccgccaccttcggctcctcgaagaccacctccatgcgcattctctactacgccaagtacatcgcgggtaaaaccgacgactaccaccgcttcttgggccgcctcaaaaccctggaccgcctgatgcagggcacccgcgccggagaaaaggggctggtgttatccacccttcacggcgccaagggcctggagtttgacgccgtgtttattatggatttaaatgccgatgccattccttctttgccgaagacaccggtggatccggcggaggagatgcgccttttggaagaagaacgtcgcctcttttacgttggcatgacccgggcgaaggagcggctttatctcttaaggccccgccacgtggatcgggaatccgtgccgccttcggaatttttcacctggtcgaaagaagccatcgtcaaggcgcgaaaaaagcattagaaaagccctctcacacgagagggcgcttttgtttaaccgtttttcaacatggccgtttcaaattcgttggcacattcttcaatgctgtccaaacaattttccaagacctgaagcatttccttccagataatcgtctttctgggatcgaattcgccggtatagtcgaagagggagcgcatggcatttaagtacagcgtgtcgccctccccttccagggaattaatgtgaatgattttttccttcacttcgttggagcgcttgaaattgctgaattccaacacaacttcttccagcatggatgtgctttcgacgatgagatccacaaactccaaggtctcgggaatgagctcccgcacccggtacatatacaggcccagcaaaatctcctcgatggaatccaccaccgtgtccagcttgtccgtgatctcgataatgtcttcccgctcgatgggcggcaaaaattctacggccaggcgattcataatatcgtgcatgatctgatcgcagtcgttttcgatgcgcttcatggcatcggttttctcccgcaatttcgccccgtcgtaggtgcccaaggtgatctgcaacagatctgccgcctgcgatgccttttgagccatatcgctgaattttcggaagtaatcgaattttctatctttcatagcttctcctaaaacagatgaatcagcacggaagtgacgataaatccgatgatcccgcagccgggaaaggtcaagatccacgccagacccatgtcgcttaccacagaccagttcacgtttttaatatgcttcgatgcccccacgcccataatggccgtggttttagtgtgggtggtggaaacgggaagccccgccagggaagcggcgaataggctcactacggcgccgatatcggcggcgaagccctcgtaggtttccaacttcaccatgttcatgcccacggattttataatgcgcaggccccctaaactggtgcccaggccgataaccagcgatattaaaatcatgagccacgccggaattacgaaatgccccgcgccgccggtgccggcagccaagctgaaggccagcataaatacgcccatgaacttctgcccgtcttgggcgccgtgcataaaggccatggccgccgccgagacgatctgcccgtttttgaaaaaggccttggaccttcgccggtcggagcccgccaaaaggcgcttaatgatctctaccaccacatagcccatgaaaaaacccatgaccgtggagaggacgaggccgtagatgtttttcatccactccgccccgttgatcccggcgaggcccccgtgcaaggcgatggccgagccggagagcccggcgatgagggcgtgggattccgacgtgggaatcccaaagtaccacgccgccgtcgaccaaatcacgatgctcacctgcgccgcggccagggcgattaaggcttcgtttgtattgccgttaaagtccaccatgttgtaaatcgtctccgccacattggcgttaagggccgtcataataaagaccccgagaaaattaaagagcgtggccaaataaatggccttttgcggtgcaatgctgcgcgtggatacggcggtggcgatggcattgggcgcatcggtccagccgttgacaaaaaccaccgccaagaccaaaagggtcgtgagaaaaatggcggggctttgggccatcatggagacgaattcttgaatggtaacagtcatggcttcccttcgatttaatttttaaagctgtgaatgggcgcaggaataaagccgccccgtgccgcaaaggccgcacagtcgtttttgtgcacgggaagaataggcgcttcccctaacaggccgccgaaggtggcgttgtcgcctacgtctttgcccacaacgggaatcaggcgcaccgccgtggtcttgtgattgatgatgccgatcatggattcatcggcgatcatggccgataaagtttccgccggcgtgtctccgggaatggcgatcatgtccagcccgacggagcagacgcaggtcatggcttctaatttgtcgaaagccaaggcgcccgatgcggcggcggaaatcatgccctcgtcttccgatacgggaataaaggcgccgcttaagccgccgacgtgggcggatgcattgatgccgccctttttcaccgcgtcatttaacatggccaaagccgccgtggtgccgtggccgcccacggtgcctacgccgatttcttccaaaatccgcgccacactgtcgcctaccgccggcgtcggtgcgagagacaagtcgatggtgccgaagggcgtgtccagacgcttggcgatttccttgcccaccaattcgcccatgcgggtgatcttgaaagtcatttcgctaatgcattgggccacttcgtcgaaaggcgcgccgcggaatttttccaaggccgtcttcactacgccgggaccggaaatgcccacgtggagcacgtgatccccgaggcccgtgccgtggaaggcgccggccataaagggattgtcttccaccgcattggcgaagacaaccagcttcgcgcagccgatggaatccgcgtcgcgactcaaataggccgcatccttaatcactttgcccattaaagccacggcatccatattgaggcccgatttcgacgtgcccacatttaccgaggagcacaccttttccgtcgtggccaaagcttccgggatggcttcgattaaagcccgctcgctttcagtcatgccgctgtgaaccaaagcggaaaagccgccgataaagtcgacgccgattttaatggctgcatcgtccagagccttggccagcttcacgaaatcctctttcgtgccgcgaggcaaaatcaacgaagccggcgtgacggaaatgcgcttattgaccacgctcaccccgtacttggcgccgacggcattggcttcatcgaccaagtcggcacctaaggtggtgatcttgtcataaacccgcttgcataccacgtccacatcgtcggagacgcaatccataagggaaatccccaaggtcgccgttcgtatgtctaaattctcatgctccagcatgtgaattgtttcgagaatcgaagaattatccaaaagagacgtcctttctaaatatggtgcatacggctaaaaagcgcctcatgctgcatacgaatgtccaaacccatggatttgcccaaagcttcgtagtcttccacaacattttccaaggcaaaattttcatcggcgtgttccaccacgagaatcatggtgaaataagaactgacaatggtttgactaatgtctaaaatattaaaaccatgatccgccaaaagcgtcgtaacccgggaaacaatccctacctgatccttacctaaaacactgacaacagctttcatccaatccctcctttgtaatgaacttattataacatagacatggatacatggttcaggggaattctgcgcaaaaaaaagccgaggtcatgccgcagcttcttatagtttatccgtctcccaatccggatctttcaaaaaggcgcgtccgatgccgaaaagatccgccgcaccctctgccagtagttgttccgcttcctcataggtggtaatgccgccggttaaaagcaccggggccgtggtttcgtcttttacggcgcggctcaggtctttaaaccagccggcttccttgtggccgtgccgattgtagccggtcatgccgccggtcatgtctaaaagggcggcgccggccttatcaaaggctttggctgcgcgtacgccgtctgccacggtggtgcccccttcaatggtttcgattccgccgatgcgcacggccaggggaaagtcgcccagagcttctttcatggccagaaagacttccaggggatacttcacccggtctttgccgtagtcgtcggtgcggaaattggtgaggggggaaaggaattggttcagcaaatagccgtgagccacgtgaagctccgcgccgtcgtagcccgccgccttcgcccgaaggcccgccgccacgaaatccgctttcacccgcgccatgtcgtcgaaggtcatggcacggcacattttatcccagggacgcaccgaggggcccatggggtctttgccgatcatgtcgcctcgggttttgatgccggcgtggtttaattgcaagaacacggcggcgtcggggcgaacgctttttatggccgccacaagttttttatgcccggcgattttttcgtcgtcggccaaactcatttgcttcaagctcgccttgccgtcttctgcgacgtagctgtgttcgataataaagagatcgaagtgtttattcgccgccatttttttgtaataggccagagtcgtttcgctgatctcgccccccaccgaggcttctgtcaccatgggcggcataaccaagcgactgtgaatggccacgcctacgttaagggcatcttttagtgttctcatggctcctcctgcttatgaaaaaagcactcttgcgagcgctttaatcttcttcgacttttacaaacatccatttgctggtgccgcatttggggcaagtccagtcgtcgggcaattcagaaaagggaatgcccggttcgatgccgtattccggcacgcctttggcgggatcgtacacgaagccgcagggtttgcagcgatacttgctcatatctttttccataacttcctcctattctcttttaactatacccgctttctcaggcttcaaaagctttttccgaacttctgcggcaccctttattccacgggcccgtcgtaggccagcatgccgccggctacattgatgcagtcatagccgcgaccgtttaaatacgcgcaggccttttggctgcgattgccggagcggcagataatgtaaatcgtttcgtccttgggaagctcctcttcccgcgcacttaaatcccccaggggaatggtgtaggcgccgggaatttttcccgtggcgatttcgtcgggctcccgcacatctaaaataaatttcgttgacctgtcctttaattcctttacgggaatggacggcgtgttattttcgccgaaaagtttctttaaatggtccaaactgtgcctccttttcatcttgcttttattatagcttgaatcgacggcggactcaattttctttattgacaagacagtcgtgttgtcatctgccaacacttgtggtattctaggatggattcacgaatatacagaagaaaggaagactactttggaaaaggacacccttgcacgcttaaagaaagaaaaagacgccgtcattctcgcccactattatgtggacggcgccgtacaagccatcgccgatcacgtcggcgactccttcaccctggcgaaaatcgccacgggcatcgacgccaaaaccatcgtcatggccggcgtagaatttatgggagagacggtaaagattttgaatccggaaaaaaccgtctaccttcccgagcccgatgccgattgccccatggcccacatggtggatgtggatgccattaaagaaatgagagaaaaatacgacgacctcgccgtggtctcttacgtcaactccaccgccgaagtgaaagcccattcggactactgcctcacttcctccaacgcggcgaaagtcgtaggcgccatcgacgccaagcacattttctttattcccgacggcaatttaggccaaaatacggaaggggctttccccgacaagcactttattaacaacgccggctgctgccccgttcacgacagcttaacggcagacatggtgcgcgccctgaaaaaacaatacccggacgctcccgtgttctgccatccggaatgcaaaccggaagttctggaactggccgattacacgggcagcaccaagggcattttaagtgccgtcggcgatttgaacaaggacaaaaacattattctcacggaagaaggcatcggttgggaattaaaccgactttatcccgacaaggaatttattttcccggacctgatttgcaccggcatgaaaatggtcaccatcgacaaaatcatccacgttttggaaaccggcgacaacgaggttcttttagatgcggacttaatcgaaaaggccaaggttcccttggatcgcatgctcgccatcgcaagcaagtaaagaaaggagctttatgggcaatttgactttggcgccttttttgatggacgacgccattttggccgccctaaaagaagacgtaaacgaagaagacatttcaaccaacgcgttggtggatgccgacgaaatgggctcggtgaagcttctcgccaaggcggacggcgtgctcgcaggcgccccggtatttgaacgcaccttccgcctcttcgacgagcgaaccgccgtacagtggtatttcgaagacggcgatgatgtgacgaaaggggatttaatcgctacgatcacaggccccattcgcgccctcctgacggcggagcgggtggctttaaatttccttcaacggatgagcggcatcgccacctacaccaagaaaatggtcgatgccctggcgggaagcgagacgaaaatcgtggacaccagaaagaccacgccgaattttaggatctttgccaaatacgccgttcgctgcggcggcggcgagaaccaccgcttcaacctcaccgacggcgtcatgctcaaagacaatcacatcggcgccgcgggctccgtcgcagaagccatcaagcgggcgaaggcctacgcctccttcgtacgaaagatcgaagtggaagtggagaccatggccatggtaaaagaagccgtggaggccggcgcggacattattatgctggacaatatgagcccggatgaaataaaaaaagccgtcgaattcatcgacgggcgcgccctggtggagctttccggcaatatggatttaaacaacatttccaagtacaaagatttaggcgccgacattatctcttccggcgccctcacccactcggcgccggtgctggatttttccatgaaaggactgacacccgatggttctcgataaggaaacgcggctctacgaaatcgaaaaagcccttcgggaatccgctgagcccatttccggcgacagcctggccaaaactttttccgtctccaggcaggtcatcgtccaagatatcagcctgcttcgggcgaaaaacattcccatccactccaccaatcgcggctactacatgaacgcgcccacgggctttcgccgcacattcaagtgccaccacagagacgacgaaatcaccaaggagctgaatctcatcgtggacttgggggccacggtggaagatgtctatgtagagcaccgcttttacggaaaaatcgccgccacattaaatattcaatctcgtaaagacgtgaaccattttatggacgacatttaccacagcgtcagcaccccactgaacaacattaccaacggctaccacttccacacggtttttgccaaagacgaagaaaccttagatgaagtagaagcggctttggccgaagcgggctttttagtgcccgaagaacctttcaaggaggaagcatgaaaaacatcgccgtcatcggctacggcgccctgggccacattctcgtggacgctattttagacaaattaaaagaagactaccacctcgtggggattttcgatcaagtcctcgacgaaaaaaccattgccgcaaaaggcgagaccattcccctttacgacaatttcgacgccctcctcgccgacgacacggacatcgtcgtggaaatcgcaggcgtcggcgccgtgaaagaatacatcgtgcccctgctcgaggcaggcaaagacgtggtcattacctccgtcggcgccttggccgatgccgccctatacgacgacatcgaatcggcggcaaaaaaagcaggccgaaaagtgcacattacctccggcgccatcggcggcttcgacttaatgcgcaccttcacccttatgggcggcgtgcaatctgaaattcaaagcacgaaagcgccgaaaagcttaaacggcgccccctacctaaaggaagacctgcctacggataaaaaagtcgtcgccttcgaaggaagcgccacggaagccatcaagggctttccgaaaaacaccaatgtggccgtggccacaggcctcaccacctcgggggccgatgccaccaaggtgcgcatcgtaagcgatcccgaaagccccggcaacacccatcgggtcaccgtggaaaacgaaaaagccaaggccgtggtggaaatcacctccaagcccgatccgaaaaatccgaaatccagcgtcaccgccgcatggagcgtggcggccctgttgaaaaacctggccgatcccgtgcaatacttctaaggaaaagctgccgcgaaggcggcttttttattggcgaaacagcgcctcatgtgtaaaatagtcttatgaaaacagttttgattaccggcgcgtctcgaggcatcggggcggccatcgcgagagaattaaatccggagtacaagctcgtcattaactatttccgcagtgaaaaagccgcccacgcactcctcgaagaacttcgcaaaaccaatccctatactatcgccgtaaaggccgacgtaagcaaagaagaagacgtggactatctctttaacacggcggaaaaaaacctcggccacgtggacatactaattaacaacgccggcatctcccactacgatcttctgcaggacacggccttcgacacctggcaaaacatcctcggcaccaatttaaactccgtcttccttaattccaaacgggccattccccatatgcttcacaaaaagggcggcgttattataaacatcagctccatatggggcgaagccggcgccgccatggagacctgctactccgcatcaaaaggcgccatcaattccctgaccaaggccctggccaaagaactggcgcccagcggcattcgcgtcaacgccgtggcccccggcatcgtggacacggacatgatgcgcaaggatttttccgaagaagaactggccgcccttcgcaaagaggtgggcgttagccgctttgccaagcccgaagaaatcgcgagcctggtgaaatacctgatctccgacgaagccgcctacattacgggagacatcatccccatcgacgggcactttcgctaaagccgtgggtcgcgccgccgtgggcatctaaaacagaaaagatcaagctgcccacgaggcggcttttttgttggccgtaaaacaaatgtatttaattttcttcaaatatccccgttttgtaagattatccgacccttctcttagaaaatatgaagaaattcgacggcctttgttcttgttcccctcttttttcccgtgataaaatttttacatcacaaaagaacaggagatacaccaatgattaaacattcctttggcaagtgcttgggcctttttttatgcctcagcctggccgtcgccatctttagcccccgagcggcccacgctcaagaaaacaccaccttggacataaatgcctttcaccgcgccgtaccgaaagataaggcgacggaagttatcttcggcaagaaaacggataatgcaccccacatccaaggcatgaccggcactcccgtcggcgccgataacagcgacaaaatcaaagtctacgaaaaaaacggaaagtattacgtcttaagcgaagacaacaccaagatcgcctttcctgaaaaatcaatcgccttgtttcaaaactacgagcaattgaagaccgtcgactttgcggatgccgtggatacttccaaagttgaagtactgaacaatctcttttacaactgtccccaactggagagcgtcagcctcgcttccttcgacacgagtcaactgaaaaacgcagactacctattctacggctgcaaagcactgaaagcagtcgacctctatcgcttcgacaccacctcggtcaccagcatgatcggcatgtttaacggctgctccgccctgcgcaccctggatctcagtagctttaacacctctaatttgcagtttacggccaatatgttctaccattgcgaaaacttgcgcaccatcttcgccaccgacggcttccgcaccgatagaattactgatcgagtcaatgcgagcaatatgtttgccggctgcacctccctcgtcggcggaaaaggcaccgtatataacgaagaccacgtcaacaaagagtacgcgcgaatcgacggcggtgcggatcaacccggctacttccgcttgaagagcaacaggtcctacaccattaccttcgaaaccaatggcggcagcaaaatcggaccggccaccgttagtgaaggctatctcttaaataagcctcaagatcctgccaaggcggatcacaccttcgccgggtggtacaccgatgccaatctcaccaaagcctacgactttgcaagtgccgtcgtcgggaacatgaccctctacgccaagtgggaaaagaaggcaccgactcccggaaccccccttccgaatcggcccaagcccaacaagccggctcgccccgcttccccgtcccctcaatttaagcccaatccgagccgagcatcgaaagaccctgcgaagaacaccctacagttctccgtcaaactgaaaatcggttcgaaaaatcttgagcgccgtgtacagggcatgaagacgaacggccaagtggacgtcgccccctttattcacaacaaccgcaccatgctccccattcgctacgtggcggaaagcctgggcatggacgtacagtggatcaatgaaacgcgcaccgtccttctgacagacaaaaccactcgcgtggaaatccccgtggacacaaacaaaatcatcgtcaacggcaaaatctacgaaagcgacaccaaagccatgattaaaaacgaccgcacctaccttcccatcgccaatgtggcacgggccctgggcttggtcgacggaaaagaaatcatctggaacgccgcgacacaagaagtggaaatcacgcggaccataaaactaaaataaaaaaggctctataatatccattggggagtaatctcctcaatggatatttttgtgcaaaaagatagcacttgttttccctatcacctaaaattaaatcaccacaacataataaaggggggcaaacaagtgcaaaacaatattaccacattacttttaggaatccaagatgtcgaggtcaccggtgtttcagaagaaagacgcctcattaccattgattgtaaacccgtccacgatcgggtttgtcctcactgtggctcatcccacgcctgggtccacgatcaccgggagcaagtccttcgggacgcaccgatgcggcgcaagcacgtgtttcttcgcgtcaagaagacacgctatgattgcaaggattgcggcgcgcgctttgaagcacctctctcctttgccgccaagggcaagcagatgacaaagcgcttaattgcctatgtagtgg

SEQ ID NO: 30 - DNA, 120847 bp, Peptoniphilus rachelemmaiella
  source 1..120847: mol_type = genomic DNA
agatcccacccaaactatctgtatcttcattcatgggctttctaaaaggtaagagcagtatcatgatctatgaacgatggggagacatgaaatttaaatataggggaaggcagttttggtgccgaggctattacgtcgatacaacgggaaaaaacgctaaaaagattcaagagtatatacaaaaccagttgaaagaggatcaaataagtgagcaactaacctttgacacgacgaacccctttaaggggtagccaagtaacgatagcacgggcagaccgccgacgcccttcaggcgcagctagtaatacaggccctttgggccgaaaaaggaaaacccccggctacgccgggggatgtttattgtgtttatttttcttattgcctgtacctgagcgggagaatccgctgtgtcccctgatttatccatgttataataatcttcggaaatagggagaatcgatttcaagctcttgtcgctagatttttgaaaacgggtatagattaaacgaggtgtttttatgaaaaagacgaatgcactcaggcatttagatgctgaaggtatcccttatgaaaccttcgaatacgatcaagacgcggaggtggacggcgtaaaaattgccgagctaaaccatttgcccgtggaagccgtatttaagacattgattactgagggaaaagacaaggaacatttcgtcttcgttattcccgtagccgaagaattggatttaaaaaaggcagccaaagtttgtggtgagaaaaaaattgagatgcttcacgtaaaagatctcttgcctcttaccggctatgtacgaggcggctgctcacctgtagggatgaaaaaattatttcctacctacatccacgagaccgccattctatacgatgcgatttatgtcagcgccgggaagaagggaatgcaaatgcgcgtcaaccccgaagaattgggcagattaattgatgcgacttttgaagatatcacgaaagaaggttgaaatgacgattcacgatgaatttattcagtggggaaaactgaccaccctctgcgacgaagaccgccgtgcgctttcggcgatgaccgacgatgaaatagcggacagtttttaccaagagctggccttcggaacggcaggccttcgaggaaaaatcggtccgggcatgaaccgcatgaacgaacaggtcatcgcccgcgccacgcgggggctggccggcgtcatcgagaagcgggggcaaaaagccatgaaccgcggcgtcgccattgcctgggatgtgcgtgaaagaagtgagcgattcatgaaagtcgccgcttcggtgctggcttcctgcggcattcaggtgcacattttcccggatattcgtcccacgcccatgttgtcctttgccgtaagggaattggggacacaagcgggcatcgtggtgacggcgagccacaatccgaaggaatacaatggctataaagtgtattggaaggaaggctcccaaattcgcgacgacatcgccgatgaaatctcccgggaaatcgccaaattcgactacaccgtgtggccgaaaaaaaccttcgacgaatacaaagaggaaggcttcatccacgtgatcgatgaagcattggaagaaaaatattacgccctcaccttggccaaggccgtggaagaggatataaaaaaagatatttccatcgtctacacgccattaaacggcacggggaatttgcccgttcgccgggtgttgaatgcgcgtggatttgagaacattcatttggttgaagaacaaattgcgccggacagcacctttaagtctgtaggctatcccaatcccgaggatatcaaggcgtttgaaaaggcgttggccctgggaaaagaagtggatgcggacatcctcatcgccaccgacccggattgcgaccgcgtcgccatggtggcaaaagatgcctccggggagtttattccctttacgggcaatcaaacgggggcccttcttctcgaatacattctgtcccgccgcgcagcgaaaggcgatctgccgacaaacggcgccgtggtgaagagcatcgtcaccggcgacattggccgcagaatttgcacccattacggcgtgaccatgttcgacgccttgaccggatttaaaaacatttgtgccctggccaacgaatgggacgatacccgcgagtatgaatttttattcggatttgaagaaagcatcggctatgtttacggcgaccacgtacgagacaaagatggtgtcgtcacgtccatgatggtggctgaaatggcggcttactacctgagcttcgataagcgccttccggaagtgctggacgaaatctttaagacctacggctatcaaggagaaaggctcctttccgtggtgaaagaaggcagagaaggtcaggctttgattcaagacattatgaaggatctgcgggcaaatcccatggattccatcgaaagtctgaaagtggaaaaaatcgtggactacgccgagggcgtcgagggcatcggcaccagcaatgtattggaataccacatggacgacggcagtcgcttctatgtgcgtccttccggtacggagccgaagatcaagctgtatatttacaccaaggacaaagacgaagaaaaagcgaaggagaaaatcgaatggatcgagtctgccgttatccgtcgatttaatcaagcatgattcttctcgtcgataccaatcccatcttggaagagcgcctgaaaggcgaaagcttcccgaaaggcgccctatcccgcgcaagtgaaaagcagaccacaccggcgggatacggcacccatatggcgcggtttgcaagaagcatcaatgaatcggtgcggctcatgacctttctcggcggcgacgccggggagcgctataaaaagctgatggaagcagaaggcacccaggtggtggcgaaaaatcttcgcgacgaaacccgggagcactttattctggaggaaaagaataaaaagaccacgctcgaaaccgctgagcctcggcgcacgcgggaagatatggtggatttctacgatctttttttaagggaagcggaaaaatcggatgccgtggtcctctgcgaatccacgggaacgggagaagccgacgggatgaaacttcccttggtacgctacgcgcggaaactgtcgaagccggtgattatccttgcttctgaagcggatgatgaggaagctgtgaaagaagcgaagcccttcggcctcgtcgtgaaccgccatgtgttggcggcaaaaataaacaagcccattcactttttaggggagattgtctcggccttagatacgctttatggcggcgagattcccctgatactggtcacgggaagcgagcggggatccattctccgagctcgcggaagctattactttgcgaaaaatgaagacaaaaaaggaagcttcgatgcccattatgccgcattggcactggccgcgggcatcgtcagaaaatacgacgcccccacggtgttgaagctggctcacggggcggcaaccaccgaaggcgaagcggacttcgctgatttaaaaggacgcatgaatcaaatcgatgtacaacgaatggaggtataaacatgaatttttgcttagatagggagaaggtactgtttttatttgtagattttcaggattccctggcatcggccattttcaatatcgacggcgtgaagaaatatgccggcattttggctgaaaccgctgaaatcatgaacattcccaccgtgtttaccacacaatacaaacggggcctcggagaattcaacgaagccattcgaagcaaagtctccggcggcgcggatttcgacaaaaaagccttctcctgtatgctggatgaagacatagccgcctacatcgacgaaaagaaaccggagcaagtggtggtatgcggcattgaagctcatatttgcgtgctcatgaccgtgcgcgatttaatcgccaagggcatcgacgtctacgtcgcccacgacgccgtcagctccagagaaaaagaaaacgtccgcttcgccctcgacgaaatgcgtcaaatgggcgcaaccgttcgcgccacggaaaccattctgtttgatttaaacagcgtctccggtaccgatgaatttaaagcggtacagaaattaatcaaataatgcgttttctgcacacagcggatctgcatttaggacgaagttttccttacgaaagagaagacgaccgcatcatcggccgaaaggatcgctttcgcacctttgagcgcgtgttaaaactggggattcaggagcaggtagactacctttttctcgtcggcgacatttttgagcaggagaaggtgagctctgccgaggtggactacgtcttgaactgtttggcccacgctccttttaccaccttgcttctcttaggcaatcacgactacaagctctacgacgacgtggcggctcgtttgccggagaacgtgtttttattttccaacgaaatcatggatcgctacgaagacagggatcgtggcgtggtcttttacggcaccagctggacgcgggcaagttacaataaaatcctacaatttgaaggcacaattggcgacgagggccttcaccgcgtgctcctgcatcacggcaattggagcggcggcgacgggtatttcccggtggatgccaatctgcttcatgccttcgactatgtggctttgggccatgtgcacaagcccattatgtacgaaaacaagctgcagatgtgcggcacgccggagcctttggatcgaacggatcgcggaaaactcggcgtggtattaggggagctggacgaggtgctcaccacccgctacgttcctgtagcggcccgtatgctgaaacagaaaaattacctgcgaagagacggggccgacgacgaggccattgtggctgatgccaaggccttgggccattcgaaagactttatctacagctttcacctgtccggcgcctacagcggcatcttggaccgggagctccgagggattttcgacgaaaagggccttttgtatgagcttaattgggaaaaggatctgccaaagatcatcgagcgcatggaaagagaacaccaaggcgatcttctcggcgcctttctggcgcgggcgaaggcctacgacggcgatgaagagacgcgcctcgccctctgtgatttaggtttgcgtgcccttttgggggaagactatgattcataaactctatatgcgggatttcggctgcttccacgacacgacggttgcctttcaagaaggctatcaatgccttccggggcctaatgaatcgggaaaaaccacgacggcggcctgtattcaggcgattttatacggcttttccaaagacagcccagcgcgcaagctttattcctcggcctacgacgattactttcccttggaggggcgggacttttctgccgccatggaattggaggtaggaggcaagccctacgtcatcgagcgaaattttataaaagaaaaagaaacgcttaaaatttacgatgtggaggctaatcgctttctgtccgatgaagacgccctctacaccttttccggcattccacagcccggggcactgttttggcagctgtcccaaggggattttctacgcttcttcgccatggacgatttgcaatctacgggagcggaggcgatttttaagcgcgttcaggagatgaaaaattttctgcgcaccaacagcaccgccctgaatgtggaaggagccctggactatctggccaaggagaaaaaggccttgggcacggagagggcgaagaaatcgcccatcggcgacaatcgggaaaagctcaaaggaatggaagcgaatttagcggattttcgcgcccggtcccggcatttgaaagatgaggaagaaaagcgtgaggcgttactcagagaacttcgcgcattgaaactccgtcaaaaacaggcgagagacaaagaactgcttctgccgcaactggccgtggccgcggaagaagtggcacaatgggatcgggctttggatgaaaacgaagcgaagatcgagcactacgaaagaaagcggggcaaaggcctctttagaggcatctattacaaactcgctttgctcttcggttgtgtcgcagcggcaattgccgtggttttcatgacgagagatcgggcagatttcgcctccctttcagcccttgcggcagggggcttatttgtcgtcgccctgattctgtttgttttgcggcggctcacccttcgtaacattcagcgctaccatcgggcattttacgaacgggatcaattgctggaaaaaaagaacgcccgctttcattggtttgacaacttggtggaagaagacattaccatggaagagctgctggacgccatgaaacggcgcatgaaggcgctggagcatgggccccttgaaacaggcttggacgataaaattgaagccttgcaacggcaagtgggccaggtcgatgctcggcgtgaagaaaaagatgccattgagaaaaaaatggaaaaggcgacgaaagcctataaagacgagcaggcccgcggggcgcagctgagcaaaaagctggccctggtggaggcttgcgaaagcatactcagagcattggacgaagggggaagagaggattttaatcgggccatgttagaagacggcgcccgctatctgcgcgatctttcccgggggcgctacaaaactatcgccctttcggaagacgccttcgtccttcaaaaagatgacggccattggctgaaggaaacccagctgagcagatccacggcggatctattggttctttctctgcgcctggccgccgtagaaaaaatggatccctcgattcccatgatcttcgacgacggattcgtctatttagatgaagggagacgagggcgattgaaagacgtattgaagaaattgaaccggcaggtaatcgaatttaccacgccgaaaagagaaaggagtgccgattgatttgggcgattggcgatttacatttagatcataaaaaagaaaagcccatggatgtattcggaaagaaatgggaaaatcacgaggagaaaattttctcttcgtgggaaaataccgtcgccgagggcgaccgcgtcttggttgtcggcgacatttcatgggccctgaaattggaagaaggagaggtggaccttcggcgaatcgacgcgttgcccgggaaaaaatacctgattaagggcaatcacgattactggtggtcctccatgaataaattaaacagcttggatttaaagaccgtggaattcctacacaataccggcgccgtagatgatacggtggccttttgcggcagtcgcggttggaccgatatcgacgccacgggattcgacgagcaggacgaaaaaatctacaaacgggaattaaatcgcttgcagctgagcatcgacgatatggagaaaaaagcgaaagggcacgccatcgaaaccaaaatcgccctcttgcactacccgccctttaacgccaagggcgaacccaacgacttcgccgatctcttgagcactgcaggcatcgatatttgcatctacggccatctccacagcttcggccataaatttatcgtggagggagaaatcaacggcgttcgctactactgcgtctcgtcggattatattaatttcgaaccgagaaagatcgaggtctaggatggagcgagagatcgaagttaaaatccttcacgtggatttagaggccatggaagaaaaattaatttccatgggcgccgaaaaaatcggcgaggaacaacaggcaaattacctcatcgattccgcggcccatcccattgcagccgagcggggctacttgcgcattcgccgcatcaaacaaggcggcaaagaggagattcagtgcacctttaaggaaaaaaagagccaagagggcgttcgtgtctatgacgagcacacggcaatcgtcgacagtgcggaagagatgatcgccatctttggccttttaggctacgacaaggtggaagtggcgaaaaagcatcgcatcagttatgcctataaaaactgccgcctggacctggaccggtgggaccccgagagctttcccgagccctatatggaaatcgaagggacgacgagaggggccatcgaagcggtgatcgaagacctgaacattagcagagagcaggtcagcacgaaatccattgccgagttaaaaaaatcttggaataaatagtacaacacatatgccgactgtgctataataaatcccgaggaggaattctatgacaggttttaagtacattcgtttttttcatgaaatccgcaaagatgatgtagacatcgtcggcggcaagggcgccaatctcggtgagatgaccaatttcggtttagacgttcccccgggattttgcgtcacatcgaaaggctacgacgcctttatcgaatacgccggattagatgaaaaagttcgttttttaatgcaagatttagacgtggacgacgtggatatgctcacagcggcatccaacgacattcgcagaaacattgaacagggcgaaatcgacccggctttggaagaagaaattattttagcttacaaagaattcagtcgttccatcgatttgagagacccccaagtggccgtacgttcttcggctacggcggaagacttgcccgatgcatccttcgccggtcaacaagacacctatctgcacatcgcaggggaagaagaattagtacaacacgttcgcaaatgctgggcatctctttggaccccgcgtgccatttattacagagaaaaacaaaaatacgaccacttcgccgtttctttggccgtcgtcgtacaaaaaatggtcaattcggaaaaatccggcgtcatgtttacggccaaccccattaacaacagccgtgacgaaatgatgattaacgccagctacggtttaggtgaagccgtggtcagcggtaccgtcacccccgacgaatacgtcattaagaaaagcgacaaatcggttttggaaaaagtcatcgccgataagaagaaaattgtcgtacaaaatgattccggcatcggtacccacgaagccgatgtggaagacattttaggcgccggcgccgtgaaggaagaatgcttgacgaaagaagagctgaacaccttaatcgacgcgggcttaaagatcgaaagcctctacggcagcgtacaagacatcgaatggggcatggacagagataccaagggcctctacattttgcaatccagacccattaccacactgggcgatgcaccgagtgcatcggacaattcgaaagaggaaggcatgaatcaagcacctgaaaaattaaatcccctggttcgcggcttggctgcatcgccgggtatcggacgcggcaaagttaaaaagatcaaagacgtcagcgaaatcaacttggtaaaagaaggggatatcctcgtcacggccatgaccaatccggacatggtacctgccatgcgtactgccgccgccgtcgtcactgacgaagggggtagaacctgtcacgccgccatcgtcagccgggaattgggtattccctgtgtcgtcggcagtaacgacgccaccgaagtccttcaagaaggccaattcatcaccgtcgatgccactcgcggcgtcgtctacgaaggcgatgtcttgaaagacaaggaaaagaaaaaagacgatagcgcagccggtgcaggcgcaggccttggcatttccgccgaagaacttcgccaaatcgtggcacctaccacggcgacaaagatctacatgaacttaggcgaaccggccctcatcgaaaaatacaaaaacctgcccttcgacggcatcggcctcatgcgtacggaatttattttcaccaataaaatcggcgcgcaccccatgtacttggcaaaaaccgaccaaggcgacatccttatcgaccaattggccgaaggcattgccgaagtcgccggggccatctatccgaagcaagtcgtcgttcgcatgagcgacttccgtaccaacgaattccgcggcctcaagggcggcgacgaagtggaaccccacgaagaaaaccccatgatcggatggcgtggcgtcagccgctacatttcgccggaatacgaaaagggcttccgtttggaatgtaaggccatgcgcaaagtgcgggaagacttcggtctgaccaatgtggtcgccatgttgcccttcgtccgcacgccggaagaattgattaccgtcaaagaaatcatggcgtcggaaggcctgaagcaatcgaaaaacttcaagatttggatcatggcggaagttccctccgttgttttccaagcggaagaatttgcgaagttggtcgacggcttctccatcggttccaacgacttgacccaactcaccatgggcgccgaccgcgacagcggcatcttaaaccgcatgggctacttcgatgaacgaaacgatgcagtgaagcgtgccattaagatcttggtggacgctgccaataaagaaggcatcacctgctccatctgcggtcaaggcccgagccaataccctgaatttgcagaattcctcgtagaatgcggcattacctccatgtccgttaacccggataccgtcgactacacccgtcgtttagtcgccggcgtagaacaaaaaatgattctgcgtaaattaagagaacaaaaataacaacattctgaaaaatccgccccttgcaggcggattttttggtgcaatgaaagagggtacggctgaaaaaggtaaataaaaaaagctcgagtggcggctcgaacttcttttggtgtaatgaaatttagggatggaatttgaaatcaaagatccacgtgaaacagcttcgcgtagtccctgaggccggtttcgatttcttttagtgtaaaatttccccgccgcaattctttttcatcgattctgagcagggattcgtagaagagaatgcccgtggcgagatccgcctcgccttggtcgaaagcatcgaagagggcgtcttccccttcgccgtacttgccctcggcggcgagggcataaagtttctgcgacagcgcggaagacgctgtctcggcttttttctcgtcgctgaagcccatggggtaggccaggcctaaaagaaactgaatcagctctttgatttgctgcataagaaagtcgtttttaatcataaaatgcccctttatctttgccggttctgaaatttaaaaaggtggtaccggttattatcgttatttttgcgaatacccgtcttgcgaagacagcgtatcgattaccgcctcgcagagggattcttgcgtcgccttttctcctgaaattatattttcctcttttacgcccattttgacaaggcattgttttgtcgtatcgccgatggcgaagcagcatggaggaagagaggatagaccgtaggcggcaatgaaatttttcaccgccgaaggggataagaagatcgccccatcaaaaagggcgggcaggggaaggcatcgcttcggcaaaacggcgcggtagacgattcgatccgtagtcgctgccatgtttttaagcgcctcgcctaaatagggatcgcttcccgcaccatgggggtagtagatgcgattggaggcattaacaaggcctttcaaataatccgccaagtggcggccgtcgtagatcgccggatggccgtcggcacgaaggccgtagcgggccaaggcgtgggcggttttttcgccgacgacgtagatggaaacacctgtaagacttcgaatgtcgcgatcgttcaaataagcgcggaagaagaggtccacggcgtttttcgacgtaaaaattaaggtgtcgtaagaaaaatccgccaggtctttttcaagctgcacatgattcacggcttcgatttcgatcatgggccgcataaaaacctcggcgccgtgggcgcgaagggattcggccatggcttcctgattggttccggtcaaaataatttttcggccggtcaggggcaggtgattcagcggcttcaacatttgatgaagagccaccacctcgcctacgacgataaggccggggctagtgatgtgttcgggaaggcccgcatcggcgacagttttcaggctgctgtaaaaagaggccacgtcgccgtcgtcggaggccttgagtacggcgaggggcgtttcgggatcctttcccccggccagaagatccttggcgatggacgacgcatttttcaaccccatatagaaaaccagcgttcccggtatttttccgtagacggcaaagtcttcgtcgccatctgcccggtggccggtaataaaggatacggaagtggccgtctcccgttgcgtcacgggaatgcctgccatggccggtacggcgacgccggaggtgatgccggaaatcacctgaaagggaatggcccgctcggaaagataaagggcctcttcaccgccgcgaccgaagacgaagggatcgccgccttttaagcgaaggacgcgcttgccggcgcggtaatatttttccaagaggccgtgaatagccttttgcttcatgctgtgtttgccggccacctttcctacgtagattttttccgcatcgcgggcgaaatctaaaatcgacggatccattaagcggtcgtaaaggataatgtctgtgcgggagagggccttatagagggcgagggtgatgttgtcgccgccgccgatgcccgccccggccaaaatcacgggataattagtcatcgcccttcacctttcgcaccaattcatagacatcttccatggtcctctctttgttcgtcgtgaccgtggcgtaatttaaagactcatccgcagtttttgcgaagcagccgtggagaataatttcactccctttagcctctatgtgaatgccaataggcgaggcgcaggaggcatttaacgcctgttgaaaagcacgctcaaccttcatgcgaaaggcggcgtaaggatcggaggcttcagagaaaattttcaaaagatcccgtcgatcttcggcgagctcgatgcctaaaagaccttgagagggcgaagggataaagcgcgtaggatccaaaactgcggtcacttttcgggaaagccccgcccgaaaaagaccggcgtaggcgagaagggtgccgtcggccaagccgctttccactttttggatgcgggtctccacattgccgcgaataggcacgagggtaatctcaggatagaaatgctttagctgggcgatgcgtcgattgctgcccgtcgcgatgaccatgtgggccaaatccgtctcctcgaaagaatcgctctttcccacgaatacatccacgtcatcgggggccgccggtggcagagccaaggtgaagcccggggcaattttcgaaggcatgtcctttaaggaatggacagccacatccacgctcccttcttccagggccccttccaattcgccgacaaagaccccgttttttcccaccttatggatgggcaggtgttggacgcggtcgccttttgttgaaataatgacgagctccgcatcgaggcccgcctcattcagaatcttcaccacctgcttcgcttgaatctttgccagatggctgcccctcgttcccactttcagtttcatctaatgactccccgtaatttttactgattttctcatcattccataattcttccataatttgcccaatataatcgctctttcgctcaaccaagagctttcgtatgcgattcatttcataaagcttctcttcgtcgtatctcgcaagaaaacattccatatccgccttcacatacttgctcaccgtgggattgtccgcggaaatgcttatagtaagggggccgcggcaaaccaccgatgccatgttgaaatcggacgcttcgggatccgacgtcgaaagcacgggcacagatgcaagctttgcccgccgcgtcagggctgcgtttagcgcctcgtcgtcggtagcgacaataaaaaagtcgtaggcgaaaaagcggaaatcatcatcgacggccttttcctttaagaagattcgatcgggatgtgccgctgccaactccctgagcgcttcggagaagttgggagagaggcagtagaaggtaaaggacgcagaaaaaagccctttgatctttgttgtggccgcctttccgccgccgacgacgagcacctttttatcctttgtgtccatcatgagaggaaaatatcgcataggccctcctttttgtttattcatactttctctattataacaaaggcgcggcagaaaacccccaagacttgaaacgaaaacgtaacagcgaagggcattcgtcgtgttataataaggataggtaggattttacaaagaataccaggaggaaatcatgaaaaaaaacagagcaaaaacagtggctacactggccttggccggcgcattattgacggcaccttttgcggccgaagctgcaagctacaaagatgtcagcgctaatcactgggcatatagccatatttctaaattaagcgatttaagaatcattaaaggttacgaagacggcacttttcggccggctcgctacgtcagttatttggaaattctggagctccttaaaggcatacaaaatccatcgagcactgaaatgacgcaagccatttcgacgtacggctatatcgccaatacctacaaggtaccggcatgggcaaaatccgccgtgtgtatcgcccttcaaaacaaggtcatcaccgaaggtaatttaaaagcggcgtacaatatgcactacattaacaacttaaagaacgacaatcaattccccggacgggaactggccatggtatattatgccaaagccctgggcgttcaaccgaaaaaagacacgtccaatattaaagtcaccgacgtcattgccatcggaaaaacgccgaaagaacttatcggcgatgtagacgtcaaaggcctcttggcatccatgatcgatgtgggcatttttcatgcctttggctccgacggacaattccaacccctgtctccgctgaaaagagaacaaatggcgaagatcacggacttaagctacgactatagaaccgttaaatcctttgaaggcgaagtacatgccatcgtgaagatcaacgacatacccgtcttatccatcaaaaacaaagacatgagcacatccttcgttctttccaaggataccgccgtcaccgtaaacggcaagagcgccaagatcgaagacattagtgaaggcagcaaggtaaaagtaaaagccttcccccaaaccggcggcaacgcaccctatcaagcggtatcagtcgacgtagttagcaccgagttaagcggcgccgggctgatcgacgaattaaaatacgatgaaatgaaaattgcctattccacgaacaaagatgccaccgtggacggaaactttaaggcggaaaagaccgatgtctttaaattaaataaggacaccgccattactgtcttaggtaaaaaggccgaattgcgatccctcagcacgagagacatggtcgtatttaaggcacaagacggcgtgttgaaggaactggaagtcttcccgaacaagggaactgtcagcggcgaattcgtcaattacgaatacaatcgcttcggtaattctcgtattgtcctgaaattggataacaaaaaagaacaggcatttatcgtcaaggaagaaaaaacagcgaaagatctgtttgaactcacaaacaaactgagcaagggctatcccttaaccttaaccaccagatacacggaagtaatcagcggcaaagagacggaaggcaaattgtccggattctatcaagagatttctctcgataaaatgggcgcaggtatcttaaaaattaatcttttaagtggcggaacgcaaactgtatttttggattctaagatgaaattcacaggatttaatgaatcaactaaggaagtcacgcctcttcaacttgccaatgagttagaaaataaagaagatcttatcgaattagacctaatcggcggtaaaataaaatctgttacggtaaaagcggtcttgaaggaaagtaaggaccaaagtacagctgtaagaagagttgaaaaagcacctgccacaaataataacgggcccattaaacgctcggtgaacgatccgagagataagtacacccactacattttctacttggaagactcggagcgcagatttaaatacagtcaatttgatggcgctgtggaaaatgcaatctttgatcgaatggataaatcaagattaaagcttttatacaaaatctacgacgacaagaccaaaggcggctttgtagcagatatacgagtcactgatggcgtcgataccatttctgttttcgatgcgagttctctctaaaatggcgagattgtaaactttccactcatacaaaagaccctatggtttgtccccatagggtcttttttgatataatgagacgttagtatgggacgggaggtagttatggatccatttttgcgaacgcggtggctgatcggcacagatgccgtggatcggctgcagaacacgcgggtgattgtcttcggcgtcggcggcgtcggcggctattgcatcgaggctttggcgcgcaccggcgtcggccgattggacatcgtggattacgaccgagtggatgttacgaacatcaatcgacaaattatcgccaccacggaaaccgtaggcgcgctgaaggtggatgtcatgaaagcgcgcatcgcatccatcgtgcccgaggcagaggtgcgcacctatcccatgatgtttaacgaatcggcggcaggggaaataaacttcggcgattacgattacgtggtggatgccgtagaccaggtgacggcgaagcttttaatcatcgaaaaggcacaggccgccggggtgcccgttttatcggccatgggcgccggaaataaattgcatcccgaggcattggagctggccatgctttcggaaacgcaagtttgccccttggctcgcgtcatgcggcgggaagtgaagaagcgcggcctcggcgattttcccgtggtctattccaaagaagcgccgaaaaaagtcgagggcatggatgcccgttcgccggccagtatttccttcgtgccatctgcggcggggctgattgcggcatcgaaggtgattcgagatttagttcaaagtgagaaagaggagcgtcttgttagagaattataataatcgtcagaaagaagccatatgccacacagagggcccgctcttggtactcgccggggcaggcagcggaaagacccgcgtggtaacgggaaagatcgcctatttgatcgaagagatgggcatctccccctaccgcatcctcgccattacctttacaaacaaggcggcgaaggaaatgaaggagcgggtggccaagcaattgggccgtaccatcgaaggcatgtggatcagcaccttccacgccatgtgtgtgcgcatcctgcggggcgacatccatcacttgggctacgacaaaaacttcgccatttacgacagcagtgatcaaaagaccctaataaaagactgcatgaaggaattaaacatcagcaaggaaatgtttaagccctacggtctcttgagccaaatttccacatggaaaaacgaaggcacggatgcggatgccgccatgaaggaaaatttcggcgatttttacgggcggcaaacggcggaggtctaccgcctctacgaaaagaagaagcgggagaacaacgccctggatttcgacgatcttttggtaaagaccgtggaactttttcaacagaaaagtgacgttctcgcctattatcaacagaaattcgaatatatttttgtcgacgagtatcaggatacgaaccacattcaatacttactggtcaaaatgctctcggccaaggcgaaaaaccttactgtagtcggcgacaacgatcaatccatctatcgctggcggggcgcggatatcggcaacatcctttccttcgagaaagattttcccggtgcgaagaccattttgctggaacaaaattaccgttccaccacgcccatattggactgcgccaacgcccttatcgccaacaatcccaaattgaaggaaaagaatttgtggacggcgaaaagcggcggcgatcccgtggtctatcgggagttttaccacagttccgaagaggaattggccgtagtacaaaagatgcagcatttaaactacaagggcacggcctttggtgacatggcgattttataccgcaccaatgcccagtcccgtggctttgaagaggccctcatacgggaggggattccctaccgcgtcgtaggcgggttgcgtttttacgaccgcagggaaatcaaggatgtcatcgcctatttgtcggcaataaacaatccgaaagacgatatcagcatcagccgcattgtgaatgtgccgaaaaggggtataggtgatacgaccttagaaaagctcggcagttttgcaggggcgcgtggcatgagcctcttcgccctgatggaagagttggaaaactatccggagctgaaaatccgcgcacagaaaaacattcgcgagtttgtgaatttgattcatcttctgcaaaacaaggcggcggagctcagcctggcagagctggtggaggcgattctcttcgaaagcggctacgccgacgaactgaagcgggaggacacggtggaatcccgcacacgcctggaaaatgtggaggaatttatttccgctgcggcggaatttgaagaggccaatccggacatgagcctcaccgattacctgggcaatctcagtttaatatccgataaaaatgaattagacgacgaatctcatgccgtgaaactcatgaccattcacggcgccaaggggcttgaatttcccgtggtcttcgtggtaggtcttgaggagcgattattcccaacctcgagaagctacgacgacgaggaaagcatggaagaggagcgcaggctcatgtatgtggcggtgacgcgggcggaagaaaagctctttctctcctcggccaaatcccgcaccctttacggcaagcgcaacagcgccatgaagagccgctttgtggaagagattcaagacaaaatcaccgtccacgaagaagcgccgcggaagaaggatttaaaaagccgccacgacatttacaccggcgcggcggtagagcaaaagcccgtgaaaaaagcggagtccctgcctgaattgaaggtaggcgatacgattattcacaagaaatggggcgaagggatgctcgtgcagttaaaaggagacgaaggcgtgatttcttttgaaggcaaggggctgaaaaccctgaacctgaaggtggcgcccattcgaaagaaggaataatatggagaagatgcgggagatcatcgatcaattaaatacctgggcccatgcctattacaccttggatgcgcctttggtggacgacaagacctacgacgccctttacgacaaacttgtcgccatggaaaaggagacgggggaagtggcggcggattcgcctacccgtcgcgtcggcggcgatctcttggaaggctttgaaaagtttacccacgaaaagccactttattccctggacaaggtccagagttacgagcaactcaaggcatggtgcgatcgcatgcacgcagccggtgccgacgatgagggctacatggcggagctgaaattcgacggcctcacgatttcccttacctacgacgacggcaagctcacccgcgccgtcacccggggcaacggcaccgtgggcgaagtgattacggcgcaggcggtgaccatttccaccgtgcccttaagcattccctttacggaccatttggtggtgcagggcgaagggcttatgccctacaagagccttaaaaaatacaacgagacggcggcggagcctttgaaaaatccgagaaacggtgccgccggcgccttgagaaatctcgatcccaaggaaaccaggcggcgcagactcacggcctacttatataatctcaccgatgccgagggcatggtttttgagaccgacgaggaaataaaggcctttttaagagaacagggctttctcgtgcatcccatgacccgtcgctgcaaggatttccacgaaattttagactacatcaaagaagtggaacgcattcgcggtgatttagatgtcatgatcgacggcatcgtccttaaaatcaacgacgtcgccaagcgcgacgcattgggctacacggtgaaatttccccgttgggccatcgcctacaaattcgaggcgaaagaagtggtcacgaaacttctcgatgtggaatggaatgtgggccgcacggggaaagtgacgccgacggccatcttggcgccggtggacatcgatggcgtaactattcagcgggccactttaaataattacgacgacattttacgaaaaggcgtgcgcatcggcggcgaggtacttttaaggcgaagcaatgacgtgattcctgaaattttagagggaatcggcgaagaaggtgatagaatagagatgatcaccaaatgtcccgcctgcgccacgaaattggtacaaaacggcgtacacagtttctgccccaataccatcggctgcgaaccgcagctcgtggcaagaatcgatcacttcgcctctcgggatgccatggacattacggggctcagcgagaagacggcggaaaaattaatcgccgccggccttttacacgaaatcccggatatgtacgcattgaagcgtgacgacctcatggttctcgagggcttcggcgaaaagaaggcggacaatcttttaagcgccatcgagaaatcgaaagaagtcagcttcaagcgctttatctacgccttgggtatcggtcaggtgggcatcaaaaccgccggcgatttggcggatcacttcgccgatttcgacgcccttgcaaaggcggatgcggcggagcttgagaccatcgaagacattggccctgagacggcgaaggagattcaactcttctttaccgatcccgtcatcggcggctacgtccacgatttaatggatgcggggatcaaactgatctacgaagaaaaaaagaaatccggcgtcctcgacggcatgaccgtggtgcttacgggcacgttgtcgaagccgagaagcgaagtgaaagcggccctggaagcggaaggggcgaaggttacgggctccgtctcgaaaaagaccgatctggttctcgcgggagaagcggcgggctcgaaagcggaaaaagcggaagaattaggcgtagccgtcttatcggaagaagcctttataagaaagtggggagacctcctatgaaaaaagacgaaatcagacatattgcggaaatttccaaactttatttcaccgatgaagaattggaaggcatggtaaaagaattttccgacaccatggatttggtggatacgattaagcaggccaatgtgcactgttcgcccaccttccatacgaatgtgttgcccaatcgcctgcgggacgacgaaattcgcccgtctctggatcgggaagacgccacaggcaatgccgtggccgtgaagtacggctacttcgaaatcattaaatttgtggaataaggaggcctcatgaatctgacccaattaagcggcttagaaaccagacaacttttcctcgacgggaaaatcacctgtacggaattggtggaagcctatttagaaaacattaagcgggatgacgaggatttaaacgtctttattaccgtcaccgacgagatggcccttgaaaaggccaaggagctggacgaaaagcgttcgaaaggcgaagaactcggcaaaatggccggcatggtcgtcaccataaaagacaatatcgccgtgaaagacgtgcgcatgacctgtgcatcgaaaatgctcgccgatttcatctccccctacgacgccgtggttaccacgaaattaaaggcggcagatgccattattatcggcaaggtcaatttagatgaatttgccatgggctcctccacgaagacatcctatttcggcaccacgaaaaatcccgtggacaggacccgcgtctccggcggctcttccggcggaagtgcggcagctgtagcggcccattactgttccatcagtctcggcaccgacaccggcggctccgtgcgtcaaccggcctccttctgcggcgtcgtgggcatgaagccttcccacgggagcatttcccgctacggcgtgacctccatggccaataccttcgatcaagtgggcgttttggcccacaccgtcgacgatgtggcctatgttttggaaatcctggaaggatccgatctccgagatgccacctgcatcggcaacgattcgctgaaggccgaagccataaaagcggcgaagcctttgagccaattaaaggtcgccattcccgacacctttaagtctttcgaagtggaagattccgtgcgagatgccttccaacgcaccgtagactatatgcgggatgcgggggcacaaattgaatacgtccacatcgccagcttggatttggccatcgccgtgtaccatattttggttaacggggaaatcgcgccgaatatgagccgcttcgacggcattttatacggatttatcgccgaggattacgacaacatcgacgagctctacatcaggacacgcagcgaaggcttcggcgacgaagtgaagcggcggatcatgatcggctcttatattatgagcatggatcactccaaggaatatttcgaacattctctggaaatgcgtcataccatgatgagcgaatttaacgaagtattcgaaacacacgacgtgatcttctgtcccacctcgccgacggtggcattgcctatcgacaaaaacatgacgccggtacaaatctacatgctggatttgtttaccgtccccgtcaaccttatcggtaccggcggcatcagcgtgcccgcatcgacgaaagacggtcttcccgtagggattcaaattattccgaagaagagccacgacaatcaagccattgccacggcgaaagaattggagggaaatatctaatgggttacaagacaattgtgggattggaaatccacgtcgaattatccacgaagaccaaggccttctgcggttgcgaaaatgcctatggcagagagcccaacacctgcacctgcccggtgtgcttgggtcttcccggcgccacccccgtgttaaacaaaggtgccgtagagcgggccattgaaaccgccacggcatttcatatgcgcatcaatcataaatccactttctccagaaaaaattacttctatcccgacctaaccaaaggctatcaaatcacgcaaacagacgaagcggtggccaacgacggttatattgaaattgaaacggaagagggtccgaagaaaatcggcatccatcaaattcaattggaagaagacacgggcaagagcctgcacacggaaaaaggcaccaccctcatggactacaatcgctgcggcgtgcccttggtggaaatcgtctccgagccggacatggcatcgggtttagaagcacggctctttttggaaaaactgagaaacaccctgcgctatttggaagtcagcgacgtgaagatggaagaaggctccttgcgctgcgacgtcaatgtcaatattaagaacacggaaaccggagagcgaagcgccatttccgaagtgaagaatctgaactccttccgtgccgtggaaaaggccatcgactacgaagtggcccgccaaatcgagctcatggaaaagggcgagacggaacttcgcgctacccgccgctgggacgatgcggaaaataaaaccgtgattatgcgtgtgaaatacacggcaagcgactatcgcttcgccccggaaggcgacttgggcccgctgtttatcgacgacgaatggatcgaaaaagtgcgcgcgggcatggcggaacttcccgatgtaaagatcgcccgctttatggacacctacggcctgaaggcatacgatgcgaaagttatctgcggttcgaaaaaagtggccaactattttgaagaagtggccaaacactttacggactacgacatgctttccaattggtttatgacggaatttttgcgccgcattgaagtctccgacgacggtgaaatgaacgtccccttcgaaggcaaagacttcgcttaccttctggagcaaatcaagtccggaaagatcaacaacaatgccggaaagaaagtcttccgcaaaatgtgcgaagaaggcaaaaagcctgaagccattatcgaagaagaaggcctggtgcaaatcggcgacgcctccgaaatcgaagccatggtgaaggaagtcttggcggataatcccgagtccgttgaacaatacaaggcgggcaaagaccgcgtcgtgggcttcctcgtaggccaagtcatgaagaaaagtcgcggcaaggccaatcctcaaatggccaacgaaatgctcgtgaagtttcttaatcaataagagagggcatgtgcagtggaaagtgtgattacttcggccattacccaatacggttacttggccgtcttcgcattgatttttattgaaaatgtgtttccgcccattccctcggaagtgattttgcttctcggcggcttctttgtcgggcggggcaatctgtcctttcttcccaccaccttgtcggctacggcgggctctcttttaggggcctatatcctttacggcatcggccgtttggtgcccacggtaaaaatatacgactctgccgagcacggttggatgggaaagctgggctttaagaaaaaagaaatcatgggcgtggtgaatacgttcgaggacaagggaaagatcctcgtcctcgtcggccgctgcgtgcccgtggttcgcagcttgatttccattcccgccggcatggtatccatgcggctttccgtgttttctttactcacggcggcgggttctttcgtatggaattgcgtgcttacctttctcggctacaagaccggcgaaaattggcacgtgatccttacctatttggattactacaaatatgccatcgtagccatattggcggttatcgccgtctgctacttgatttggcattttaagcaaaagggtgcagaatgaaatataaacgcatggaagaagcggtttttcttaacagggaaaatcgctttattgctatggtagaaaaaaacaatcaaccgattcgggtccacgtacccaataccggccgatgccgggagcttttcgtccccggcgtaaaggtgcttttagaaggggcggaccccgcgaaaaaacgaaagaccccttatagcttggtcacggtttacaagggggaaaatcccataaacatcgactcccaggcccccaatcaattggcggcggaatattttgacggtgggccctatttaaagggcttcggaaaaattctctcctacaaacgggaggtcaccgagggggacagtcgcttcgacttttacctcaagggcacagagggcgagggctttttggaagtgaagggcgtcaccttggaagaagacgggctggcgaaatttcccgacgctcccaccgtgcggggcgcgaagcatctccgcgaattaggcgacatggctgctgaaggaaaatgctgcggcgtgttatttgtggtgcagatgaaaggcgtgtggggctttacgcccaatgaagcgatggatccggacttcgcctcggcactgagagaggcggaagtgaaggggatgaatgtattcgtcgtggacacttccgtggacggtcagatcatggccgtggacaagcccgtggtctatttcagcaaagcaccattggatctcgtgcaggcgaaagaaggggatttacctcgcgtcgtaaactttatcgattcagcccgggcggcactaaaggccgacggcgtggatcaatggcagggaaaggaccccacgccggaggatctcttggaaaatatcaaggccggctgttgctacttttttaaagacgatgccgtcgcgggtatggccgtattaaaagaaggggcggatgcgacgtacgatgttatcgacggaaagtggcttaccgatggggactacctcacgattcatcaattcgttgtcgatagtgaaagaaaaggcgagggcatgagccggcgcatgatggagcggatcttcgcctatgcaaggtttaagggcattcccgccattcgcatcgacacccacgccgacaatttccgtatgcgaggattaatcgagtcgtcgggctttacctactgcggtatcattaccgtggccgacggcaccgagcgggtggcttatgagcaggtgattttatgaagcgactacttttatctgccggccattccggcgcgggcaagacatccattaccatgggaatcatcggtgccctcattcgccggaacatgacggtggcatcggcgaagatcgggcccgattacatcgatcccatgtatcaccgcgccctcggggcgtacggtgtgaatctggatcgccatttgatggatgacgagtacattctccacctcatggcccgattggagaaaaaggacgtcatcgtcatggaaggggccatgggttattacgacggcatggccaccacgacgacgtgttcggcggcggagatggcgaatttcacgaagacgccgacgatcttcattgcatcggggcggggaaaaggcgcgagccttggcgcagagctgcagggctttttaaattacgggaaaaataccatttcaggcgtgatcttaaaccacacgaagcccgccatggcgtcctactacgaaaaaatcatcaaagaagccacggaccttcctcttttcggctgcattcccgatttggatcaggatttgcccgagcggtatttgggtctagagcggccggaggagatcaaaaattttcgtgccttcgccgatcaatgggcggatgtcgtggaaaactacgtggacttagacaagcttctcgccgcctgcgaaacgaaatccgtaggccgcgaaatggcgaggactcctcagcgggaaaaaatccccgtggccattgcgaaggacgaagcctttttcttctattaccaagacgtcctcgacgatctttccgggcgcggcgtggaatggattcccttctcgcccctcacggattctctgccgaaggggatctgcggcgcataccttggcggcggctatccggagctgtacgaagaaatcctcgtgaaaaataaagccctcgggcgggatttaaagtcctttgcggaaaagggcggcgtccttatcgctgaaggtggcggatttatgagccttttggaaaaaatcgacggaagcacggccttcgggctttttcccggcgaggcgataatgaccgaccgactgcaacacttcggctatcaggtaatagcggcggaagaagacgggctccttttaaaggcaggcgaatcgtcgcccgttcacgaatttcactacagcgctgccgataatgagggtggggaccttctcatccaaaagccgggcggcagagcgaaaaggcgtacggcacatcacgaaaaaaatgtttatgccggctatcccgagcttcacataagcggcaatgagaaactgagagaaaatattctgaaggcattaaaggaggcgacaccgtggcagggttaatggtattgggcacggcatccaacgctgggaagagcgccatggtggcggcgctccttcgcatttacgccaacagaggctaccgggtggcgccctttaaggcccagaacatggcgctgaacagcggcatcaccgacgacggctcggaaatcgggcgggcgcaaatcgttcaggcggaggcggcgcggattccagccgacgtgtgcatgaaccccattctcttaaagcccacggcgccgggggtgagccaggtcatcgtaaatggccgcgtttacaaaaatctcgagacccgcgcctattacgccgaaaagaaaaaactctttccgaaagccctggcggcctacgaatccttggcccacgagttcgacttcgtcttgtgcgaaggggcggggagcgcatcggagatcaatttaaaaagcgtggacatggtgaacatgggctttgccaaggcggcggacattcccgccatcttgatcgccgacatcgatcgcggcggcatgttcgcctctgtggtaggcacatgggagctcttcgacgaggatgagcgaagaaggctcaagggcatcgtcgtgaatcgcttccgcggcgacgtgtcgattttagagccggggctcaaaattttagaagaacgcaccggcgtccccgttctcggcgtcgtgccctacgccgacgtgcggttggaggcggaagattccctggccatggaattccgcgaaacggatcgtgcatccgtggacatcgccgtggttcgcctgccacacatctccaatgttaccgacgtggcgccctttcagatgatggccgatgtgtccgtccgtgccattacgcgagtggaagaattcggcaagccggatctcttgattatccccgggacgaaaaacaccatggccgacttaaaatggctgaaagaaaccgggatctatgcccgcatcctgcaacacgccgagaggggcggaaacatcttttccatttgcggcggctttcaaatgatgggagacaccctttccgatccggatgccgtggaaagcggcggcattatggaagggctcaagctctttcccatggacaccgtcttttcgagagagaagaaacagtgccgcgtagaaacgacgattaccgcatctgaagggctgcttaaaaatctggaaggagaaaaagtgtcaggctatgaaatccacatgggtgagagcaaaataaaagaggcggacgaaataggaagcctgacggaatccggcggcatcgcaaagaacggccacctctacggcacctacatccacggctttttcgacgcacctcacatggccgagaggatcgtcgcggcactaaagaaagaaaaaaatctgccgcagcaagagaccatgaactacgccgcctttaaagacagccagatagaaaaactggcagctgtggtggaagaagccttggatatgaagaaactggatgaaatcttgggcttgttgtaaagggaggcgaccattgaagatactgatgatcgaagatgacgagaccatcgtctacggcgtgaaaacttatctggctcgttacgacatggatgtggtggcggcgagtcgattgggtgatgtgggcgaagagcaaatacgctccgccgatctgctcattctggatgtaaatcttcccgacggatcgggtttcgattttttaatttgggtccgttccttttccaaactgcccattctcatgcttacggtaaaaggcgacgaagactatgtcgtgaagggcttgtctcaaggagcagatgaatacgtggcgaagccattttcccttcccgtactgaaggcgcgaattgacaatcttttcaagcgacgcggaccggaagaagaattgctggaatttaaagagctgatcttggacaggcaatcgaagatggcaatcttgcgggacgatgcagtggacttaaatagacaggaatttgatctgctggccatgctattggcacatcggggcagacaattgttgcgaagccaattaatcgacgaggtgtggggctttggcggcgaagttaacgataatacactcaccgtcgccgtgaagcgccttcgcaagaagctgggaccttacggccattttataaaaactgtgcggggcatgggctatttttgggaggatggcgatgactaaaagacagactctgttgatcctttcgctgaatctcgtcctttccatggttgtagttgctttctttccgcgcttcgattggttgaccgtcgcgctatttttcatgattaacgcagggctttactttgccatcgatcgctttgaagggaatgcttccatggaagttgaagagaagatcgacgacatgatccgcctcctacatagttcagatccggagtctcgagtcgatgaggccgaagaagacgatttttctaagctgagagatgaaatcgtgaagatgacatcagaaaataagcgcatcgctcaagaggctgagaaccgtcgcgttcaactgacggagtatacggaagatatcgcccatcaaatcaagacaccaattacaggcaccttgcttatgctggatctcatcgacgatgcatcggacaaagaggcccttgaacgtatgggccgatccatggagcgcctcttgggcctttccgatgcgctactcaaattggcggcagtggatagtgacgtggtggcgatgaaaaaagaaacggtagacggtatggagctggcgacatccgtggcggaaggattggaaagtgccttcgggagagaaaagaccccttgcactatttatggcgaatcagtggctctttattgtgataagaaatggacctacgaagccctgtttaatctggcgaagaacggcatggaagcgtccaaagaaagaggcatcgccatgactttcctagaaaccaatgtctacaaatccattgtcgtcgaagatttcggcgaaggcatggatcgggacaccttggaacaagcatttcggcgcttttataaaaaagatcccaacacacccggctttggaatcggcctccccatggcaagggcgattatgaaaagacaaggcggcgatctcctctatacaaaaggcaaggaatcaaatcgatttgagctgcgcttttacgaataaacgaggcatcggtactcggtcaccgaccggtcactttcacttgatatcgtaggctcagaaaaggaggaaccctatgcctattgtaaaaacagtgaatctaacgaaaacctacggtcggtcggtggaagtacacgcactggacggcgtgaatttccagttggaaaaaggagacttggtggcaatcatcggcgacagcggatcgggaaaatccaccttactccaccttttggcgggcatcgacaggcccaccggcggcgaaatttatattcaagataaaaacattaccacccttagtaacgaggaaatgaccattttccgccgacgaaacatcggggtcatttaccaattttttaatctgatcccgaatattacggcgcggaaaaatatcttgctccccttgcttctcgacggaagaaaggaagatgaagcttattttaaagagattatttcgattctcgggatcgaagataaattggaccgctatccgaaacaactttccggcggcgagcagcagcgggtggccattgcccgaagcttaatcacgagacccgccctgattttagcggatgagcccacgggaaacttggatcggcgaaattccgaagaaatcactgcccttttccgattggtcaacgagcgcaccggctccaccatggccatcgtgacccacgatgaaaaggtggccaacagctgccaaaaagtttttcgcatgatcgatggaaaactcttcccttcggaggtgtagacgatgaaaatcattggtgaattagctgcctccgtggtcaacgccggaaaaaaagacgccttggcggtaaaaacaagcatactgcttgccgtgatcctgctgggaaccattctcttcatcactacctctttaagaaaagcggaagttgattttgccatcgccgattcaggcgattaccacgcgtccattgccgaggtcgacgcctctttttacgatgagctaaaaaagaatccggccatcgaaaaaattgccttcgatcgcattgtaaaaacggaccgtaacgccgtgatttacgaacgagaggattatttcaatcaattaaaaagcttcaaacccgtcgagggtaggcggccggaaagagacgatgaattgttggtgcccgattcgtttttgaagcgcaaccgggatctgcatttaaacagcgcattggaggcggaggggaagacgtatcggatcgtaggcgtttatgaaaataacgaaatatcatttgaagagtcttatctaatcggacgcttgggagatgtgtcgaaagacgagctgttcgaaggatcaagcggaatcgaagcctatatttggtacaaaaatccacgagatacctacaccctgactcgagaaatattacagaagcaaggcatcgatccaaaagtggcggaaagtcaggggcgattgggctacaatactccgttattgaattataaaatgatctatcccaatggaattattccgccgagaactgtattatctgaggcattggactcttatattcccataagcatgttggcgctcttgtttgcctttattatttacggcgcttttaatgtgtggaacagtcgagatcagcgggagatcgccctgttaaaaagcgtgggcatgacggagaaacaagtaaagaaaatgatacgcaggcgtgcttttcttttggcgaggggaccgattctgctgggcacggctctgtcctatggtgtggccaacggactcttgtatttaatatggcgcaacaatgcaaagagtattcatgccgtgggtgatatattaggcgagcgaattaaggcaccggattttcaatctgtgagcctttcgccctatgtggttttggccattttaattttatctgcggcgacggtctatctatccgccatggtgccggcgaagcgctgcgggaaattaaatattatcgagggattaaacggcctgtcggaaaaagacgggcggctgggtccttcgaaagtaaggggaaaaattgaaaagacgttggccaaggattattacctttcttacaagagaacttaccgaacgatccttttatccacggccctttcggccgtgattctcaccgtggtgatggtctccggcgcctatggcgagctcactgaagcctacgacaaatttcgcagtccctatactttttcatcaactatctttacgccgggatcgatggatccccaaatgaccgaagacctaaaggcactaaaaggtgcggatgaatggcatttatatcgcaaacaagactttaagtgctttgtcgcagacaatggagcgttcttttcggcacctatgaaaaaggcgttaaaagatggaaagaagtccaaggaattgtatgccaggctgtatggacttaccgacgaggattacgagaagcttttggcagcgaatggatacgatagcgatacggcgtatttgctcttaaataaaaccgccgccgacgacggaagtccctatgcctttcggaaatacattcccgtcaccgacggaagcggcgctgtgaatctacgctacagtgcggagggcaaggtgatggccatcggcatcggtggcgtgatcgacgagatgcccttcgccatcgagcccatgacggcccgcgaagtctctctatttacgcgacaatccaccatggaggcctttttccaaaaggaaggacacgatccggcagatccggtcaattactacaatataaaaatgcgtgcggacaaaaacgtggacaaaatatctgaagattttgagaaagtcatcgcatcttatattccgaaaaccgaccactccaccatgactcaagccatgaatcgggccttggataatgaggcggagaggaatgtacgcgtactgaacggaggcattcaaggaattctcatcctcatagccttgaccaatgcctacaatagctttaacggcaacttgcgggcgaggaagagagagtttgaactgcttatgacggcgggcatgacggaaaggcaaatgaaatccatggtttacagagaaggcggcatgctctttttgcgcttacttgtcctttacggtatcttgcttcccgtggtcatcttggggcgatcggcgaggagcaaattcgccattgctttcgccgcgaaaaatctttttctcacgacgaactatttgcctattgttttggtcttcgtcgtcatgggcatcgggatcagcttttccataagaaagggtttagagcaagtattcgttgatgacttaaattgaattgcactcaaaaaggacttcccaaggcggaagtcctttttccatgaaaaaatcggcacaagaagccttatgccgattcgtattattattcgacggtgacggatttcgccaggtttctcggtttgtccacgtcgttgcccaaaaggacgctcactttgtaggcgagaatttgttggggcaagacggcgagaatgggggcatagagatcggaaatggcggggatgcgaataagatcgtcggccacttcgtcgatgtgggcgctgacgtcgtcggtgatgacgatgttgtaggcgcctctggccttcacttctttaatattggaaatgcttttttccacgagaagggattgagtgataatggtgacgatgggaattccttcttccaccaaagcgatactgccgtgctttaattcgccggcgggcatggattgggcgtgaatgtaggaaatttccttgagcttcaaggcgccttccttggcgcttaaatagtcgatgccgcggcccaggtagaagatggcccggtgcgaggcgaggcgcttggcgatgggatccaaatcgtccacatggtctaaaatggattcgattttttccggaacgccggagagctcttcgatggcaactttcactgcttcttcgtcgtaggtgcccagtttgtagccgaagtccagggccaaaagatagaggctcaaaagctgagtggagtaggccttggtgctggctacggaaatttccgggccggcgtcgcagtaaatgaccttgtcgctttcgcggtcgatggaagaacccagcacattggtaatggcgaggaccttcgcgccccgttgtttcgcttcacgaagcacggccaaggtgtcgccggtttcgccggattggctcacgacgatgagcaaactgttttcgtttaagaaaggcatattgtagcggaattccgatgcgatttctgcggtaatttctttttgcatggcatcttccaaggcgcgtttgcccacttcggaggcgtggaaggccgtgccgcaggcggtcataaagacgtggtcgaaggcttcgatttcatctttcgtaaaggattggtcgccgaagcttacgaagccgtcttttactttgcggcgcaaacagtcgcgaatggccttgggctgttcgaagatttctttcatcatgtagtggtcgaaaccttctttgccggcgctttccatgctccattccacggttttgatttccttgtcgatgaccttgccgttgttgtagatggtgtagtttcccccttcaatgaccacaaggtcgtcgttatctaaatagatgacgtcccgcgtataggccaagagggcggggatgtccgatgcggcgaaaatgccgtcgtcggcgatacccaaaatcaagggcgattctctgcgggtaacgattaacgtttcaggatcgtcgggggagaggacggccaggctgaacgtgccgcgaagttctttcgtggcttcttccacagcggcttttaaatcgccgtgaagcttcgatgcgattaaattggccaccacttccgtatccgtttcggaatagaaggtaaagccttcttccatgaggcggtttttaatggcctggaagttttcgatgatgccgttgtgtaccacggccactttgtggtcgcaggacacgtgggggtgggcattggtttcgctgggcacgccgtgggtggcccaacgggtatggccgatgccgttgtgcccctccaggggatggacgcgaagcttttcttccagcgcttccaaacggccggcggcctttgttacttttaataaaccgtggtcgatcatggcgatgccggcgctgtcgtagccgcggtattctaatttttcaagtccctgaagaatgcgctcttcagcattttccttgccgttaaaggcaacaattccacacataatatcctcctaatctcgggagctgccgtattgattttgtgccgagattgctccgggttttgtacaatactcaggttgcagacctatgaagcatccgccgaaaattcgatcacttcatccctcgtccacctaaaaggtgctggcgcttaaattcttctcccgtttaaataaattgcgtacgtatttcattataccatagctttcgcatttaagagaaccgcgacaatcttgacggaaacacaggggattgttatgataaagagcagtaaaaggcaaacagccacgatcattaggaggtaatttaatgacagaagcaaataaagtattggcgtccatcggcaatgtagatattcacgaatccgatgtcgatgcctatttaaagagcatgaatccccaaatggccatccaattccaaggggacgaaggcaaaaaacacattttagacgaattggtgcgtcaagagcttttgctgttggatgcattggacaagaagatggacgaagacgaagaatttaaaaaggtctttgcggacacgaagaagtccctcttaaaatcctataacttcagcaagaccattgaaggtgtggaagccacggaagaagacatgaagaaattctacgaagaaaacaagcaattcttcaagaagcctgaatccgttcacgccgcacacattttagtcgacgaggaagctaaggccgccgatctcgccaagcaagcccgcgaaggcgccgacttcggtgaactggcgaaagaacattccacttgcccctccaatcaaaacggcggggacttaggctccttcgcccgcggccaaatggtgccggaattcgacgaaaaagtcttcggcatgaaagacggcgaaatttccgatcccgtgaagacccaattcggctaccacatcattaagcgcatcgaaggcaatccggaagaagaaaagagcttcgacgaagtgcgcggcgaaattcaaatggaactgacccgccaaaaacaacaagaacgctacttggaaaaagtggcagaactggaaaagaaatacaaagttgaatacaaataaaatgagcggcttcggccgcttttttgtttacgaaggctgattttatgcgttttttgcttttcagatgactttttcgatccgtgagaaggaccgttttccttcacgattctgtgatatactggttctatgtcagggggtagatatggaactggatttattcaactttattgaccgctccatcgcgttgttaaacaacaaatacgacgccattgctgagctggagcgagagcttgaaaatttttttgaaatggaatttaaagacaacgacagctttctggcggtcaattcacgaatcaaatcggcaaactcactaagagaaaaaatcattcgtaacagcctctatatgcgctacgacgacgccggtgaaatgcttcgaaatatgcaggatattatcgggctcagaatcgaatgtcgctttaccgacgacgagttgtccatttaccgagccattaaagatctgttttacattcccgtggaaaatggctactatcgttcgccgagccacaagcatattttgctggatatggaaacggctcagcccatgattcaaaaaaacggcttcggaatttataaaatcgacggcattataaaaaacggcgacgagcagatcaatttcgagctgcagatcaagtccctggtcaatgtcttctggggcgaaatcgaccacaaggttctgtacaaaaactacaattacatgctcacggaagaatttttccgagacattatgcattccattaaggacaatttatccatgatcgaccgccaactgcggatcctttacgagcacgtcaacgacatggattcttctgccgtgaaaagcaatcacaagcaggtgaaaagcctgttgtcgaaaatcattcacgatattttcgtcggcaccattcgcaaagaactgggctttgtcgtggatttcaacgaaacgtcggacattattgtggattacctcgactacaaatgccaagccctcctggattacgacgaaggggaaaactttattcgcctcttgaatcgaatcaatcacatcgaccaacaggaatttaaagtggccgaaggcgtcgaattcgaccggaagccgacctttaccacggcctttaccgatcgcgtgggtcgggcggtgtacgccattatgcccagggaattcggctggaatttattttttaagatcatcgccgaaatcgagcaatcggagccgaggatcgacttcgaagaatttttccgctacttggaaagtctgctcatcggaacgattaaacgagaggtggacagcaagggctttaccgaagaggagtacgatgcgctcatcgactttatcctcaattgctacgcttccatggtggaaaaagatccttccatgaaccacatgatcagcagttattacggcatgagcacccattccatttcacaggtattcagaaacattcgatcctacgaggattttgagaaaaacaagacgcgcatccagcgcatgttaaactgacaggaggcagcatggcagaaattattttggccggcggttgcttttggggtgtggaagaatatttcagacgcaccgagggaatcaccgacaccgtggtgggctatattaattccgacattgccgatcccacgtatgaagacctttgctacggcaagagcaaggcggcggaaggtgtgatcatcgaattcgatcccgaggtgatttcccgggaaaggatcgtggatttattttataaaatcatcgatccctacagctatttccgccaaggcaacgacatcggtcgccagtaccgcaccggcctctattatcgtcccggcgaggatgccttaaaggccttttatgaagaggataaacagaagcgacaaagcgtatcgacgcgcaagatttgggtggaagtggcgcctcttgaaaactttacgaaggccgaggaataccaccaacactatttggtaaaaaatcccggcggttattgccatattcctttaccgaataaaagcgaaaagtaatgacgaagcggcttgtttcgtgtaatatgtactataaagaagaggtgatagagtgataaaaggtttaaccggcgattcaccggttttaaacttttttgctgagattacggacataccccgttgcagcaaagaagaagaaaaaatcagcaattacctggtccaatgggcaaaagcgcgcgagcttgaagtcattcaggacgaatggaaaaatatcgttattaaaaagcctgcatcgaaaggctacgaaaatgagcccaccgtgattttgcagggccatatggatatggtttgcgaggcggtgaaaggctacgaacacgacttttcaaaggatcccatcgaagccgtcgtggaaggcgatcgcatcatcgcgaaaaacaccaccctcggcgccgacgacggcatcgccgtggccatgatgcttgccattttagacggcgactacgagcacccggcgttggaatgcttggtcaccgtcgaggaagaaacctccatggcgggcgcccataccatcgacggcaagtatttcgaaggccgcacattaattaatatcgactcggaagatgaaggcattattaccgtgggctgtgccggcggcatggtgtccaacattatcttcaaaaaagaatttaagtcccccgaaaaggatgcattcctcgccattgatctcggcggtttccgcggcggtcactccggctccgacatcgacgacgaaagaggcaaccccattctcttgttggcgcggatcttaagagaagtctcctatcaatatgatttcgagttggcggatttctccggcggttcgaaacccaatgccattcccagagatgcggaagccattatcggtgtcgacgccaaagatgttgaaggcatcaaggcggcattgaatgcatcagccgacacgatcttcaaagaatttgtcgccacggatcccaatggcgtactcaagattgaaggcgcatccgccgacaaagtcctggcaccgaaggtggccgacggcatcattaattacctgcttgtcgcgcccaacggcgtcaacaccttcagcaaaaaaattgaaggtttggtggaatcctccaccaacatcggcgtagcggccagtgacgatgaaaaattcgtctttaccatgcaaatccgaagcgatgtggaaagcaagattcatgaaatcgccttgaaaaaccgcattgccggcgaattgggcggcggcacattcgaagaactttccgcctacgcgccttgggaatacgcggaagaatcccccttgcgggataaggccgtgaaattatggaaagacatgacaggcaacgacgccacggtggaaatgatccacgccggtttggaatgcggcattttgcaagattccatcggtaaaatggacatgatttccattggtcccgacatggagggcgttcacgcccccggcgaaaatctatccatcgcctccaccaatcgggtcttcgattaccttcttgaactgttaaagatgaaaggataaatatgagccacgaacacgatcacgatcacgaacatgaacacgaggaaatggacgtcattacgttgaccctcgatgacgacagcgaattggactgtgccgttatcggcattttcccctacgaggaaaaagactacatcgctttattgcccctgaagggcgatgaagtggacgaagacgcctccgttctgatttatgaatacgccgaattggaagacggtgaattggaactgatcttcatcgaagatgaagactatttcaaccacgtcgccgatgaattcgaacgtctttacgcagaagacgaggaagactaaggagtttaccattacggaaacacgaccctatcgaagtttcagcgattacgcaaaagacaccttcggcatgaaagtgtacaaggtgcccatccatcttaaaggcagctgtccaaatcgagacggcaccgccggggtgggcggctgcattttttgcggcgaagaagggggaagcttcgaatggatacaaggtagcgtacgggaacaatttcaaaaaaacaaagcgcgcatgaaagcccgctacaaggcccaaggctttatcccgtattttcaaaattttacaggcacctaccttcccctggcgcaatttaaagaaaatttagaggcggtggcggaagaagacatcgtcggcgtctccatctctacgcggcccgactgtgtggacgatgcgtatttgtcggcggcgaaggaaatttttccgggcaaggcgatcacttttgaattgggcctgcaatcggccaacgaaaagacattgaaagtgattaatcgcggccacggcacccgcgaatttattgatgcagcgcatcgaatcaagggcaagggcctgaggcttacggttcacatgattttggatctgccttgggacagccgagaggatgtgcttcgaggtgccgaacttttggcccgcgttggcgccgatgaagtgaagattcacaatctttacgtggcgaagcacaccaagctcgccgatatgtatgaggccggcaccttcgtgccccttcccatggaagaatttatggagcgggtcatcttatttctggaacatctgccgcctgagacggtgattggccgcctcttgggacgtgccccggaagaggatgtcttgttcgctaattggaacagaagctggtactacattcgcgacgaaatcgtgcggcgaatgattgaggaaaaccgaccgcaaggtcatttatataggaaatagagaaaggatgatgacaatgattcgttatatcttaggagcaaaaggcgcaggcaaaacgaaatggttaatcgatcatgccaatgaagaccacgaaggcggcaacggcaatatcgcatttgtcgaagttgacgacgatcacattttcagcttggactacaatgtacgtttaatcaatgccacggaatacaatctcaccaatttagatgaattctacggcttcttaagcggcatgttcgccatggactacgacttggaaaaagtgtatgtcgacggcatgtacaaggtcatggatctttccattgacgacttaaaagatttggccgatcgcctggaatctttaggcatggaaaatcgtcaaatttacattaatgtaaactacgtggaagcagacttcccggaagaattaaaacaatacgcacaagaagtttctttggaaggctaataactgacaggggattggaatgaaatcgaacaagacatttattcgaatcgtggccgtgatcttatgcttagcaatggtgttgccggtactgatcaatgcattcttatgatgacgacccgataaccatggagccgatttgcgacaaatggtttgagcacttcatggaaaggcgaagcgccttgattcgcgcctatgagcggggcgacttaaacaaaaaggaatttttgcagacgaatttaaaggatatgcacaacagcaatgtgcgccccttttttctcatcgatcgattggaaaaagggatctttaattaccaatactacaacgctctggccaaaagctatcgcatggaagccaggcgtgtgaagcggatgcaaaaaggcaatcgagcctattgccgctccctttctatggctgaaaagtattacggaaaaaaagacgacacgatcttggagatccttgattttgtcgattataaaaatatctacggttacttcgtccattgcaacggcaagaaattgcaaggccgtctctttgagattgtctttatcgagtatccggagtatattttgcattccacctctgaacgggtatatcaagccttggtcgatcacggtgtctttatggaagaaaaaaagcgttccaaaatcgacacctacattaacgacaggtattaaaactgagaaaggggcaaagattggattacaagcatttaaaacagacggatcccgcgatttatgcgctggtacaaaaagaaaccgagcgacaacggagccacatcgagcttatcgcttcggaaaactttgtctctcgcgccgttatggaagccatgggatcgcccctcaccaataaatacgcagaaggtctgcccggcgcccgctattacggcggctgcgaagtggtagacgaagtggaacaattggccatcgatcgctttaaagccctttacggcgccgatcacgccaatgttcagccccacagcggtgccaatgccaatatggccgtgtacttgggcttgttaaagccgggcgatcggattctgggcatgaatttaagtcagggcggccacttgtctcacggcagcccggtgaatatttcgggaaaatacttcgacatcgtggactacggcgtcgatgaaaagacgggtcgaatcgattacgaagccttcgaagcggcggttaagaaatacaaaccgaagctggtcatcggcggcgcatcggcctatccgagaaaaatcgattttaagcgcatgagtgatgtggtgaaggcgagcggtgcctactttatggtagacatggcccacatcgccggccttgtggccacgggctatcacgaaaaccccgtgccctatgccgatgtggtgactaccaccacccataagaccctgcgggggcccagaggcggcgccattctctgcacggaagcattgcacaaaaccattgacaaggccgtgttccccggactgcaaggcggccccttggaacacgtcattgcggcaaaggccgtgtccttctacgaagcggcccaaccggatttcaaagtgtactgcaaacaaatcatcgacaatgccaaggccatggaaagagtgttcttggatcaaggcgtggatttggtctccggcggtacggacaatcacctactgctcttagatcttcgttccctgaagatgacgggtaaagaggcggaaaaactgttaaacgacagcggcctcgccgtcaacaaaaacatgatcccctacgatcccgaaacgcccatggtgaccagcggcattcgcatcggcaccccggccatgaccaccttaggtgcgaaagaagaagacgcagcctatgtggcacaaatcatggtggatcttttgaaaaaagacattgcggaagacgaagcaaaagaccgcgtgcggattttttgcgaaaaatttcctctgtacaaataaagcgggaaggactcgaaagagtccttttctattacggcaacaggaggcgccatgaacccttatgaaatcgacatcgttcataaagcattaaataccattcgctctgtcgatcccgggtccatcggcgaagagctggaaatcgaagccggcgaccgcctcatcgccattaacgataacgaggtgcgggatgtgatcgactaccgctacgaatcggccaacgaatacattaccctcaccatcgaaaagaaagacggcgagctgatcctctacgacattgaaaaagatgtggaggagcccatcggcctgaatttcgtcaccccgcttttggacacccaaaagacctgttccaatcgttgcctcttttgctttatcgatcaaatgccgccgaatatgcgcgacagcttatacattaaagacgacgattcacgcctttcttttcttcagggcaattacattaccctgaccaatataaaaaaagaagatttcgaccgcatgatcgcctacggcctaagccccattaatgtgtcggtgcacaccaccaatcccgccctaagggtggagttgttaaaaaatccctcggcgggcaagatcatggaggacatgaaacgtttggcccatgcgggcatcgtcatgaacgcgcagatcgtgttgcttcccggcgtaaacgacggggaggagttgaagcgcacccttcgggacttggcctcgctcatgccccaagtggcctccgtggccatggtgcctgtgggactgtcaaagtatcgcgaccatttgccgaagctttctccttacacgaaagaagaggcgaaagatgtcatcgccatcgccgaggccttcggaaaagatatgcgtaaaaaatgcggccgccactgggtctacgcatccgatgaattttaccttatcgcggaaaaagatcttcccgaggcggatttttacgacggctacccgcagtacgaaaacggcgtgggccttatgcgctccttctacgaagaatttaaggaggcgctggatcgggcggaagggcaataccgctcgaaaatcaccttagctacgggagaatatgcggcgcctctctttgaggccttggccgccatgattcacgaaaaattccccggcattcaatgcgacgtggttacgatcaaaaacgactttttcggcgagacggtgaaagtggcggggctcttgacggcggaggatgtggtccgtcaattgaaaggtaaaatccacgatgctataatgttaccaatgtcaatgtttcgaagcgatcacgccattacattggacgatgtcacggtggatgctttggaagagatattaggcgcgaagattattaccgtaagcaacaatggtgcggaatttttagaaaaatgtttggaggtgcgtcctgttgaatagaccggtcgtctgtatattaggtcgccccaatgtggggaagagtaccttatttaatgtgctgacgcgctcgaaaatatccattaccgaggatacaccgggcgtgacgcgagacagaatctatgccaaggccacttggctcgatcatgaatttactttaatcgatacgggcgggttggatccctccagcaacgaagcctttatgcctgaaatcatggcccaggcggaagtggccgttgaaaatgcagagatcattttatttgtcgtcgacggcaaagaaggcctgaccaccgtggaccgcgaggtggcatcttatattcgaagaagcggcaaggaagcccttctcgtcgtcaataaaatggatgccaaggaatcggaagaccatcgctacgatttctacgaattgggcttaggcgagccctattccattagcgccgagcaatcccgcggcatcggcgatttgctggatgccacggtggcgtcctttcccaaagtggaggaggatgacttccgcgacgaaatcaaagtggcctttatcggaaaacccaatgcggggaaatcctctttggtcaaccgaattttaggggaagagcgctccatcgtcaccaatattcccggcacgacgcgggattccatccactccttcttcgaatacgaagatacggactatgtgcttattgacacggcgggccttcgaaagcggaaaaaaatcaacgaaaaagtggaacgctactccgtggtgcgtactttaagaagcatcgagttggccgatgtgtgcgtgcttttaatcgacgccacggaagggatcagcgaacaggattcgaagatcgcaggctatgcccacgacaacaacaaggccatgattatcgccgtaaacaagtgggatgccatcgaaaaagaaacccgcaccatgaagcaatacgaagaagccattcgcatggagctgccctttttaaactacgcacccatgattttcatctcggcacttacaggttctcgcgtggaaaaattattgaacatgatccacgtggtcaacaacaattactccctcaggattcaaaccggggtcttaaacgacattatgaaccgagcggtcttaatgaatcagccgccttcggacaagggcaagcgcgggaagctttactatgcgagccaagtctcggccagaccgccgaaaatcgtcctctccgtcaatgacaaggagcttttccacttcacctatttgcgttatttggaaaatcaaattcgcgcggcctatcgcttcgacggcgtgcccattattttggagctgaggaatcgatgaatacatttctcgtgctgatggcctgttatatcgtaggctccgtctccggcgcctatttcctgagccgcctctttttccacaaagacattcgcgacgagggcagcggcaacgccggcaccaccaatgccgtgcgcgtcatgggaaagaaactgggctatactacctttgccatcgacgtattaaaaggcgtggtggccatggcctttctcgcgcccatgttggacgaatccattcggctcttcgccgccctcttcgtcgttttgggccacgactttcccttttacttaggttttcgcggcggcaaaggcatcgccacatccttcggttcgtggacgacccttgagcccctatcgggaggcgtagcggccatagccggcgtcatcgcagcgaagatcacgaaatacgtcagcgtcggatcattgacctttcttaccattagttgcggggccatgctcgtcaaatacggaggcgtcggctacaatcgctgggcgatcctcgccgtgtggctcttggggtttattcgtcataaagacaatttgattcgcttgaaagaaggcagagaaaacagaatcggaggttgattcggtgaagatcggaatattaggttgtggcagttggggaagtgccattgccaatctcttggcccgcatcggccacgaggtgcacatgtacacccgcaatgaaaagcagtatgcgcggattcaatcggtgggagacaatcccggttacttggaggactttgcctttgatccgacgattcaggtgcacctgtctgtaaaggaggccattgaaggggcagacggcatcgtcttggccgtgcccaccggtgctgtgcgcaccaccatggaagccgtggcccgcgagggatcgaaggcccccgtcatcaatctcgccaaagggctggagcaaggaagccatttgcgcctttctcaagtggccaaagagatcctgcccgattcgccctacatcgtcttatccggcccctcccatgcggaagaagtggcgaagcttatgccgactacggtgctggtgtgtgccgaagacgaaaaagatgccctttgggcgcaagatttatttacttacgacagcttccgagtctacgtacaagatgatatgatcggcgtggaaatcggcggcgcgttaaaaaatattatcgccctcggcgccggtctatccgacggcctgggctatggcgacaatgccaaagccgccttaatgacccgaggcttaactgaaattcagcgcctgggcatcgccctcggcgcaaagccaattaccttccaaggcctttccggcatcggcgatttaatcgtcacctgcaccagtgtgcacagccgcaactggcgcttcggcaacctcatcggcaagggcaaggcggcggatgctgccatcgaggaagtaggcatggtggtggaagggtataagaccaccaaggcctgctacgagctgtctcgggagcttggcatcgaaatgcccattacagaaaagctctacgatgtcttgtaccgcgaggccgatccgagacaggccgtgttggatctgatgcagcggcccaataaacacgaaaacgagaaaatatttttattatgagacaaagttcgactgttcgaaaaaaaattcgacgacggcaaaatcacagaaaaaaacgcaggcgactgcttctcgtactacttttgctgttgattatttcaggcggcgtctactccctgtacgaccgcctggtttctgcgcctaaaacgaagcagcccgtgcaggtatgctttcgcgacgtggtgcggggcgagggctacttgcttctcaatgaagagacgatttttaccaaggcaggcggcaccgccgtttataatgtgcgagaggggaaaaaagtgcccaagggctttcgcgtggcggacattaatgtcatgaacgacaattcaaaggtgaaggaccagctcattcgaattcaggcggccatcgactttaaaaatgatcgaacatcggaaaaatccaaggacagaatgaatgaagaagatgaaaatgtcattcgaaacatccagcgctttattcgcgacgaggattacgaaaagcttatttcatccattaacaccttggatttaagcacgaaacacacggtgaatgtgtcggagctcaacgaacttttaaagctttccattccggagctggaggagaaaaaagaccgtctcaccaagcgcatcgcctccaccagtgccgattacgtggcaccggaatccggcatcgtaagctacacctttgacgactttaaaaaagccctttcattggaaaaggacgaggatacatttacccgcgcctacctaaaaggcgtgagcaccgagtccctgacccgggggaagaatcgagtaaaagaaggccaggcctttttccgcaccatttgcgacacggcctataaaatcgctctgcccattgccgatgcccgtttggtgaaagatgaaatgggaaaaacagtgacggtgcgaatcggaaaggtgatgaccgaagctcgggtggaatccattgtcggcgacgagagcgagccggtggtgatcttgagtctgcaagataaactacaggaggtttatcggccgcggaagcaaaagaccaccataattaaaaacgaatctcgggcgctgaagattccaaagacagccattgttacgggaaaacacggcgaaagcggcgtctacgtcgatgccgtgcgccgatttgtcacctttgtgcccgtggatgtgttgtccgttcgtgaaaaagacgcctacatcagcatgggcgacgacaaggccatgatcaaaaataagaaaggcaaggacgtgtccaccttgcggccgacggatcaggtggttgttgagccgaagaaagtgcggcgggataagattgtgtattaatcacaggaggtgtttatgtcaagcataggcgacgaactcaagcgggtgcgcgaagaaattgaagaggcaagacgccacagcttaaccggggaaccggtgcaattaatcgccgtgacgaaaacccacggcgtggataaaatcgaagaagccttgaaatacggcgtcacggatatcggcgaaaacaaggtgcaggagctgacaaaaaaaattgaggccctgggaccgaaggttcgttatcatatgattggaaacttgcagtcaaataaggtaaaatatatctacaatgatgtggttttgatccattcactggacagaccgtccttggcgaaagaaattcaaaagcggggatgcgaaacggatcatatcgtccattgtctattggaagtaaatatcggcgacgaagcgtcaaaaggcggcttggcctacgatcaggtgctgccctttttggaatccatcgtcgattactcccacttgaaagttgacggcttaatgaccgtggcgcccaatgtagatgacgaggcttatttgaggcagctgtttcggaaaatggtggccttgaaagaggacatcgccggacgccattacgagggcgtggacatgacgcacttgtccatgggcatgagtcaagactttcatatcgccattgaagaaggcgcaaatatggtacgcgtaggcagtcgcattttcggtgcaaggcactattaaggaggaaattatggcagattttggtaataagttaaaaagggcgttcggtttcggtgacgattacgaatacgacgacgaatacgattttcaagaagacgaaaaatttcaaaccacggaagttgaacccatcacaacgacccattcgcaaaaacccgtggcccctcgcagaaaagacagcggcaatgtattaagcattcaaacgaaagccgctatggtcattacggttcacgaacccttaagctacgacgaatcgccgaagattgtcgatgacttaaaggaaaacaaagccgtcgtcttaaacttcgaacaattggatttagacgtgaagcgtgaaattttcgacttcgtcaacggcgccctttatgccatcgaaggcaagatccaaaaggtgaacaaagacatctttattcttgcgccggcgaatattgccatcgacgggcttaaagaagaattacaaaactcgggcatctttccttggtaaagagccttcggaaggatgaactccttcgccacataagagagcctgaaaaaatcactcggttgcgccatgtactcgatctgcctgaaatcagttcgagaaattacagggccacagccggtgattttttagatccctacgaacagcaattggtggcttcctggacgccccactttccggaagtggaattgtctttcgaaccggcgggcaattgggagcgaaaaattccggtctataaacccttcgacacggaagatagctttctctcggccttttatttagaaggcggccccttcgatcaccggcaaattttaggctccctcttgggcatgggcatcgagcgggataaaatcggcgacatcgccgccaccgacgacggcgcctatgttttcgtgaaaaaagagatcgcgaatttcatcgccgtgaacttcagaaaagtgggtgcgacacccattcgcctcaaagaaattcccgccctctccgtgccggaaattgaagaggattggaacgaggccgcggcggtggtgtcctccatgcgcctggacgccgtggtgcgggcggtgacccacaagccccgcgacgaagtgaaggggctcgtggccaagggcttggtgaaagtaaactttaagcgggctgagaagacccacgacatgattgtccccggggatatgatttccgtgcggggatttggccgcatcaaaattttcgagcccctttaccgaacgaagaaggacaaagtgcgctttcagtacggtaccttaaacagcagataggagcgctatggtaacattaattattcttatactcatcgctttggatcagttgtccaaattcgcagtcgtccgccatttggcaggcggcggcgaagtggcgatcatcccgggcttttttcgcctgctctatgttgaaaatcgcggcgcagccttcggtattttacaggaaggccggcccctttttatcgtgattaccgttgcggtcatcggctttttgctttacggcatttacagaaagcgcgacgaggtgagggggcttttgcgcgtggcactggtcttaattctggcgggggccgtcggcaatttcatcgaccgattgcgcctccacttcgtcgtggactttttgtccttccgcttcttcggccacgactttgccgtctttaatctcgccgattcctttatcgtcgtgggcacgattttgcttatgatccacgtctttttaggagacgaaaaggacagccatgattcataaattcacaggggtagatgacggcggtcgcctggatcaatttctcgccgaaaaactcgaaatgagccgctcccaagtgaagcgggccgtagacgagggccgcgtcacggtaaacgggcagaaggtgaaggcgggctataagcttcaagggagcgatgaaatcgcctacgaagaggaagccccctatgtgctggaggcgaaggatgtggcatttaaggtgctttacgaagacgagcatctggcctgcatcgacaagccctacggcctcgtggtccatcccggggcgggcagagaagaagcgaccctggtccacgggctgatgcatcgcttcgatcacctggcaaagggaagcgatccccttcgcccgggcatcgttcatcgattggacaaggatacttccggcgtcatggtggtggcaaaaaccgacgccgcctacgacggattggtggatgcctttcagaaccgtcgggtcgagaaaatttactacgccatttgccgcggcgacattcgggaagcgggcatcatcgattcgcccatcgggcgggatccgaaaaatcgcatccgcatggcggcgggggtgtatccctccaaagaagccttgacggaatacgcgcctgttctcgcttttcgggattccaccttgcttcgcgtggcccttcacacaggtcgcacccatcaaattcgcgtacacatggcatcaattggccacgcgcttttaggcgatcccctttacggggcgaagaacgacaaggagaaacagctcctgcttcacagctaccatctggccttcacccaccccattacgggtgatgttgtggccgtgacgtcgaaacttcccgagcgcatgctcgcctacattcgaaaggagaaaggggaccgatgcacaagattttagatgaattggccatgaagcgggccacggcgcgtatcgccaatgaaattatcgagcgaaacaaagggctggacgacgtggttctcatcggcatcgtgacgcgaggcgaatttttcgcccgtcgccttcaagaaaagatgaaagaaatcgaaggcgttcatgtgccggtgtacaccctggatcccggctttttcagagacgatcgacgggacgaagcctttatgcccatggaatttatggggaaaatcgacggcaagcgggtggtcttggtagacgatgtgctctacaccggccgcacggtgcgcgccgcaatggatgcattgatggtaaaagaccgaccgaagctcgtggagctggtgggcctcgtggatcgggggcacagagaactgcctattcgcggcgattttatcggcaagaatgtgcccacggctcagtcggaaaaaatcatcgtacactttaaagaatacgacggcgaagatgccgtctacgtggcgggataaaaataaccggcggcgtgatcgaagggatcggccgtcggttttttcgtgtaccattattcgtgtagcattataagagatcgatgcgcgcctctcgcggcctgcgctcggaagtaaagacggtgtccacggcgtggaggatgttgttccgcaccgcttcggattttgaaatcaccatggtgtcttccacgccggtgcagtagttgataacgtggcaaatattggcgtagtgcaggcccagttctctcgcgagaaccacttccggcacattggtcatgcccaccacatcgccgccgatggaggcgtagaattttatttccgcacgggattcaaagcgggggccttccgtggccacgtagatgccgcggggaagcttttcgccgtaggccgcctcaaaggcgtcgtttaattccgagtcgtagggcgcgtccatggcgatgtgcttggctacatggtggtcgccgtcgtaaaaggtgtggggccgtgtcttcgtaaaatctaaaaagtcgtcgcacaagacgatggaatcggggccgtattctttttttaaactgcccacggcgctgatgccgtacacttccgtaacgccgatttctttcagggcccagatgtttgcccgataaggcactttgtgcggggggatggtgtgatccgtgccgtggcgcgagacgaaaacatagggcttgttttcgggataaatcagtttggcatcgccgtagggtgtggaaaaaatttcttctttggcggcagcgaagggcgcttcgaagccggtgccgccgatgattccgtaatgcatgataacctcgtttctctttcctgaatatggtactattatacatggaaagtgaggtctgtatggaatttgacggagatttagcttacatgcttcaggcggagcacgtggcttattataaagacggcgtcgtatcgattttagaccgacgtatttacccggtgcgagtggaatacgtgcgttgcaagacccacgtcgaggtgcgcgacgccttgaaaaacatggtgacgcaatcggcgggcccttacacggcggcggccatgggcatggcccttgcggcacacgaatcccgccacttaaagggagcggcgcggcttcgctatttggaagaggcggcggttgtactggccagcggccgccccaccacggccatgcgcatggcccaggtaacgaagggcgccctttctgtggcgaaggatcatttagacgacgaggatttggatttaattctgcgggatcacgcccttcattccatggaaaagcgctacgccaccatccatcgggtggcgaagcattttatggaccttctgcccgatgagggcacggtcatgacccagtgtttcggcgaaaccattatcggcatgctggcgcgggaaattatagcgagcggaaaagatatttcctttgtttgcccggagacccgcccttttttacagggcgcccgttttaccgcttcggtcttgtctcaaatgggcatggacaccacggtgattacagacaacatggtggcggcatacattgaaaatcacggcatcagcttatttacctcggcggcggattccatttgcatggatggcagcatcgtaaacaaagtgggcacccaccaaatcgccatcgtctcggcgtacttcggcgttccctattacgccacgggaattcccgacatggacattcaaagtgcaaaggatttgaccatcgaaatgcgggatcccgaggagagcttaagcgcccacggcatcaagcacacggtggaaggggtaaagggctattacccggccttcgacgtgacgccgccgaatttagtcttcggcgtggtgacggatttaggcatttttaaagcggatcaattaaagaaatacgaaaagaaaaaaggagcgggcgatttctatttcgctgtatgattatgagccaacgattagacaaacaaatcgattttatttacgccctggaaaagatgaaaagcgtctatcgcagaacccatcttctccacgccgatcgctttgaaaacgacgcggagcatagcttccacatcgccgccatggcctttattttaaaggaatatgcgccggatgaggtggacatggagcgagtggtgtttatgcttttgttccacgacgtggtggaaatcgaagcgggagacaccttcgcctacgatacggaaaacaacaagaccaagcgggaaagggaagtgcgtgcggcggagcatttgtacggcatgcttcccgaagagcagggcaaagaaatgcgggcgttgtgggaagaatttgaagcccaagagacgccggaatcccatttcgctttggccatggaccgaatcgagcccattcttctcaatgcggccggaggcggcggcacctggacaagccatgggatcaagcaaaaagatgtctatgaacgcatcgagccggtgcggaaatttccgccactctatgccatgataaaggaaaaagtagacgcacattttgaagggagaaggagccgatgacgaaaattctactggtggaagatgaagtatccattcgcaagtttataaaaattaatttagagcgagaaggctttgaagtctacgaagcgggcagcggcgaagagggccttgaaattgccgaaagggaaaagcccaccatcgtgcttttggacattatgctccccggcatcgacggattcgaagtctgcgatcgcctgagaaagtctttcccgcacctgggcattattatgcttacggcgaaggccgaggattacgacaagatcatgggcctgcaaagcggcaccgacgactaccttaccaagccctttaaccccacggagcttaccctgcgcattaaatccttggagcggcgcatcggcagcgaaagcaaaggggagaaaaaaggcgagcgttttttggaatcgggcatatttaaagtggatgttttcggccataaattttacaaaaacggcaatgaaatcgagctcacgccgacggaacacgaaatcgtgaagttcttcattacccacgccaatcgcgctttaagtcgcgacgagattctaaacgccgtgtggggcgaagaatttttaggggacagtaaaatcgtggacgtcaacattcgtcgtctgcgttcgaaagtggaagaagacgccgcccaccccgttaccatcgaaaccgtatggggcgtgggctaccgctggaaaaacacggccgtcgacgcatgaaacattccattcgaaaaacggtgacgcgaaatttcgtcgccctgattcttttaactgtgagcctcctggacctggctttgattttcggctttcgcgaatacacctacggcggggtgaaattttacttaaatcaacaattaaacagcgccgtctacacctacgatcgttactttaaaagccgcagcatcgacgaacttctggacagcgactacgatatgatctttaatcaatttggcggccaggtgcagatgatggataacgacgcccaactggtctacgattccatcggcgcaattaacgaccctgtaaaagattatcctgacgtcgctcaggcccttgcgggaaaggccggctttcgcatcggccctgtgccctattccgacacgaaggtactgtccgtctcccgcccgatttactccaacgacaacgacgtcatcggcgttttgcgctactcctcgtcattggcgccggccattcattcggtgtggacgctgatccggtatctgatgattttaacggcctttgttatcgccatcgccgtggtggcgagccgcatgttggcgaaaagcattacaagacccatcgaagagattcagtccaccgccattcaattggccgacggccagtacaaaaagcatatcgtcatgaagcgagacgacgaattggggcaattggcccaatccattaacacgctggccgcggaaatcgtgcgaaaagaacaggtgaaaaacgactttatctcctccatctcccacgaattgcgcacgccccttacctccattaaaggctgggcggcggtgctcaaagacacggatccgacggaaaccgaggtcatgaacgaaggcttcgatattatcgaaaaagaaacggatcgactgtcgaaaatggtggaagagctcttggatttttccagatacatctccggcagaatcacattgaaaaaagaccgcttcgacattacctccacctgccaagatgtgtggaagcaaatgaagcccagggcatcaaaagaagacattcacttaattaacgaaatcaacgaagaagtggtgcttcttacagccgatgaagaccggctgcggcaggtgctcatcaatctcatcgacaacgccatcaaattcaccgatcccggcggatgggtgctttttgaggcgcggaaaaactacccaaattacgaaatgatcatctccgacaacggcgtaggcatggacgaaaacgaattggccttggccaaggaaaaattttacaagggcaaacactccaattcccactcggggctcggcctgtccattgccgatgaaatcgtgaaactccacaacggcgtcattcaaatcgtatcggaaaaaagcgtgggcaccaccatacgaatcattattcccttgggaagcgaggcggaggcatgaaaaaattagttctcatcttacttctgtttttaacggcctgcgggcccatgaaaggcgattaccgcatcatcgaaaaacccgccatcaatcgatcgccccttcaggggcgctgggtggtgacgaagattcaggcccttaccgatgagagcgtcgatttacggcccgttatcggatccgatgccatcttcgctcccgacggcgccatctttaacgatcaacgcatcgatcatcccacctatgtcattcgcaaaggcaagactgactatttaatgaaagtagggtataataagacaaaagacgacgtgggtatcgccggggacaatctgtttatcatcgatatatatcaagatgaagaaaaactgtttaccgtctaccgcgaaaaagacgatgtggcctacattgacatttacggcaatctcttgcaactggtcaagaccaaaggcaccctggacgagcgtcaattacaaaatctcatggaacaggccgacccgaaaaggacgtattattcccgggtgcccggcaagtaggaggatcatatgttatcgaaaatctctgaaagtttaaacggaaacttacagtatataggcatcttggtattggcggtgattatcgctttgattcttaccttcgtcattaacatgatgggcaagcaaatgaaatttatgcgctacttacccggcttggccctggtgtttatcggtatgttttcactgattatggtactgaaccgcctcttcgagcgatccagcttgatcaatatatttatctccgtcgtatgcattacggcgggcatttgctctctgcttttcgccctctgcatcggcatttacaacaaagaccgctacggggacaatcaaaaagataccgagtggcgccggagagaaaactaaagagaagaaaatgaatttgtcgccacggcggcaaatttttttatgctaaacgctctaagatttttgctataataaggcaaatggacaaaagcatggtgcccatcgtaaaaattccttttggctttaaaattacggtataaaacaattgtgctaaagggggatttagtatatattattgagtatagtggggtggatgtatgaacgtcggcggaacgggcgaggcgattgcggagaagtttttagaaaaacagggccacgaaattttggagcgaaattttcgttttaagtatggtgaaatcgatatcatcagctttattaaaggcgtcgtggtttttaccgaagtgaagacccggaccaatgtctcctacggcgacccgaaggatgccgtggatatgtttaagcgccgccagatctatatgaccgcggagcactacctggcgcacagatcgcctttttatcgggcggctcgattcgatgtcatcgaagtgttcttgacggaaaaaccgatgattcattacataaaaaatgccttcgacggaaatgacttgggggaataacatgtatgcgagagtgaaaacctgcagcttagaaggattagacggatttgtcgtggaagtcgaatgcgatttaagtcgcgggcttccgcgctttcttatggtgggactacccgacgcacaaattcgtgaatccggggaaagggttcatgcggccattaaaaatatcggcatgccctacccacaacagcgcatcacggtgaatttatcccccgccaatcgacgtaaagacggctcgcaaatggatttggccgtggccgtatccattttggccgccgaagggtttggcgatccaaaggtgatcgacgattacatatttttaggggagcttcagttaaacggcgaaatctccgccattcgcggcgcccttcccatggtgatttcgctgagagaattgggctacaaaaagttcatcgtccccaaggccaatgaaaacgaaacggccattgttcgcgatgtaagcatttatcccgcttccaatttaaaagaagtggtttcccttctcaccggcgaatccaccatcgaagaagccattgtggaaaacccgatggatcacatgaagtcatttgatgtggactttgccgatattaagggccaaagtcaattaaagcgggccctggaagtggcggcggcaggggcccataatcttttaatgatcggcccgccgggcagcggaaagagcatgagcgccaagcggttgcccacgattttgccccgcatggcctttgaagaggccatcgaagtgacaaagatctattccgtctccggtcttttgacggaaaataggctgatgacggaacggccttttcgctcgccccaccatacggcatccggcgtatccttaatcggcggcggccgcatcccgaagccgggcgaaatttccttggcccatcgtggcgtcttgttcctcgatgaaattccggaatttcaatccagcgtattggaagtgctgcgccaacccatggaagacgggaagatccacgtggcgcgggctacggcaagcttggaatttccggcggattttcagcttatcgcctccatgaacccgtgtccctgcggctactatcaagatcccaatcacgaatgtagttgcagcatgcagcagattcaaaagtatttggggaagatttcccatccccttttggatcgcatcgatttgcaggtggaagtgaagcccattagttacgaagatatgaaggaaacagtaaagggcgaagattcgaaaacggtgcgggagcgggtggaacgggcccgcggctatcaaaaagcccgcttcgaaggcacggggattatgaccaatgcggatattcccgatcgcgatgtggaaaaatactgtcaattgtctccgagctcgcaaaagcttttggacatggcgtacaaaaaatataaattcagcggacggtccctacataaagtgctgaaggtggcccgtaccattgccgatttacgagacggcgggcccattacggatcaggacgttttggaagctgtgcgctataaatctgtggagggaaaatattggtcggaataagagaagatttacgcgccctgttcgtccaattgtccctcgccggcatgcccaacgctgaaatgatggaactttacggctacatgacggaagaggaagggcaattgtccctttttgaagacgatcggattcccgaaaagttaaagacccgcacggagatgtttttgaagcgggatttgagcaagcggaaaaaggtgttggaaacccagtgcattcagacattggtggtaggcgacgatttttatccggaaaagctggccctgacgccggatccgcccatggtcatctacgctttaggcaatgtggaattaatggcgaaaccggctctttcagtcgttggcgcgagaaaacacacggattacggccaacgggtctgcaaaaaattcgtctcacaactggcatcttcgggtctcgtcatcattagcggcttggctctcggcatcgacaagctcgcccatcaggccacgttggacgtcggtggtgaaaccattgccgtcttaggaaacggcatcggcgactgttatccgaggagcaaccgcgcttgttacgaagccattcaatcgaccgggctgattttaagcgagtacccgccctacacatcgccgcagccatttcgcttccccgagcgaaatcgcatcatcgcggcattaggcgacggggtcttggtggtggaagccaaggaaaaaagcggctcattgattaccgcccgtttggcggcggaatacggccgagaggtttttgccgtgtgcggcaatgtggattccatttacagtcaaggcaccaatcggctgattttcgacggggcctccatcgccctttcgccggaagacatattgaatcatcccgtgtatcagataaaaaagaaggaaacttcggcggatctttctcaactctctttggaagaaaaaacattgtatgatagtataaaggacggccatcaaaatacagaggccctcatggagcatatcggttgggatattaccgacgtgttaagcgtattgactatgctggaactaaaaaatcttattacaggtgtggacagcaactgtattgaaatactataacgctggaaaggatatgggataaattggcaaggaatctgattatcgtggagtcgcccacaaaggctaagaccatccgcaaaatggcgggcagccattataaagtcgtggccacagtggggcatattcgcgatttgcctaagtcgaagctaggcatcgatatagaagacaattatcaaccgaagtacattaatattcggggcaagggcccggtcattaaagagctgaaggcggaagcgaaaaaagcaaataaagtccttctcgcaaccgacccggatagggaaggggaagccattagttggcacttgacccatattttggacatggaccccaaggacaatgtacggatatcgtttaacgaaattacgaaaaatgccgtaaaaaacgggattaagaatcccaggcccattaatatggagctggtggatgcccaacaggcgcggcggattttggaccgccttgtgggatataaaatcagcccccttttgtggaagaaggtcaagtccggactcagcgccgggcgggtgcaatcggtggttttaaagattatttgcgatcgtgaagaagagatcaacgaatttgaaccttcggaatactggaccatcgttgccaaagccctgaaaaaccgaaaaaccttcgaggcgaagtatttcggcaccctcgtcgacggggaagttcaatcggtgacattaaataccaaagccgatgtggatgccgtgatgaagcgcatggacgagaaggaattggtggtctcagacattcaaaagggatcgagaaagcgccgcacctcggcgccctttaccacctccaccatgcaacaggaggcaaataagcgcctgaatttcaccacaagaaagaccatgcaggtggcgcaaaagctttatgaagggatcaccatcccgggggaaggctccgtgggtttgattacttacatgcgtaccgactccacgcggatttccgaacaggccgtggatcaaacgaaggcccacattttacaggcctatggtgaaaagtacagcgcgccctcgacttggtcgaagaaaaaagaaaacacacaggatgcccacgagtgtattcgcccggcggatgtgaaccgaacgcccttgagcttaaaagacagcctgggccgcgacgagtttcgcctctatcaattgatctggtctcgttttgtggcctcgcaaatgacggcggctctttacgatacgcaaaaagttaagcttgcgagtcgcacggaaatgttccaagtcaacggcaataccctggtcttcgacggtttcttaagggtctttccctcgaaggagcaaaaagacaaggaaatttccgcctttgaagtgggggaacatttaaaagttaaggagattttgccggaacaacactttacccagccgccggcccgttacaatgaagcgtctctgattaaacttttggaagagctgggcatcggtcgccccagtacctatgcgccgattattaacaccttgctttcccgctactatgtggtcagcgaggagcggcgcttcgtgcccacggagctcggtgaaacggtaaatgatctcttgacggattacttcccctccttcgtcgacgaagatttcacggcgaaaatggaacacagtttggatgccgtggccgacggggagcttgcctggcaaaaggccgtggatcccgtctataagcaattggcccaatacctggagcgggcagaaaaagaaatcgagaaagttgaaattcgcgacgagcccaccgatgttatctgcgaaaaatgcggacgcaacatggtgatcaaaatggggcgctacggcaaatttctcgcctgtcccggttttcccgaatgccgcaacaccaaagccttggttgaaaaaatcggcgtcaagtgtccgaaatgcggcgaaggtgaaatcgtcattaaaagaagcaaacggggacggaaatttttcggttgcgacaagtatcccgattgcgatttcgtttcgtgggatgagcccatcgacgagcgttgcccgaaatgcggcgacattttgacgaaaaaggcgacaaagcggggcacgcgcatccagtgccataatccggattgcgattacacgcgcacggatgtggacaaatcgaaagaatcccagtaaagacgggcagctcatggcccgcagtatttggaggcagtgatggataagaaatttcccttttccacaacgaaagacaaagcccctcgaaagagtcaggatactgtttcgacgggccttgtcagtgccgtccgattaagcgaaacaattttaaacgatgccgccgaagcgcgctgttccgacgtgcatattgaacctgccggtgaagactggcgtgttcgaatgcggcgaaacggcacgctttttttgtacggcacctatccgaagcggttgtattcggaatttgtgacgcgaataaaatttctctcgtcaatggatatcggcgaaaaaagaaagccgcaagatgggcgctttacttttcaatacggcggtcgcgacgtggatgtgcgggcttcggccattcccgtgaaaggcgaggaaaagctggtccttcgcttattggaccgaaggggcttaaactatacgcctcaaggtatcggcctggacggtgaaaatttggctttagtggaaaaattattgcgtcagcccttgggcttggttttgatctgcggccccacgggctccgggaagacctccaccctctatacctttattcaactcttaaacagcgtggagcgcaacattctcaccattgaagaccctgtggaatttgccatcgacgggatcaatcaaatgcaggtgaatcccaaggcgaacattaccttttcgacggggcttgaagccatgttgcgtcaggatccggaagtcatgatggtgggggaaatccgctccatggaaacagcggagatcgccttaaggtcttctataaccggccacttgattttttccaccctacataccacagactcgccctcggccatgattcgcctcatggacatgggcatcgagccctacatgttgtcggcgggcatcattggcgtgatctctcaacgccttgtgcgaaagctttgcgatcactgcaagagagaagttgtacgaaaagacgattacttccatatcgacgggccgacttatgaagcggtgggctgtgaacattgctacgacggctacaccggtcgagaagctgtctttgaaattatggtcatggatgaaaggatgcggaatctgattaagccgggcgtcagcttggatgttttgcgtgctgcggccgcggcctcggggatgattcctttaaaggatgccctgcgagagaagattcttgcgggcaccattagccttgaggaaggttatcgcaccattatgaccctgtaggtgagccatgaagtttaaatataaaattattgacagagaatcaaacctgctgaccgacgaaatggaggccgaaaatttacaggcggcgcgggaaaagcttcatcatgcaggctatcgcatcgtctccctggaacgggcgggcgataagattcagctcattaagtccagatcgacgatcccgaaagggcaattggcccttctgttttcccaactggccctaatgtcttcaggcggtttggatttggttacggtcatggaattaatggcgcgagaatccaaaggccttcgaaagaaaaagctggatttcatcgtggaatccgtgagacaggggaagttgctatccgaggcatttgatgaagccgactgttttcctcaatttgttccgggcatgatcaaaagcggcgagtcggccggcactttaggcgatatcttccatcaattggcggtttttttcgacgaggaacaacaaatgcacagaaagcttgccaatgccctggcctatcccattatcctcatgattacgtctctttttgtcttacaggtggtgctccattcggtgcttcctgtatttaccgacgtcttcgagtcccaacaagtgcccctgcccctcatgactcgcatgctcatggccattgccgatcacgtcaatcgtttcggcatgatctatcttgcggcgctgcttatcctagttttggtgattctgcttttaaagaatcatccgaaaaccgccgaaggtttttatcgccggtggtatcatctgcccattggtgcgccattttaccgtgacccctttgagttgaggcaactgagaaccatgaagatgcaaatggacaatggggtggatctgttgcggattatggagaatttaaacgaaggggcggaaaatccctatattaagagaaaagcgtcggagatgattcagggcctcatgaaaggtgaggcgttgtccgcagccatggaggaaagcgagctatttaaggcgcaaaactgctccttcgtcgccttaggtgaagcctcttccgccgtaagcgagatgcttgccgtggccattcacttggaggaaggacgccaaaaaaatcgtgccgagcgcatcagcatctatatggaaccggccttgattcttctcatggccatcgtcgtcggatttattattttttccatcgccattcccatgtttgatatggtaaacagtttttaggaggaaattatgaaaaagaaaaaggggtttaccctcatcgagcttattattgtcatcgctattttggccctgcttatcgccatcgccattccacggtatcaacggtcaaatttaagtgcccaagtcacggcccataatgccaatgtacgggtcatcaaaaatgcggccattctttattctatggatcatcctgaagaaacggcaatcgatatgagcaagatcaaaccttatctggaatccgaagaagtcccgaagccggcgaaggcattaaaggtacctaatttcaccgtaacgatggacaaagggaacgtgatcgtctcacccggcatggtaaaaatagataaagataataacttggtgcctgatacggcgaagtccgatcaagcgaaacaaaaatgatactgatctattcggccgccttttttctcgccgcttccattgtctcctttttcaatctttacgatgacaggcgccggcgcggcgaaaattggatcaagggaagaagccgctgcgaatcctgcggccacaccataccctggctttatttaattcccgttatcggctacggcctctgtcggggaagatgtacttgcggcgtaaaaattgcccctttccatccgctgagcgaggggatcgggggtgcgcttgtcgtctttttcatgcaccacatgggggtggcgacagattctatttcatttgtcgtcgccctatttgccatgtaccttttggcgctggaagacattcgtcaccgggatgtgtttacaaaagacctcgttgcctgcggcatgatttttgtttcggttctgattttcaacggatccatttatcccttaagcggcgcatttatgctttgcctcataggggctctttattttctttttcccaaggcggtgggggagggggacatctattacgccgccatgctcgcctcgggcatccaaggaatttggagaagctatttattttttaccgcaagcttcgtctcagccgccctcatcggcggcggactctattttttaaatatctgcaggcaaaaggccgtgcccatgtttccctttttcctatgggcttttttacttgtcgtactgtttttgtaaagaaaaaactttaaattacataaaaattacgcattcgtgggatataatgccgttaggagggcgaaatgaatttatttaataagcgcgaaacgataatttacttcgaagatcgacgctgctatatagcaaatttagacgaaaacaaaacaataagcgagcttcattcttttgacattccgatgaatgtcgtaagcaatggcgagattttagacagtgcacaattacattatctcttaaaaaagaccttggaagaaaatgagctgaccaagagccacgctttgtttgtcattaattccgatttggcagttaatcgcaccatgcacgtgccgtcgatgacggacaaggaaagggcgtcgctcatcgagaacgaatgcccgtctctttttccccaggatttagaggaatacgccttggactcggtggatttaaaaaccgacgatgacatccatcatttactgattaccatatgtcccgacgaaatcctggacagctacagggatttggcgaaaaaatgcgagattaagcttcgtggcatcattcccttttccaccctttgtttggaatacgcccattggttaggcggtgcaagggtgaattttatcggcaccggtcatttgggcttttattacggccatgaaaatcgcttctttgaccgcacggagatcaatgattccgtcttggatttcatgaacagaaatgaattggaagcggaagatgttttgcggattaacgacgatcattttgacgagcgcatgagcgatgtggatcccgccaccatcaagagagaaatgcaatcggcctattacgaagccttgggccatgtagaacacatgggcggtgatttcgctctggaggataggcaattaattgcaggttcctttgtagaaagcggccttttcggcgagctcatggacgaagaagtctataagcccttggctttaagtgatctcttcaccgctgcagcggaacacgacgatgtcaccgccctgtttgcaaaaggcaatcgcaaaggaggtatcgacaaaaattactatctgcccattggagccgttgtggcggcctttgccattctcatcggatccttcgcctacggtgaaaaaataaaacaacaaaaccgcgatctcatcgtcaagacccacgaacaggaaatggcgcaagaggactcgaatacctccgatgacagcagtggggcacaagtgagcgccgacattgccgatgccattacgaaagtgaaatcttcggcccccgacaccttgacggtaacgggaatagactatcaaggcggcaccttatccattcgcggggaaacgaaagatgccgaggtggtaaaaacctggtgtagtcaattggaagatgttttgaaagtgaaagttgaagaagagcccacggcaacggtggccgatgtggtttacttccaattaacggctcacttaaccggcgaggatacaagcgacgatgcttccgcatccggcgaaaccgaaggggctacaaacgccacggaaagcgacaacgcagccaacaccaccactggcaacggcgccagcatataggagtcattcatgaaagtttacaaggatgtaggaaaactatccaacgaagaattagatgcattgattctttctaaaataaaatcgaagcgaaaagaagtcctgggtgcctcttccatcggcgaagacacggccatgctggacttcggcggagatttaatcgtcttaagcagcgatcccattaccggtgcggcggaaaacttaggtgcactggccattcatatcagcgtcaacgatgtggccacgaaatccgccgatgccgtaggggttttgctcacgctgcttcttcccgtcaacaccacgtcggaagacattgaaaccattatggccgatgcgcaaaaggccgccgatgcagtcaatatggatattattggcggccacacggagattaccgacacggtgtcaaaacccattatgatttccaccgtcgtcgggcgcgtcagcaaagacaaagtgcccgatccgtcgaaagtgcgtatcggcgatgtggtagccatgagcaagtatgccgggctggaaggcacggcgatcatcaccacggattgtgccgacgccctgaaagacatcggtgaggcgctgcttcgagaagggcaggggctggtggatcaactcagtgttcaggcggaaggcgaagtggcagcggatttttccattcgcgccatgcacgatgtcactgaaggcggggtagaaggtgcgatttgggaaatggcacaggccctgaaggtgggcatggccatcgacaaagaagcgattcccgtattagaatccacaaaagccgtggccaaaaaggccgaagtggatttgtaccggcttatttccagcggatccatgttggttgtcttagccaaagacgactttgaagccatggaaaagaaattgcatgatcgaggcattttatttacgaaaatcggcgaagtcacggaaggtgacagagtggtttataaaaacagccgcggaggcgaagaagaaattgccgcacccgggcccgatgccctttacggcgccttggtaaaattacagtaaaattacaaagacgctggagcgtttgacttttaagaggtcgggaaccataatattagtgacaaagtgttaccaatttgaaggaggttcccttgaaacgtttattacaaagtttcgccctatgcttttcattccttttcatacttacaggttattcggaagcggccggcgcgacgatgcgcgtaaagaccaacggaagtaatcgaaatgtcagtgtcgccaatgtaaaagtaaatggctttgacttatacagtgactataaaccctatgtggacaacggccgcaccttcgttcccattcgagaactcacggagcttatgggcgccaatgtcgcatggaatcaaaagacccaatcggtaagcatctccatgatggacaaagacgtgaagctgaagattaacagctccgtcgtctatgtgaacggaaagaaaatgcgaatcgacgcggcctccgttcccagattgacccaatacgtggctcaaaacaacgacagcaagaccatggtaccccttcgttttttgtcggagtccttgggattcagtgtgaaatgggaacaagataagcgactggccatgatcgacaacggcctggcacgggcaccgcaaccctcggaaaaggcaaagcctgttcaagaagcgaaaaagcccgcggaaaaaacgaaagcgcccatgcctttaccgaaagtcaatgaagcgaagccccagcccatggagccgggtcaaaagaaaaacctgaccatcgttttagaccccggtcacggcggtaaagattccggtgccgtcgccgaagataaaaccacggaaaaatcactgacacttcgcttggcacccagagtagaagccatgcttagggcgaaaggttataatgtcattatgacccgcaccaccgatgaatttatcgcattaagtgagcgggcggacattgccaatcgtaacaatgcggatctgttcgtgagcatgcattttaactctgcaggcggcccttcggcctacggtatcgaagtgctttatgcatcggaaaatgatgtcgcgctgaaaaaagattgcggcgatcaaacgaaactggctagagaaattttaaacgccgtgctgaaggaaaccggtgcaaacagtcgcggcattaaaaatcgtcccgaactggccgtgcttcgtcgcacgaatatgacagcctgcttaatcgaaggcggttttatgtccaatcccgacgagctcgaacaaataaaaagcgacagctatttggacaaattggccaatggcatcgtcaagggaatcgaaaactacaatcgcaaatacatgtaaggaaggcgggagccttccttttttaaaggagaacgcatgaacatcatcctatccacagacaacgcacacaagctaaaagaaatccgcgaattggtcgacgggaagtttcgcgttttaacaaagaccgaggccgggtacggcgacattcatcccgtggaagacggcgataccctggaagtcaatgccatgaaaaaaattgagcccttggaaggtgaaatcgtcattggcgacgacacgggcctattcgtgagcgctcttcaagggcgccccggcgtctattccgcccgctacgccggtgaagagggaaatgacgaaaaaaatcgcgagaaactcttgcgggaaatggaaggaaaaatcgatcgcagcgcttattttaaaaccgttatcgccgtaaaaagaggcgatgaaatctatacggtggaaggaatctgtccgggacatattaccgagtcgcctcgaggcgagggcggattcggctacgatcccctctttattcccgaaggttacgacaaaaccttcgccgaaatgaccgacgacgagaagaatgccgtcagtcaccgcggtcgggctttgcgggcatttgtcgaatccttaaaaagctaaaaaatatttgacatggatataaaatgatgttaatatatatccatcgtcaaattttgtggtgggtatggcctagtcggttaaggcgccagattgtggtcctggagatcgtgggttcgattcccactatccaccccataatccttcgggatttcaactcgcattgcgagtatgcgggaatggcggaattggcagacgcgctagacttaggatctagtgtcaacgacgtgggggttcaagtcctctttcccgcaccatttagacttcccatatcgagttcatcgggactcgatggcgggatgtcctattgacgagattaaccttacagctttcagttgtagggttatttttttgcgaaaaatacatattcgtccaaatagttgaatgacgggaagggtttatattacaataggttggatcgaacagagcaattatttagattgatataaaggggaattctatgaaaatagcatttgattgtcagggcggcgatcacgcgcctcaggcgattgtagaaggtgcactgaaggcgaaggacgtcttaggtattgaaccggtatttttcggcgacaaaacgcttttagcgtccttcgaaggcgtggacgaagaccatattgtccattgcgcctcggccattgagcaggaagacagtccggccttggccattcgcaaaaagaaagacagcgccgtcgttcaggggctggctgcattaaaagaaggactggttgacggcatgatcagcgcaggcagcactggcgctttattggctggcggtatgtttatcgtgaagcgcaaagaaggcgtggaacgggcggcccttcctgtttacttggagatcagcggccaaaagaaattgattttagacgtaggtgccaatatggatgccacaccggagatgcttttgagctttgcaaaaatgggccaaagctatttgcaggatgcggaaggcgtggaagcgccgacggtggctttattaaacgtgggtacggaagaaggcaagggcaatcaacaggtgaaggcggcctatgaattaatggcccaagagctggagcacttcgccgggaacatggaggcccgtgacgttttgtttaataatgtcaatgtcattgtagccgacggatttgccggaaatattttgctgaagaccatcgagggcacggtaggctacattcaacggaccatggtttctttggcgaagggaagtgaaaagggcggcgagctcaagatgcttgcaaagaaaattttaagtgatctggactacagccgctacggcggcgtgcccctattgggcttggaaaaacctgtgtttaaagcacacggtgcatccaatgccgaggccattttatcggcgacggaggcattggtacgcatggtaggcggagaagaaaatagtgaaggagacgtacgatgagagaaagaattttagaaattattgccgagcaagtgaatcgtcccgtggaggatttggatccttccttggattttatcgacgacttaaatatggactccatcgagttggtggagacgattatgaccgttgaagatgaattcgatattgaaattgacgaagatcgcctggaaaaagtccgcaccatcggcgatgtcttggatttgttggaggagtttgatctggattgacgtcctttcacgaattggaggcgcgaatcggcattcgatttaagcatccgcgtctgttgatcgaggctttttctcataagacctatagcaaagagagaaacacaccatcctacgagcgtttggaatttttaggcgacagtctgctgaattttatcgtcggcgattatctttttgcgcaatcagatcaagaagagggcgcgctgacaaaaatgcgggcagacttggtttgcgaaggatcattaaaagcggcggcagaagcgctgggcttaggggaatttctgctcatgggtgaggagctgaaaaaggacgaaaagtttaacgtccacagcgacgacttatatgaagccctcgtcggtgctatttacctcgacgacggcttggatgcggcccgcgcttttgtggaagacaccctattaaaccgccacataggcccgaaagtcgattacaaatcccgtctgcaggaagcggttcaaaagaagtatcgaaaaaacggcgtgacttatgagttaaaagaaatcgatccatcggcactgggcgatgaagatcgctttgaagctacggtatttgttttagacagggcccttgccaccggacgtggccgtaataaaaagacggcggagagccatgcggcgaaagaggcactgagaaagatgaatcatggcgaagtgtaagataattccgatattcattccctttgccggatgcccggtgaagtgcatctactgcgatcaaaatcaaatcaccggggcggcgggtgcgatcacggaagatgacgtgcgccgtgaagtcgccgaggggctggagaaaaacagttctacgccgatggaggtggctttttacggcggcaccttcaccatgctaagtgtggaaaaacaaacgtcccttctgcgtggcgtgcgaccctttttacaatcaggggaagtttccggcatacgtctgtctacgcggccggagaaattattcgcggaggacttttcgcgcctgaaatctgccggcgtcaacaccgtggaattcggcatacagtcggtggacgacgaggtattaagtgcgtccaatcgaggcgtcgcgttggcggagatggaccgcaccgtcaccctggcaaaaggggcgggattgaaggtgggcctgcaacaaatgatcggtcttccggaagattctttggaaaaagacataatgacggcccgctggatcgcatcgcgaggcgatttcacgcggatctatcccaccgtggtctttcaaaacacggtcctttatgccctgtacaaagaaggcaaatacaagcctctatctttaaaagaggccatcgacaccgtggcgcagcttttggatctatacgacgccgcgaaaataacggtgatacgtgccggcctgccgcaaatggcgcgcagtagctatgtagcggggccgtatcacgataatttcagggaatttgccgaatcccatcgacggttggcgaagattttcaggacgtataagaccgtggcgtctgtagaaggaagcccaaaggccattaattatttggtgggccccttcggctacggaagaaaacaactggaggccgtgtacgggccagtcacttttcgaagtataaaagggcaggcggaagaacttcagatcaagggagaggaatatacccatgcatttaattgaaatggagctttacggctttaaatcttttgccaagcgaacgcgaattcgcttttccgaagacattacggccattgtcggcccaaacggcagcggcaagagcaatatcgtcgacggcattatgtgggctttgggcgaatccagtgtaaaacaacttcgcggaaataaaatggaagatgttattttcagcggcaccgatcgccatcaaggcgtgaattttgcggaagtcgttctcacattcgataacaaggacggcttttttgatttgccctacgaagagctttccgtctccagaaaatatttccgctccggcgaaagccaatacaccattaataaaaagcgggtgcggcaaaaagacatacgggaaatttttctcgacacgggtatcggaaagaacggctattcctttatcggccaaggccagatcgaagagattttaagtacgcggcctcaagaccgcaggaatgccttcgaagaagcggccggcatcagcaaattcaaattacgcaaagaagaaaccctgcgaaatctaaataaaaccacggatcacattgagcgtatcgacgatattttttccgaactgaagagtcgcaccggcgaaatggaggagaagcgggaaaaggccctgcgcctcaatgaattggacggggaaaagaaaaaatacagctttgccctgctgagtcgggaagtggcctcggcaaaggaaaagcaagaaaagattcgggcgcgctacaaggaatcggaagctgcgtggcaggaagaaaaagaagcgaaccgcttgctcgaggcggcgattcaagaaaaagaattgaaaattgaatccgacggcgacagcgaaggcgccttaaacgacgaaatcctggccctcattcgtgacaaggaacaggcgttgggggatctgcgctcgaaaacggaacgcagcgattacttaaataaagagaaagcacaaaaagaagctgtcgccgaaaaactgcgggaagaactggaagaaatggcccgcgtcgccgaaaagcaagaaaaagatgtcctcggcctgaaagagggcgttgataaaaaagccgccgcccttgaatcgatgaatgaagcgtacgagcgtcttcgggaaaaggtggccgtggtggattcaggagaaaaatcccgccgcgaagcgctggaacaattggccgatcaacgtcactctctggaatcgcgtctgcaggctttggattaccttttaaaggaacgtaccgagcgtttgtctcagttaaaaaagcgacgagaggaatggcaaggggaaagagacaccctcctggaaagcgtcgaggaatacaaagaaaaaacggaaggtttaacgaaggcatcggaggatttagaagttggccttaaagataaacagaaacgccaggccgaaataaaaatacaaatcgacggatgggatagtaaaatcaagagcctgagcatgagtgccgaaggcattgagcgtgaaaaacggtacttagagcgtcttcgcgacaatcacgaaggctttcaacatggcgtgaagcagtttttaaaagccgcccacacagaatctttttatgcagatgtcatcggccctgtggcggagcatcttcatgtagaggaggccgacgccctggccatctccaccgccttaggctacggcggtcaaaacattattttaaaagacgaccgcaaaatcagcgccgttttgtcgtacttaaagagcaggaaaatgggtcgcttaaccttccttcccctgaacagcctaaccccgcggcccttgcccgatgatttagaacgacaaacgagggtatcttttcgcgtcgcatcgagctgcgtcagctgctcaggggatttgcgccctgttgccgactttcttttggggcgcatcctcttagtcgaaacggtggctgaggcaaaggaactggcgaaggatttgaaacaccgctatcgcatcgtcaccaaaggcggcgatgtctttcaggtcggcggtgccattaccggcggccaggcgaaaagcgggtccacggagctctatacgagagacagcgaaatagccaagaaagcggcggagctcgcttcagtttcgaaacagctgaaggatgcgaaaatagaattagaggccctgcttcgcgattacagcgacggcgaagcggaaggaaaggccctggcggaggcgtgggagaagaaaaaagaaagctgccgcaaggcggaagaacaactttaccgccttcgctccaccctggagcaaagtgaggcgcagctcgcttctttagatggagagattcaaaaagaatcggacgccatgggccgcgacgaagacgaacgaggggcgcaggaaaaggcgttggatgagatcgacgaatcgcaaaagcagttggcattaaatgacgacgacgatagcggccactggcaccgaagcctcgatgaaaagcgggaagaattaaatagagagaaaatcgaaaatcaaaaaatcatttccgcctacagagagcaaaacctgcgttacgaacagcttctgagggacatagaaggggcgaaagaacgccttcaagccacggaagacgaggcacaggccatggccgatgaaatggaaaagttgaaggcccatgtagacgaagcgcaaccgaaacaagccgccatggaagagcgggtggtggtgcttcaggaagccctgtctgcgctgaaagaacaggtatccgccgagcgacaaaagcttcgggaagaaaaatcggctctggaagaaaagaaagagcgcgccttttccttggagaaggatttggttcgcctacaaaatcaattggaagaagcggatcgcgccgccgttattttcaccgacgccttggagcaaagcgaaaatcccggtgacatcgatgaccttttgagtttatccatcagcgccctcaggaataaagaaagcgccattgaacgagaaatgcttcaaatcggaccggttgacggagacgctttggagcaatacggtctttggaaagagcgcgtagactttttatccgagcagcgggaagacctggtgctttccaaagaaaaactggaaaaaatgatcaagcgcctggacaaagatatgcgcaagcaattggaagaagcccttattttaattaatggctactttaacgatattttccgcgaacttttccaaggcggaaaagcctcccttgcctgggacgagggggacattttagaggcgggaattttaatttccgcccaaccgccgggcaaaaagcttcaatccctttcattattatccggcggcgagcgatccatgacggcggtggcccttttatttgcgcttctgcgtatgcgccagtcaccgttttgcattgtcgatgagatcgacgcagccttagacgacgccaatatccgtcgttattccaattacgtgaaacaaatcgaagatatgcaatttatcatgattacccaccggaagcagaccatggaaatggccaacgagatttacggtgtgaccatggaagagaagggaatttcccgcttgttatttttagaattagaggaggtcgagtcccatgttggagtggatcaaacgaaagatcggtatacaggaaaccaatgaagaaacggaagaaaaacaagacatagataccgccgtagctgaagaggccgaagaggctcaggatgaggcggctgaaaatgttcaagaggcggcagacagtgtcgaagaggctgcggacaacgaagcggcggatcttataaagcacaaggcctacgatttttccaatgcggcggatgaggaagctggtaatgtagagcctgccgaagaatcggatgaggcgccgacagaaggtatgcctgaggaagagcctgaagaggaagagccgatagaagaaacgatccttcctgaagaagaatatgacgtcgtagcagccgaaacggattcgacggcagaacctgaaacagacgctgaagaagatcgcatggaagcatcggaagcgtcccccgaaaacggtgtggatgaggataaagcagaagatgtcgttgccgcagaatctgaagcctcctcggaggaagtttcagaacctgaggatgcggaacccgcggaagaggcatctgaagcgcctgaggaaaaagtcggctggtttgcgcggctaaaacaaggccttgaaaaaacccgcgacgacatgaactataaaatcaatgacatactgggcaattatgtcaaaattgacgacgacatgatggaagacttggaagatcttttaatctcttcggacatgggcatggaaaccaccatgaccttaatcgaccgcttaaaagacagcattcgagaaaaacaaatccaagacccgaaagaagtaaaaggcctgctggcggaagaaatccgcgccattttagaaggcgatccggaaaaaaatcgcttaaaagtggatccctcacctgccatcatcttaatcgtcggtgtcaatggcgtcggcaaaaccacgaccatcggcaaactcgcctaccgctttaagagcgagggaaaatccgttttaattgcagcggccgatacattccgtgcggccgccatcgaacaaattgaaacctggggcgaacgctcaggcacgccggtcatcagccataaagagggtgccgaccctgcggcggtggtttacgatgccattcaggcgcaaaaatcccgaaacatcgatgtattaatttgcgacacggcgggacgtcttcacaataaaaagaatttaatgaacgagctggagaaaattcatcgcatcatcgaaaaagaagcgccggatgcgcaaaaagaatccctcttggttctcgacgctaccaccggacaaaatgccattctccaggccaagacctttaacgaagtcaccgatctcagcggcctgattctcacaaaacttgacggcacggcgaaaggcggcgtggtcctgcctttggtgaaggaactggaaattcccattaaactcatcggcgtcggcgaaggcatgctggatctgcaggacttctccggaaaagattttgcgaatgcgttgataaatgcggaataatatgtatcttttcaactaactattgcaatttcttaatgaaagttggataatagagaaaagaaattataccaacgcgcgataggaggaggtatttatgaaaattacacgtcccgcttggctggaaattgatctcgatcaagtaaagaaaaacatgcaggaaattcagcggcatttgaaggaagggaccgaagtaatatccattgttaaagcagatgcctattccttcggcgccatagaagtggcaaagaccatgaaagaatgcggcgtaacacattttgccgtcgcctccggaaacgaagggatcgccctgcgccgtgctttgcctaaagtagaaattttagttttaggttatacgccggaagaagtttccgatatgatgatcgaaaattccatcgacatggccctgtatcgcctggatgtcgccgaaaagctgaacgccttggccggccgcatgggcaaaaaagccggcgtacacattgccatcgactcggggatgaaccgtatcggctttaaaccgacagaagaaagcgtcgatatcatcgaaaagattgttcgtatggacaatatcgaagtgaaaggcatgtttacacactttgccctcgccgatgaagaccgcgactttaccttaaaacaatacgaacgctacgactgggtttaccaacaattgaaaaaacgtggcatcacgctaaatcgccacgtcgccaattcccacgcgttaatgaattttagggaattcgacttagaatatgttcgtcccggtatcattcaatacggtacgagagaaggcgatcccggcggaagagattttgacgttcgctttgttgcacaattaaaagccgaaatcggtcacgtcaaaaccgtcggagccggcgaaggcgtcagctacggtcaaatatacgtcaccgaaggggaaaccaaaattgccacgattcccatcggctatgccgacggcatggaacgcagtatgtctgaaaaattcgatgttcttgttggtggcaagcgctgcccgcaaatcggccgcatttgtatggaccaaatgatgatcgatgcaacaggcgtcgattgcaaagtaggcgatgaagtcgttattatcggcagacaaggcaatgaagaaatcaccatcgaagaaatcgccaaggccaacaacgaaatccccacctccttcgtcacccactttaaacaacggttgccgaaggtatatatgaaaggcggcgttcgctacaagacagtcgatgaaattttagacattgaatattgacaatcgccgcaagggatagtataatccacagggtcaaggaatttacctgaccctgtttttttatgggagtgatcatggataagacagtacacgtcaatgttttgttagacttatacgatgaattactaagcgacaggcaaaggcaagtaatggatctctattacaaggaagattattccttaaacgagatttccgatctgttaagtatttcgaagcaggccatttccgagcacataaagcgcgcggaatcggcgctgaaaaattacgagtcgaacctgaaactcgccgaaaaaacgaagcgatggaaagaagacggcgaggcgattgtagcctccttggaagcccttaggcctttctcgacggatacccgttttcatgaaatcatcgattcgattgaaactcgtatagataaggagggatactatgatatttgaatccctggccgataaattgcaagacaccatcggcaaattgcgcggcaaaggcaaagttaccgagcaagatgtcgatgaggcgatgcgcgaagtcaaattggcactgctggaggccgatgtcaattttaaagtcgtcaaatcctttgtaaaaaaagtgaaggaacgctccttgggcagcgacgtcatggaaagtttgacgccgggccaacaggtcatcaaaatcgtcatggaagagctgtcggctttaatgggcgacagtgctgaaaaaatcgatttttctaaaagtccgacggtgatcttaatgaccggtctgcaaggggccggtaagaccaccaccacggcaaagcttgcgcgcttgcttaagaagcaaaacaagcggcccctgctcgtggcctgcgacgtttatcggccggctgccatcaagcagttggaagtattggcatcgcaagtgcaggttcctgtatttgctcagggaaccgatgaagatcctgtggtcatcgccaaacggggtgtggaacacgccaaggccaacggcaacgacgtcgtcatcatcgatacggcaggccgtcttcacgtcgatgaagccctcatggacgaaatcaaagggattaaagaggccacgtcgccgacggaaatcctattggtattggatgcaatgaccggtcaagatgcggtaaaagtagcccaagccttcaacgacgccctgtccattaccggcgtcgtactcacgaagctggacggcgacgcccgaggcggtgcggccctttcgattcgctcggtgaccgaggtgcccattaaatatatcgccctaggcgaaaaattggacgcactggaagtattccacccggatcgcatggcgaagcgtattttaggcatgggcgatgtggtaggcctcatcgaaaaggcggaagcctttgtggacgagaaaaaagccaaggaattggaagaaaaaattcgttcacaaaccttcaccttcgacgactttctggatcaaatggagcaaatgcgaaatctcggtcccttggaagatttgctgggcatgcttccgggcatgaacaacaaggccatgaaaaatttaaagatcgacgagaaagagtttgctcgcgtggaggcgattatccgctccatgacgaaaaaagagcgcacccatccggagatcatcgacagttcgaggaaaaagcgcattgcccaaggatcgggtaccgatgtaagacaggtgaacgggcttttaaagcaatttaaagaattgcgaaaaatgatgaagaagctcggcgcaatgagtggcggaaaaggtaaacgcaaaatgaaaatgccttttccattttaaatgagaaatatgggaggaaataatggcagtaaaaattagattaaagagaatgggttccaagaagaatcctttttacagaattgttgtagcagactccagaaaaccgagagacggtcgcttcattgaagaaatcggctactacaatcccctgacggaaccgaagatcctgcgcgtcgatgccgacaaggcgaacacctggatcaaaaacggtgcaaaacccacggacacggtagaccgcctctttaaagaaaatgccgtttacgacgcaacgggcagctacgacaactccgacgttcaaaaagctaaacgggaagaaaaaaaggccgctgaacgcaaagccttggctgaaagagaagccgaattagatcgcttagacgaagaagcaaaagaacgcaaggcaaaagaagcggaagaagcaaaagcagccgcagccaaagctgctgaagaagccgccgcagctgaagaaactgaagaagctgaaggggaagaagtagctgaagaagccccggaagcggaagaagtagctgaagaagcataagtttcaaaccaggaggtgagacatggaagcgttaattcactacatcgtctcgaagctcgttaaggatcccgagtccgttgaagttattaaaaccgtcgacggcgacgaggtccacatccaagtgtatctgaatcccgacgatatggggcgcgtcatcggacgtcagggaaaaattgcccgctccattcgaagcatcgcaaaagcggtggggacgaaggaacaagtgatggtctcggtggatttcgatgccaaagaaggataaagtactcgtcggagaaattacatcggcccacggcattcgcggcatgatcaaggtttatccctacacggattcgccggagcgattcaaaaccattcagcgcgtcttcatcgaaggtgaagataccctgcgcgagattgaatcggcgtcggttcaaaaaaacatggcgcttataaaaattcagggcgtggacacgcgaaatgcctcggagggaatcgtcaagaagaaactgtatattcccttcgaagatcgcaagccccttgaaaaagatcagtactttatcgacgacctgatcggtcttcgtgtatctactgtggcaggggatgtgatcggcgagctgaccgatgttctgacgcagcacggcaacgacatattggtcatatccacggaaacaggccaagtgcttattccgtttgtaaaagcctttgttcgctccgtggacgatgaaggcatcgtcatcgaacccatcgaggggatgctttcatgaggtttaccgtactgactttatttcctgaatttgtcgactcgatgaagagctattccgtcatcggacgggccgtggataaaggcatcatccgattagacagcgtcaacattcgggattacaccacagacaaacacaacaatgtagacgactacagctacggcggcggtccgggcatggttttgcaggcacagccggttaccgatgccatattaaaaaatcgcggatgggacggttacgtcattcatttatcgccgcgtggcaaggtattaacccagtcgaagttggaagcattggcaaagaaagaacacatcgtcctggtcaacggtcactacgaaggcatcgatcagcgtgtgttggaccactatatcgacgaagaaatttcagtcggtgattacgtactttccggcggggagctgggctctatgatcttaatcgacggcgtgagtcgcttgattgacggcgtcctgagcaacgaggattcggctgtggaagaatcccatagtcaaggccttctagagcatagccactacaccaggccctataatttccgaggctattgtgtacccgatgtgctgttaagcggcaatcaccgaaagatcgaagaatatagaagaagagaagctctgaaagtaacctacgaacgtaggcccgatctcttagagacagcaccactttcggagtcggataagagttatttaaagactctcaaagaaaaacaagagggggaaaagcatggacatcattaaatccattgaacaagcgcaattaaaagacaatgtgcctgaatttaaagtaggcgacaccgtacaagtaaactaccgtatcatcgaaggttccagagaaagaatccaagcattcgaaggtaccgtcatcaaacgtcaaggcggcagcatcaacgaaacctttaccgtcagacgtctttcctatggtgtcggcgtcgaaagaaccttcccggttcactctccgagaattgctgaaatcaaggtattaaagcgcggtaaagttcgtcgtgcaaaactttactacttacgcgatcgtcaaggtaaagcggccaaagttaaagaaaagaagttttaattgtttaggcattgcttttgcagtgcctattcttttaaattccttttaaatcaaagaaagtagcaggtgccatgaaaaaactacttattttgctcttggttctcgccggcgtgttatttggcggttacaccgtattaaataaagtgggcggcaacaatcaatattccgaagtttataaatcctttcacgtcatctacgaagaccagctcgtgccgaaaaaatacgccatgcgcgaagacggccagtactttatgtccttggaaggcgtgcaaaaatacatcgacaaaacggctcgcttcgacgattcgaaaggtgccgtcgtctttaacaatcgttgcggcgaaaaagtgttgcccttagacagcaatgaagccacggtcaacggcggaaagatcggtttaagagatcccctcgttaaaaaaggcgatcaaatctttattccggtggaagcattcatccacgattaccccattgccatgaattacgaaaaggacaaaaatgtcctgattatggataatcgcatgaagaaacacgccgtcggcacattggccggcgacggcgtcaacttacgcgaatccgacaccacagattcacccattgtcgccaccttaaaagcggacacaaagctttgggtgtatggcaaaaaaggcaattggtatcacgtcagggaacaaaacggctttctgggttggattcgtgaggacaatctaaacgtcgagaccttggaaggtggcgagtatacggcagacagcggccttgtgcagcaatcggccgtcaagaagcctttaaacatcacctacgactacacctacgcgcaggtcaaggacgaagtcattgccggcatcaagaaaatcgacggtttggacgtggtgatccccacgtggttttccatggaaaatgctcaaggggatattcgcgaccgcggcgacattcgctacgtcgaaaattatgccaaattaggcgtagctacatgggcctatttggacaacagtttcgatcccgatttaacccatcaattcctgcaaaacgaagaggcacgcaaaaaagccgtgtccacctttgtaaactttgccaaagcctacggcatgaagggcgtaaacatcgactttgaaaacatcaaagtggaagatcgcgacgccttaaccgccttcgtaagggaagtggcagaggaggcaagagcggcggatctgttggtttctgtttgcgtgacgccgcaaatttccaagaacgtgaagaacgaactttacgacagaaaggccttggccgagatctgtgactatgtggttttaatggcctatgaccaacactggggcagctccgaaaaagcaggctccgtcgccgaatacaaatgggtggaaggcaatgtgaacgtcagtctcaaggacattccgccggaaaaattcattctttccgtgcccttctatgcccgcttgtggaaagaaggcgacaagggactgacatccagtgccgtgggcatgaagaccacagccgattatgtgaaggctcgcggattaaatcctgtctgggacgacgaggcgaaacagtataccattgaacaaagcgtgaacggaaagagcgaaaagatctggatcgaaaacgcggagtctgtggcgtggaaagtttcgctgatgcgcaaatacaatttggcaggcatttcgtcctggcgactgggatttgagacgccggacgtatggacggccatggcggatcaattcagcaaataccgctatccctaccaatagaaattgcatatttcggaaattttgatataatgtcataggtagacggaacaaagaaaaaggagcgttcatggtacctgaaacacatcgtataatcgccggtgaagtgcgaaatcgcatcataaaggattacggcattgttttagacgaatccaaaatgttgcgtggatccattgcgccggacgtctatccgaagtataaatttattccccattactatgacgaaagcatcgattatatcgtcgagaaaatcgtcgccttggttccctatatgtcggagctggccaacgatacggcgtggaaaggtttgttaaatcttcccgtcagctatatgatcggcgtcatcagtcactatttatgcgactacatgacccatccccacgctcggcgcattcgctgcacgtctatgaaagacttaaaatcccatttgctttacgaaaaggatttgaatcgctttgttaaaaaacaaggcgtcgataaggattttatttccaatatggaaatggggagctttcatggcgaaaaagaggatctgcgcgtctatgtaaaagagcaaatcacgaatttaatcgagctttataaaaaagaacccatcacattcagaaacgatgcgaatttcgcatttttgattaatgtgtttatatcgaacgttgtttgtgaagcggccttcagctatcaaaaggccggacaagttcaaatggcataacctttgaagagaagggaagtaggacagcttatatttagcgaggcatgtcggtgaaagatgcttatgggcccctatggaaaacatctcggaggatctgctctcaaaagggcagacggttttacccgttattttgtaatagagtatgaagtactcgaaaaggtggcatagcgaatttttcgtccgtttgatgaagaattcgcttttttaatgaaggagataacatgagaaacaattctgaagcaacaaaatttacaattaaagaaacgcaaatcgccattaaaagtttaaaggattactttgaaagggatttggccaatacattaaacttaacccgcgtctcggcgcccttattcgtgcgtccggagacgggcttaaacgacaatttaagcggcgtggaaaaagccgtgtcgtttaaaatgcgtaaatacgatatcaatgtagaaatcgtgcaatctttggcgaagtggaagcgtaacgccttaaaggtctacggttttgattattacgaaggtctttacacggacatgaacgccattcgtcccgacgaagaattagacagcatccactccatttacgtggatcagtgggattgggaaaaagtgattcgaaaagaagaccgcaccgatgcctacttgcattttattgtttcggaaatttattcggttttccttcgcacggaaacctatattaacagcgtgtacccccatattctttcgagaaaattgccctcctccatttattttatgacctcgcaggaactggaggataagtatccggacttgagcccgaaagacagagagtacgctatctgccgcgagaaaaaagccgtatttttacaaggcatcggaaaagaacttgcaggcggcgcgcctcacgacggccgaagccctgactatgacgattgggatttaaacggagacattctcttctacaacccgactacggattcggtgatcgagctttcctccatggggatacgggtggatgaagatagcttaatgcgtcaattagaaatagccggtgcgacggatcgcctagagatgaagtatcacaaggatcttttagaaggcaatctgccctacaccgtcggcggcggcatcggccaatcccgaatttgcatgttctttttagaaaagaaatccattgccgaggtgcaagcctccgtttggcccgatgattttctcttggaatcgaaacttcgcggggaagacgtgttgtaaaaaccgtgaattctttcgtgctttatggtaaaataaagcacaataaggaggaaaagcatgtccgtacaaaatgcgcaactaaatgacaagacgttgaatttcgtcgacatgaaagcgaaactgacgcagaagtttttgtatggagcggatagctcggccatgcaactccttttaaatctctacgatctggaagagaaaattcacaatattttcccctcctacgtatcgatgaaaaatctgaagaaggacattctgtcttttcttcggcgaaaagataatcgcgccgtctttgcaaacagcttgaccgatgccatttatgacgacatcaatcgttttgagctggtgatgtacttggccggctataaatgcggttacagcgcggcatcggaagccaacgatctggagatcatcgccctgcgccacatcgatctgtgtcatcttttcgaacgcaaggtgctgtttcactacgatgcggaatacgacgatgtgcggcgttttcgtaaagaagccttggagcggcacattcgcgcaatcggcggcggagaagccattggcgaagaggcacgtcgtttttcaaaatcggtgttgaagcgcaaagtattaaccttaaatcattatgtggaccggcaattgcaagtcgattttcaaagcccgaaaaagttatatcgcgagtcggactatgttctgacgcgggaagagctggtcggtttaaatcgtaaattaaagaattttctatatagagacggattacgaatctatttgtctgcctattggtgcggcatcaacgattcggtcttaaaaagataccgtccgtaaccgaagggctcgaaggagccctttttttaaggagttttatgagagttttgggaatcgacccgggccttgccattatgggctatgggattatcgacgtggagggcaatcgcctgcgacccgtggaatacggcgtcatcgaaacgacaagtaagacggattatccgaaacgcttgtttcaacttcatgtggagctgaaaaaaattatcgaatcctcaaagcccgacgaggtggccatggaagagctgtttttcaacaaaaacattaccacggccatatccgtggcccaagcccgcggcgtggagatcttgacctgcatggaaatgggcctgcccatttatgaatacacgccccttcagatcaaacaggccgtggtgggttatggccgggcggagaagcatcaggtacaggaaatggtgaagatgtttttgcatttaaaggagattcccaaaccagacgatgccgccgacgggttggccatcgccataacccatatccattcggcgaaaagcaaagcacattttgaattgaagtaggtgaactatgattgatcgcttgcgcggcacagttttagaaaaaaaattagacggcgtcgtcgtggagaccggcggtttcgggcttatggtctatcttcccggatccaatcttggcggaatcgaagaaggggaccttacgaccatttacacttatttacaggtaaaggacgacggtttttctctcttcggctttttagacgagaaggatcgggaattatttctcctgctaattggcgttaccggcgtaggcccgaaagtggccatgggcattttcggtcgatttgctgccgacgatgtgatttattttattcaaaacggtgattcgaaatccttgacggaagcgccgggcatcggaaaaaagaccgccgagcggttgattctggaattaaaagataaagtgaaggggctgggcgtgacgtcgcctcagggagcggccctttcgcctgcacctcagggaccgaagcaagaagccgtcgatgccctggaagggctgggctacggcaccaacgaggcgaaggcggcggtaaaaggaatcgacagcgacgatgtggaagttattttaaaggcggcgctgaagcgtctcgccatgaaagggtaaggagggcctatggaagatcaacgactggtatcgaaaaccgtgctgcctcaggaagagcgcatggaattggcccttcgcccgaagtttttgtcggaatacatcggccaggacaaggcgaaagaaaagctggaaattttcatcgaagcagccagacgacgcgacgaatctttggatcacgccttacttagcggcccgccgggcttgggaaaaaccaccctcgccaatattatcgccaacgaaatgcacgtgaatatgcgggtcacctcagggcctgccatcgagcgccccggagatctggccagcattttgaccaatttagatgaaaacgacgtgctcttcatcgacgagatccaccggattccccgcacggtggaagaaattctttacccggccatggaagattttgcgttggatattatcgtgggcaaaggcccgtcggcaaggtctcttcgtttggacctaaaccacttcaccttaatcggcgccaccacccgctccggtcaattggcatcgcctcttagggatcgcttcggcgtgcttttaaatctggagctctacgatgcggaaagtttaaagaccattttgcttcggtcttcagaaattttaaacattcccctaagcacctccggcgccttggaaatcgcaaagaggagccggggtacgccgcgtatcgccaatcgccttttaaaacggattcgcgactttgccgaagtgaagcgaaacggattgattgacgaagaggtagccaaagaaggcttgcgccttttagatgtagacgattatggcctcgatgatttggaccgtagaatactcaggaccatgattttagactacgagggtcggcccgtgggaatcgacaccatcgccgccaccatcggcgaggagcgcattaccatcgaagacgtctacgagccttatttgctgcagattaattttattcaacgaacgcctcggggccgcgtagccacgaaacgggcgtacgatcacttaggcattccctacagaaaggacgagtcatgaaaaaaatagtaagtttgctggcttttgtcgccatactcgtattgggtgcaccggtatttgcgcagtcggagccgattcacgttaaagtcggccccacttcctcctcgattaccttgtcgacagagggcagtttgatgaaaaacggcagccccgtcggaagcagctttaatgccacagcgtccaatgtatcggaatcggatgtattttcttcctccgccggctacattgctatcggcgggaagccatacaggggaagtgtgcgctttattatttccggcaatcaactgaaatcggttaatattgtggatgtggacgattacattcgcggcgtactcccgaaggaaatcggcacgaccacgcccatggaagcgctgaaggtgcaagccgtggtctccagaagcttcgcctatgccaattggaacaaatttgcgaagtacggctataatttagacgactccagcgcctcgcaagcctacgccggcatgagcgtcgagtcaccgatgaccgaccgggccgtagcggagacgagaggccaaattctttactacaagggcgaagtggccaatacgatttttaacgccaccagcggcggcgaaacggaagccatcgaagaggtatggggcggcaacccctcaccttacttaatcgctttaaaagacccctattcattgaatacccgtcacgccacctggcaagccacactcgcctccgccgacattcgcaaggccttcccctccgtaggacaacccacggccttggaagtgctcgagcgctcttccacggggcggattaaatccatggccgttgtaggcacgtcgggaagagaagtgatgacgggcaatcaattccgaatgaaaatgggctccattaaggtaaagagcacaaacttcggcaccgaagcaggcgtccgcccggttcaagcaactatggcggtcatgactgccacgtgcatacggccctatgtcaatgaccgaattatttccgcaggtggcatccgcacgggaagcgtcgatgcggtgattcgggcgcagggtattgaaaaggcaaatgctcaaaaggcgacgtacaacgacaccatgcccatcggagaagccattaccttaaagggcacgggctatggccacggcgtgggcctgagccaatacggcgccattgaaatggccaaggcaggcaaggattacaaagcaattctgagcttctactatccaggcacggaattgcgctagaaaggacagcatgaaaacaagcgagttttactacgatcttcctgaggaattaatcgcacaacatccggcggacaagcgggatgaatccaggcttttacacgccatggcaaatggcgaggtggaggatttaacctttaaagacattattcgatttattcgtcccgaagatgtattggtcattaacaatacgaaagttctgccggcgcgaatctacggccatcgtccggaaaaagaggagcacatcgaagtgcttctcgtcaaagaaatcgaaaagaacctttggcagtgcatggttcgtccgggaaaaaagatgaaagtcggcggcaccattgaattcggcgagggcctcacgggaaaagtggaagcggtcaccgaagacggcctgcggcacattcgattcgcctatgaaggcgtgtttatcgaaattttagagcgcctcggtgagatgcccctgccgccctacattcacgaaaaactaaaggacaaggaccgctaccaaacggtctacgccaagtacgaaggctccgctgcggcgccgacggcaggtctgcattttacagaggagcttttagacgccattcgcgcacagggcacggaaattgcagaaatcacccttcacgttggcctcggaacctttcgtcccgtaaagaccgacgaggtggaagcccacgaaatgcacagcgagtattataaaatcgacgagaaggcggcggaggccatcaatcgcgccaagaaaaacggcggcagggtcatcgccgtaggcaccacctccatccgcaccttggaaagttgcatggtaaaaaacggcaaaatctgtgccgattccgacaacacgtcgattttcatttatccgggctacgaatttaaaatcgtggatgccatcgtgacgaatttccatttgccggaatccaccttgattatgttggtctctgctttttacggaaaagacgccatactgaaagcctatcgccatgccgtgaaggaacgctatcggtttttcagcttcggcgatgccatgtttatagaaaagagggaatcgtgaaatttacactaacccatgaatcttcgaacacgaaagcgcggcggggcgtcatcgaaacggatcacggcaccatccaaacgccgattttcatgcccgtcggcacccaggccacggtaaagaccatgacgccggaggatttgcgggccattcaggcgcaaatcattttgtcgaacacctaccacttattcctacgtccgggcacggaaatcatcgaagcggcagggggcttacaccgatttatgcattgggacgggccgattttaacggatagcggcggctttcaggtatttagtttgtctcaccgaagaaaaatcaccgaagagggcgtcactttccgtagccatatcgacggctcgaaacagtttctttcgccggaaaaatccatcgaaatccagcatatccttggctcagacattatcatggcctttgacgagtgcgcgccctatcccgcttcgagagaatacatcatgcactccgccgagcgaaccagtcgctgggctgaacgctgtaagatttatcacaacgacaagccggggcaaaacctcttcggcatcattcaaggcggtatgtataaggaccttcgcagaagaagcgccgagcaactggtggccatggactttcccggctatgccgtaggcggcttatccgtcggcgagcccatcgaggttatgtgcgacgtcctggaccatacaacggactttatgccgaaagaacagccccgctacctaatgggcgtcggaacgccggatttcctctttgaggccgttgaaagaggcatcgacatggcagactgtgtccttccgacgagaaacgcgcgaaaaggcagctgcttgacaagtcacggcaagctcgtcatcaaaaacgcccaatacgcccgcgatttcagacccttggacgaggaatgcgactgctacgtgtgccgaaactactccagagcctacattcgccatttgtttaaagccaatgaaatcctggggatgcacctggccagttaccacaatttatattttctgttaaatctcatggacaacataagaaagtccatagaagaggacaacttccttcaatataaagatgacttttacgggaaatatggttataataataagaaatagttaggaggtttgcatggaatttggagatggtcttttcccgctgggagcgctcggtggagagaactcaatgatccctaccatcatctctgtcgttttaatgatcgccatcttttacttcggcattatgcgtccgaataaaaagaaggaaagagaagcggcggaaatgatgaaaaacctgaccgtcggtgatgtcatcaatacctatggcggcatcgtcggaaaaatcgttcaggtcaaagccgacgtcatcatcatcgaatcttcgggaatgaagacgcgtttggaaatcatgaagtgggcggtaaagagtgtaatgaagccgtccggacgtaaagctgaaaaagaagataaagctgaggatgaagaataggagtattttatgaaatacataaaaacattgacgaaacgttcactgcgtaaaggtttagaaaaagccggttgcggcgaatgccaaacctcttgccaatcggcctgcaagacttcttgcaccgtcggcaatcaaaagtgcgaaaataaggatagataaggttgtgggcttcccacacctttttcttttagaaggggaaatttgtgcgtaaaattcatcgttttcaaggaaatggcaagcatattttactggatgtggcctccggctcggtgcacgtcgtagatcctatgattttcgatatggcaggggatatgttggatctgtcgaaggaagccatggtagaaaaatacacaggtcgctacgatcccgacgacgtggcacagggctacgacgagctggattatctcatggaggaaggtcttctctattccgaggacacacctgtggatttaagcggttttaatccccattgccatattaaagccatgtgtctgcacgtctcccacgactgcaatcttcgctgcgcctattgcttcgcttcgcaaggggattttcacggcgagcgcatggtcatggatctcgaaaccggtaaaaaggcactggattttcttttagaaaacagcggaaaccgccgcaatttagaagtagactttttcggcggcgagcccatgatgaattttgaggtggtaaaagagctggtcagctacggcagagagagggagaaggcctacgggaaacacttccgctttaccatgactaccaacggcctcttgttaaatgatgaaaacatcgcctatttgaaccgggaaatggccaatgtggttctgtctattgacggccgcaaagaaatcaacgacaccatgcgccccacggtcaataaaaaaggcagctttgataccatcgtgccgaagtttcagaaactcatcgcttctcgaggggacaaggactattacattcgcggcacctttaccaatcacaatttagatttttcaaaagacgtcatgttgttccatgagctgggctttgaaaagacctccatggaaccggtggtcaccgatcccaatgaggaatacgccattcgtgaagagcatttggatcaaattttaaacgaatacgaaaaactcagtgaggactatttgaagattcgcaaagaggaccccgactttctctttttccactacatgatcgatctctccggcggcccctgcgcctataaaaaaagcatcggttgcggcgccggcagcgaatacgtggctgtgacgccgacgggggacatttatccctgccatcaatttgtcggcgaagaagatttccttctgggcaatgtggatgaaggcgttgtgaacaaagatctgcaggatcatttccaaatggccgacgtcttccacaaggatgcctgcaccgagtgttgggccaagtatttttgcagcggcggttgccacgccaatgcctaccacaacaacggcgatatttacgagcccttcgacatcggctgtgaaatggagaaaaagcgcttggaatgcgcattgagtgtctacgccaacgagcagagtgaagaatgaaatattggtctattaaaaacgaacaaccgaaggaatccatcgatttccgcgccttcggactgcaggaatgggagtatcgcattcttctaaatcggggcttggacacgaaggagaaaatacagcgctacctccatccttccatggaacacattcattcgccaattgcgatgaaggacatggtcaaagcgggcaatctcattcaaaacgtcaaggggaaagtccgcattatcggcgattacgactgtgacggcgtcatgagtacgaccattcttataaaagggctgcgtggcctcggctacgatgtagattaccgcctgccccatcgccgggaagacggctacggcatgaagccctatatggccgatgaagccgcccatgacggcgtagaggcgatcatcacctgcgacaacggcatcgcccaattcgacgccattaaacaagcaaaagccctgggattaaaggtcatcgtcatcgaccatcaccaagtggtgcgtcgggaaggcgaggaagtactgcccgaagcggacgccattattaacccccatcaagaggcttgcaattatccctttaaaggcttgtgcggcggcgccttgtctttttatttcatcaattatctttacaccattgcagggaaaatcgagaccatggacgaggatttaatcggttttgcggccttggccacggtttgcgatgtcatggagcttatgggcgaaaacagagatctcgtaacctccggcctggagcaattgaaccgcacccaaaacatcggcttaaacgccctgagagacgcagccgggataaaaggcgacatcgacgcctaccacttaggctttatcttaggtcctaccattaatgcggcggggcgattggatacagcatcaggcggggtggagttgtttttaacggaagacgaagatgcggccaaaaagactgccgcttacttgcgggaattaaacaaaaagcgtcaagacttaaccaccgaagggctcgcccgtttggaaaaacaactggccagcccaaaagaaaatgtgcagcccatttacatcttaaaagatgaaaccattgacgagtccatcgccggcattatcgcagggcgcattaagggcaagtacaatcgcccctgtattgtgctcacctcgggcaaagacgggctaaagggatcgggcagaagcatcgaagcctataatatggtggagcaaattcgaaaaagcgaaaaatacctctcatctttcggcggccatgccatggcctgcggtttaagtttgagaaaagatcaatttatcgcctttaagctggatgccattgaaaaaagcgagttggatccccgcgatctgattcctcgcgtgcgactcgacgtgattatgcagccggacaaggtaagctttgagacagtggagcgcatcaatcgcctgaaacctttcggaaacggaaatcccaaaccccttttcggcgccacgggcatctatgtttcacagtaccgaattttaggtaagaatagaaatgtaattaaactggagctattctacaatcagatgcgctacgacggcattcttttcatgccggcagacgagtttctggcctttgccaacgaggcaaagggcccgggcggcagtttgtgcgtcgatatggcctatatgcccgccatcgatacctttaacaatagaaatacgcttcaatttcgaatcgaagacttaagacgatcaaaacggtgattatatgattgaacaattgattgaaaaaatcttgtcctacaacccggacgcagatgtggaaaaggtccgcgaagcctacgactatgccgaagcccatcacgaaggccaaaagcgcaattcaggggaggattatattgtccatcccttcaatgttgcgcttattttggctgaaatgaatatggatgtatcgacaattatcgccggtcttttacacgacaccattgaagatacggacgttacctacgatgatgtgaaagagcgtttcggagaagaagccgccattttggtcgaaggcgtcacgaagttaaaaatgcttacctaccagaccaaacaagagaaacaggcggaaaatattcgcaaaatggttctggccatggcaaaagacattcgcgtagtcatcgtaaaatttgccgaccgcctgcacaacatgcgtactctggagtatatgaccccggaaaagaagcacgacaaggcccttgaaaccatcgaaatctatgcgcccctcgccgatcgcctggggatgagtcgagtgaaaagcgaattggaagatttgtctcttcgctacttggatccggaaaactactacaatttagtggacatggtaagccgccgcaggagcgagcgagaagctttgattcaatccttaatcgacgatatttccaagcagttgaagcgcatgggcatcgccgcggatattaacgggcgaccgaaaaacttttacagcatctacaaaaagatgatgaaaaaaggcaaaaccttcgaagaaatctacgacctgcaggcgattcgtattctcgtcgacgatgtcaaggattgctacggggccctaggtgtagttcacaccatgtacaagcccattcccggtcgcttcaaagactatatctccatgccgaagcagaacaagtatcaatccctgcacacgacggttatcgacgacaacggcgaaaccttcgaggtgcaaattcgtacctgggaaatgcacaagacggcggaatacgggatcgccgcccactggaagtataaagaaggggcgaagaaatctacctccttcgacgaaaatttaacctggctgagacagcttctggaatggcaaaaggatttaaaagatccgaacgagtttatggaaacgctgaaggtcgacttttttgccgacgaagtcttcgtctttacgcctaatggcgacgtcattaacctgcccgacaactccacgcccatcgactttgcttatcgggtgcacacggcagtgggaaacacctgtgtcggcgcgaaaatcaacggtcgcatcgtttccttaagtcacaaattgaaaaacggcgaaatcgtcgaggtcattaccaataaaaactccgagccttccttggattggctttctatcgtcgccagtccccaggctcgaacaaaaataaagcagtactttaaagtcaaagaccgggataaaaacatcgaaaaaggtcagaccatgatcgaacaagaggcgaagcgccttggttacaggccctcggaattcattcgcgacgaatggatggaagaggtgcgccaacggttgaagtttgacaatttaaacgacctgtattcccaagtcggctacggaagcatgagcgttcgccaagtaacggcgaagcttgaagaatacgttaaggaagaaaagcgcaagaccacggcggaaaatatgaccgtggaagacattgaactggatgggtcgaagagccatcgaaatgccggcggcatcgtggtcaaaggcatcgacaatgtgaaggtgcgcatcgccaagtgctgtacgccggtccccggcgatgaaatcgtgggattcattaccatgggccgtggtgtgagcattcaccgatcggattgcattaatttaaaaaataatatgaacgaggatcggctcattcccgtgcgttgggaaatcgacgaaaaggaaatgtacagcgcggaaatcgaagtgcgcgcctcaaacaagaacaatgtcttggccgacattgccaatcgaatccacgacgcccgattggatattcaaaatctctctgccagagaggacaaggatcacaatttgattatccgtaccgtggtgcggattcaccacatcgacgaattggcgcgattgttgaagaaattggaacgcgtagaaaatgtttatgaagcctatcgagtcagcggttaaggaggaaatatgcgagcagttgttcaacgagtaaaacgggccgcgctgtctgtagacggaaaggaagtctcctccatcggcgggggcctgatggtgttggtcggcgtcacggataccgacacgaaaaaagacatggaatacatcggaaacaaaatcatgggcctgcgcgtcttcaacgacgaaaacggcgtgatgaatgtgaatgtcggcgacagccaaaaggaaatcatggtagtcagccaatttaccctttacggcgacgcgagaaagggcaatcgacccagctacattcgcgcagccaaaggcgaagtatcggaacccatgtatgaagatctgatagcctacatcgaatctaagggacacgacgtggctcgcggcgtttttggcgcggacatggccatcgacatggtggcagacgggccggttacgattttaatcgacagtgaaaggagcttttaatggcagtagatacacttttagtcggcggtacgacgaattgttatattgtttatgacgacgataaaaacggctttatcatcgatcccggtgcggaagcggaaaagatccttgcctacgtgaaagatcagggcttaaccatcgaagggattttactcacccacggccacggggatcatatttccgcattaaataaagtccgtgacggcctgggcgtgaaagtctatatgcataaaagcgaattggaaaactttctaagtcaatcgcctgaattcgtggccatgctcggcggcgaactgcccgacaaaaatccggacgtctttgtaaaagacggcgacgttatccactttaaagcgggggatgtaaaggtaatctttacgccgggacacaccccgggaggcgtttgttatctgtacggggatacacttttcaccggagacaccttattccaaggctccatcggccggacggattttcccggcggcgacgtggcggccattatgtcttcccttataagactctctaaattagatgaagatctaaaggtgctgtccggtcacggattccccacgaccatcggcgcagaaaagcgcatgaatccctttatgcggcaaatattatgattcgaatagttaatggcacagattcggagtggcacaccttttatgagctgcttcggatctattttcctgcttacgagacatccggcgaattgtttttaattgttgacacgaaaccgaacagcaaacacgtaaccttactcatcgacgatgatcgctacgacaaaacctttttgggtgaggacgaatttgaattgaagcgaaaaataagtgcgtggattgccgccgaagtggagcatccgcgcaaagagccctccttgtggggaagtttaacggggactcgccccattaaatttttacaaaagcatcgccgagaattaggggatgccggggttatggagctcttaaaaaaggactatttactggatccggaagtagcgggccttttgatggatattgcgaaacgggaaagtgccgtgatcggagacaattggggccgcgggtattccttgtacatccacattcctttttgtcccacgcggtgcgaatactgcagctatcccaccatcggaagcgacaacaaagaagccgtcagattgtatatggattacctcgtaagggaactttcatttgtgcttcaaaaaatggacagcgccccggagaccatctacatcggcggcggtacgccaacctccattcccgtggaggaattgaagaaaatctttgagctgctccgcgatttaaagcccaaggaatttacccttgaagccggcaggcccaagaccattacgccggaattggtggagatgattcgcaactaccctgtgagcagaatcagcattaatccgcaaaccatggtggaccgcaccttgaaagcggtgaagcggccacatagcgccgaggatatattaaaggcctaccgcctggtccgtgaaaaaacgaatcttgcagtgaatatggacatgatcttaggtctcggcgatgagaccgtggacgatgtgaattatacgctgaatcaactttgcgaactggaacctgaaaacatcacggtccatatgctgtctttaaaaaacggctcaaagctttttgaaaacaaaagcgtttttgtaaaaaatacccgtgccatggagaacttcgccatgaatttcttaaaggacaggggctaccatccttactacctctatcggcagaagcgtattttaggcaatggcgccaatatcggctatgcgaaggaagggaaagaatccatctacaatatgattatgatggaagaaattcacacggttatcggcgtaggcatgtccgctacgacgaaattagtggatagcgagggaaacaccattcgaaagttttcaaatttcagaaatttgcgggactacacggaccgtttcagcgaagtgcttaagaagaaggcgacgtatttgggagacgtactatgattttaaaaaaactcttagatgccatagaaataaaagatcgaaaaggcgccatcgatgcggatcacagtgtcgacggcatctccaatgactccagggagatcggcgaaggagatatctttgtcgccatgaaaggcgtcttggccgacggtcacgattacattcaaaaagccaaagaaaagggtgccgccctggctgtggtggatcattttacggaggacgacattccacaaatcttggtcgataatcctcgaatggccctggccgacttggcctgcacgttctacaatcatccgtcgaaagagatgaaagtgttcggcgtgacggccaccaacggcaagacatccacggcctatatgattcgcgatctatttaaagaagcgggctatgaggtcggcgtcgtgggcacagtggaagtgcagtacaaagatgtgtccattccgtcgattttaacgacgccggagagcatccatctgcaaaagcatttgcgggacatggcggatgccggcgtggacgtggtggttatggaagtgtcctcctcagctcaggaattatacagaagcagaggcatcgattatgacatcgtaagctttaacaatatttccgtggagcatttagagcaacacggtaccttcgaaaactactttcactacaagagccgcttgattcgccacgccgagaaaaagacggcggtgattttaaacatcgatgcgcccttaatcgaaggcctggtcgataagaccaagggcgatgtgtttacggcgggtatcgaaaaagatgcatccatcggaatcgatgccatcgacctgtcctcaggttttgcgaaatttaattacgtggtgcggcaggggcatcatacggattattggtccctggagcccacggtttttcccattcaactgaaagtggccggctatcattccgtgttaaacgccatgatcgccataacttacggcttgctggaaggaatagagggagaagtcattcaaaaggccatggaaaatttttctggggtcgaaagacgcttcgaattgatctataataaagaatatatgatcctggacgatcactttgccaacgaaaaaaacatcgccgttaccttggaaaccctgtgccacatggaatacaagaaccttcacctgctttatgccattcgcggcggaagaggcgccgagttaaatcgcgacaacgcccttgaaatggtgaagtggatgcacaaactgcccttaaagacatttgtggccaccaggagtgaagaagtggtcacgaaaaaggacgtggtatcggaaagcgaattggccgcgtttaaagaagtcatggccgatgcaggctacgatgtgcccgtggtagacgatttaaaaagcgccatcgacaaggtatggggcgaggtcggcgaaggggatgtctttttactggccggttgccaaggcatggaccacggcgccaaatacgtgtgggaaagcttggcggaaaaagcaacaggcgatgagagatctgattggatgaagaaaatagaaaacagaatttgctaggaggcatcatgggagaagcattaggcgctttaaaacgcagtcatttttgtggaacattaagagaagaacagatcggtgaatccgtcaccgtcatgggctgggtacaaaaatccagaaacctcggggccattgtttttgccgatcttcgcgattacacggggattgtgcaagtggtatttgacggggatacggatgaagctatttttgaaaaagcgacgcgactccgctcggaattctgcgtcgccgtcgtgggcacggtccgcatgcgaagcgctgtaaacgaaaacattcccacgggcaaaatcgaagtgttggccacggaattgaagattttatctgaatccgacgtgccgcccatttatgtcaaagacgacgacgatgtgtccgacgacttgcgtttaaaatatcggacgctggacttgagaaagccccgcagtcaggcgattttacgcacccgttctcgggtatataaattaacacgggatttcttcgacagcgaaggtttcgtggaagtggaaacgccgatgctgaacaagccgacgccggaaggcgcgcgggattacttggtgcccagtcgtattcacgaaggggaattttacgccctgccccaatcgccgcagctgatgaagcaaatgctcatggtggctgggtttgatcgctacattcaaatcgcccgctgcttcagagacgaagatttgcgcttcaaccgtcaaccggaatttacgcaaatcgacatggagttgagctttgtagaagcggaagatgttatcgaagtgaacgaacgttacttaaaaatgctttttaaggaagttctgaacaaagatttagccattcccttccatcgcatgacctatcaagaagccatggatcgctacggcgtcgacaagcccgacgtgcgcttcggcatggaattaaaagacgtttccgatttagtgaaagactgcgactttaaagtattcacctccgccgtggaaagcggcggcagcgtacgggccatcgtcgtcgaagacggcgccgatttcttttcgcggaagaaaatcgacaagctggaagccttcgtcaaagactttaaggccaagggtcttgcatgggccaaggtgaaggatgacgaaattcaatcgcctattttaaaattcatcggcgacgacaccatgggcaaaatcctggcaaaactcgaagccaaatccggtgatttggtgctctttgtagccgataaaaacgacacggtctatgcggcgctgggtaatttgagaaaccacattgccgatgaaatgggcatgatccctgaagatgtcatcgcgcctttgtggatcgtggaattccccttgttcgaatacgacgaggaagaaggacgctatgtggccaaacaccaccccttcacatcgcccatggatgaagacttggataaactggaatccgatcccggcgcctgccgcgcaaaagcctatgacatcgtcattaacggcgacgaaatgggcggcggatccattcgtatccacgacagcgagattcagtcccgcatgtttaaagccttgggattcaccaaggaagaaacagaagaaaaattcggcttcctcatcgaggccttccgctatggggcaccgccgcatggtggcttggcctacgggctggatcgcctgattatgcttttaaccggcgaaaagaatatgcgccatgtcatcgccttcccgaaaacccaatcggccagcgatttgcttaccggcgcgccggtatctctctcggaaaagcaattagaggaagttcacattcgcgttattgaggagtgatcttatgatccaaattggacacattttatctgttaaaaacggattagcctatatggaagtcagcagaaaaggcgcttgcggctccgcctgtgccgtctgcgagagcacggcctgtgagtcgaaatcggaatttattaccgttccaaacgaactgaatgccgaagaaggggatcgcgtggaattgtttgttaacgatcatttcgtgctccactccatttacaaagtctacggcattcccttgatcgcttttttactggccgtcggtctggggcagttaattctgccggatgccatggcgagaaaagacttgtatatctttattttcggcgccttgtctctggtcatcagctactttattttgcgttcggtagacaagaaacacgccgatcaggcgaaactgaaaatggtccgtattttgtaaatagaaaatccatgccccgtggcatggattttttgtgtttctatggagttaaaaggttttaaatttgtggaaaataggatgggtatttctcaatgagcgttttctgaaagcacgaagggattgggaaaacaaactggacgctacaatgcccatggaaagcgccacggcaatggaaaaggtgtttgccccttcccgtacgaaaaattccatattgtcctgaattaaatagctcatggtgtaatacatgccgccgccggggaccagcgtaatcaattgaggcagaacaaaaatcgtcgccggcattttgtaatggcgagataaaaattcgctgagaatacccatgattaatgcggcaacaaacgcgccgaaaaaggcgctgccttccagttccaaaatttttaaataaaccaaataagagaaaccgctgctcaatgcggcggggatcaacgctcttttcggtagttcaatgggaatggagtaaccgatggtcgctgcagttgagactacaaacatgataaaaagttttgaaacgggcatatcagcctcctataatcttttgaatgttcagaataaatccgacgcccagagcaatggcgagggcgacgaaaatgccctttgtaatgccgatcatgccggagacaaagtccccgctcataatatcccgaagggcgtttgtaacctgcaaaccgggtaccagcggcataatggagccaataataatcatatccatatgcaatcgcgacgatgcggaagcgccgataaaagcgagaattgaaatgaccatggtgccgatgaaagtttcagggaagaaagacatatcgtaatgggaagtgatgcgcatgctcaagcccaaaacggaaccgacgaaaaaagtgtaggcaaaatcgaaccaatcgccgccgaacataatggcgaaagaagcactacacaagccggtaaagaggatagctaatggcaaggaacatttttccatggttgagatggaatagagctctttttttgcatctttcagagaaatttgtccggcgacaaattttctggaaaaggaatttatggcgtcgatgcgcgtcagatgaatcccctgggattcgatatctttaaacatggttatggtttcgccttcgtattgtgcggagacaaaaatcgccgaactcagaccgaagacctccacctcgtgaatttcttccacgcaggcacacatacgctcgatggtatcctcggcacggtagatttccgcgccgttttttataagcatttggccggtaatcatggccagattaatgacatttttggcttcatttaaatcatttacgtgaagtttttccatgccaatcacctgctttctttattaattctaatttagccttgcggctcagtttttttatggccgcctcccgcttaagtccccacgatttgtctgcgccttcttcgacataaacgagggatacgggcaggcgagcgcgggtgtatttggcaccgacacctaaattgtgttcctcaaggcgcctggctggatccgtggtgtagcccgtgtaaagggtgtcgtctgcacagcagaggatatagacgtaatgtttttttaatttttccattggcttaacacttcttttatggcgtcgtaatgaaagccacgggatagaagaaagcgaacaatcttttcccacgacttatttaattcaccgccacgaaggtatttcttttccaccacagactgaatcatgtccttttccaaatccgtcgtgtattcctccagaacgcggtcaatggtgtcgtcgtcgatgccttttctgcgaagggcgtaggcaattttcatcggcccgtaaccgttaatgtttcgcttgtcccgacaatacaaaagggcataggcctcgtcgtccagaaaatcgtagtcgactaagtagtttaccacttcgtcgatgacttcgccacataattcctccgaaagaagaagtgtgcgaatttcctgctccgtttttctgtttctcagctttttcagggccaaatcgattccctcttgtcgggcactgtcgaaacgaatggcggcgacatctttctcgtccacctctttgcccttatataaattgtggcgcacgaataccgcctctttaagggcaagggtctcgtcattggagaggcagattaaatagcgggaaccgtctttttttatttttaaaatcttcataggcatcactgacttattttaacatatattagaattttcttctcgatgatgcggatcattgaaggggcggaaacgttgaaaatgtaccgttgctgtgatagtatttatgtaaaattgagatgaggtgcaggatgattgcaatactttcacagatatttaaatacattttcattctaatcatttacctgtttatttttacgattattcgtatgatttatttggatattcgctccatgcaatccatggaagtcggtaaagatgaagcgtatttaaaagttgtgaatcgactggattcactgaattttaaaatgcaagaatactacgtgctcagaggcgcgacgaaattagggcgaagcagtaaaaacgatatcgtcatcaaagacagttttgtttcaaaaaaccatttgatgattgaaaaagaaaacggccattactatattcgcgacttaaacagcgccaacggcacgtttttaaatggtcaaaccctttacgagaaaacggaattgaaaaacggcgaccgcatcggcgttggttttattcaatttttatttgtcgatcaaagtaggtgattctgtggataataaactgttcagacgaccgcgagacatactgctcgtttttgaaatcttggccatcgctttggttttttatacctacgaagggcatctggatcgccaattgttattcctgacaggtggtcttgtttttgttatctacatttcaaattttatcctcggcaaaattactaccggcgataattatatatttttaatcgtatcccttcttctgaccattggtgtcatcacgattttccgcataaaaccggaaacgggcatcaagcaacttcaatgggcatttataggggtattgtttttttatgccacctatttcatcgtccgcgtcgtgccccatgtggaacgctacggctctttggccttgatcatcagcgtcctgctcttcttatcgacgattctgtttggtaaaaccgcccacggagcgagaaactggctcaacctcggctttattattattcagcctacggaatttattaaaattctgctcatgtttatcctaggcagcttttactataattacgaaaaatacaaaaagtatccctacaccagctatattattatggcgatcatttactttttcgtcttgctcttatttattcaacgggatttgggaacagcggtactgtttatggctatgtacatcgccattcaatttgtttacgatccggatattaaggcgtttttcatcaacctcggtcttttggccctgggaagcgtcttgggctactttctcttcggccacgtgcgtacccgtatcgacatatggctcgacccatggagttccgcttacggcacgggcatacagatcgtgcaatccctttttgctattgccgaaggcggcttcttcggtgccggcatcggcttcggccatccggagctgattcccgtcgccgtatccgactttattttcccggttatttgcgaggaaatgggtttgtttgcaggctttgccatcattctactgtacatcctcttaatttatcggggcattaaaattgctttggaacaagagtataaattttatcgcatgctggccatttcagcgacggtactgatttctgttcaggcctttttgaatatcggcggcgtgacgaagttgattcccatgaccgggatcacccttccctttatgtcttatggcggcagctccattttatccagcttcatagccctgggcattttgcaggtagcctcggaggatttgtcgtggaagtatgagagggaaattatgaaagatgaggtgagcgatgaagcaatcggaaaataaacgcatcattattttgctcgccggcctgatcgttttgttcttaagttgcattgtctatttaagctacttttatattttccaagccgaagaagtgaagcgtaatcctgccaatcgccgcggctacatcgaagaagcgcagattaagcgcggcgacatttacgatcgaaacggggaagtcttggccacctcgaagggcgcgcccggcaattaccgaagagaatacacctatcccacgttgtattcccatattatcggctattgccatccctcgctgggaaaaagcggtttggaatcgtcttataatgattaccttctgaatcgcaacggcaatcgcaccctcaaggccatatcggatatgattcgctcgaaaaaacaagacggcaattctttggtgctcaccatcgatacccaagtgcaatccaaagcccgcgagcttttggaggaaaataccgaaaagggaagcgtcgtggtcatgaatcccaagacaggggaagtttatgccatggtgtctctgcctgactttaattcctcgaccattgccgaagattggaatgcgttacagaagaatgaatccggcgcattgcttaatcgctccattaacgggcgttacccgccgggctccacatttaaagttattacggcggcctctcttttggggcaagatcgcatcggtttaaactacgaggacacggggtcccaagttgtcgacgggcgggaatttaaaaatgccgaaggggcacaatacggcagtgtcgatctcagggaagctttggcgaaatccattaatacctatttcgtggaaaaaggttctaaactcggtaaagaaaccctcggcggcacggcggacaagttctatttcaattcgaagattcccttcgatcttcccgtgtccgtatccgttttcgactataagaaaaatttgccgaaaacaaccttggccgcctcagccatcggccagggggatgtattggcgacacccctgcacatggccctggtggcctccgccgtggctaacgacggcaaaatgatgcagccgattttagtgaaagaagtggaagatgcgaagggctcggccattgaagagcataagccgaaagtacttgccgaatccacctcgtcggatattgcgaagacattgaccaaatacatggtctccgtcgttcaagacggtaccggcaggcgcgcttctttgcggtcaacgcaagttgcgggcaaaaccggttccgccgaaaatgcttcgggcgaaaaccacgcgtggtttatcggattcgcaccggccaaggatccgcaaatcgccgtggccgtcattttggaacaagcgggcaaatccgggggcagtgtggccgcccccattgcccgggacattatcgtctatgcattaaacaacatcgactttaatcaaggccgtgagctgccggagtccgacgatgattgatcgagaggtctgcgtcatgatcgctgccgccggcatgggaaagcgcatgaatataaaacaaaacaagcaatatttgcccattcacggcaagcccatggttcgccataccattgaaattttcgacggcatggaggaaatttcattcatcgtccttttgattcgagaaggggaagaatcgatgatgggagaaattctggcgtctatggatttaagtcacagtatttacctggtggtcggcggtgacgagcgccaggataccatttggaaaggccttcaatttctaaagaattgggacggcattatccttacccatgacggggccaggccctttgtcacaaaagaggaagtgcgtgccgtcattgaaggagcccgtgaaagcggggcctgttgtttgatgacgccgatgaaggacacggtgaagattagtgaagatggcctgtggagcggtgttacaccggatcgctcgaagcttttcgccattcaaacgccacaaggctttcaaaaagagattttggttcgcgcctataagcaggcatatgacgaaggctactacggaaccgacgattgctcccttgtggaaaagaccggtcgtaaagtaaaattaatacgcggttcctacaacaacattaaaatcacgacaccggaagatttaatctttgccgatgccatttattcagataggaagagcccatgagaatcggaatcggatacgacgtccatcaattagtcgaaggaagaaaacttattctcggcggtgtggaaataccctatggtcgcggccttttaggccacagcgatgccgacgtactcattcacgccatcgaagatgccatattgggcgccttggccctgggtgatatcgggaagctctttcccgacacggatcccgcctataaagacgcctccagtatgggaatgtttgaaaaagtcatggccatcgtgaaggaaaagggttatgctatcggcaacattgatgcgacagttattgctcaagcgccgaagctggcgccccatatactcgccatgcgggaaaatattgcttcggtttgcgaaaaagatctcggtgcaatttccataaaagcgacaaccagtgagaaaatggggtatgaaggaagaggagaaggcatgacagccatggcggttgtgctgttagaacctgcagaaaagaaaggacaataaaatgttagttacgggaaaacaaattttacaacatgcagacgaacacggctatgcagtgggcgcctttaacgtgaacaatatggaaatcattcaagccattgctcaagcggcagacgagctgcgtgcgccggttattttgcaagcgtctcaaggggcgatcaaatacgccggcgtagactacattacttcgctcgtaaaaaccacagccgaaaagctcgacgttcccatgaccttgcatttggatcacggtacggattttgatgaaatcatgaaatgcattcgcagcggcttcacctccgtcatgatcgatgcatcgaaacatgagctggaagaaaacattcgtcttaccaaagacattgtgcgaatcgctcactccgtcggcgtatccgtagaagctgaaatcggtaaaatcggcggtacggaagaccaaatcgtcgtctccgatgcagaagcgacctacacggatccggaagaagcacggattttcgtagaagaaacaggcgtagattctttggccattgccgtcggcacggcacacggcgtctacaagggcgaaccgaaggtagacatcgagcgaatcaaagaaattgatcgcatcgtaagcgttcccttggtccttcacggctccagcggcgtgccatacgacaccctggaaaaggccgtagcagcaggtatccgtaagatcaacatcgacacggacattcgcgccagctttgccggtgcggtaaaggcctttgtcacagaaaatcccgacgaaatcgacccgagaaagattttaaaaccggctcgttcggcaatgactgaaacggtgaaggaaaaaattaaagtcttcggcagcgacggcaaggcttggaagtaatgaagtttttcatcgatacggcgaatatttccgaaattaaggaaatcgaggcctgggggattttagacggcgtcaccacaaatccgtcgttaattgcaaaggaaaaagatgttgtctttgaagatgttgtgaaagagatcgcatccatcgtcgacggcccgattagcgccgaagtgacggtagagggcgccgaggacatgattgcggaaggcaagatgctcgccgccattcacgaaaacattgtcgtgaaagtgcccatgaacgaagaaggcttaaaggccattcgcgccctggaaggggaggggatttccacgaactgtaccttgattttttctgaaaatcaggcgcttttggccttggctgccggtgcttcattcatcagcccctttgtcggacgattggacgacatcggccacgagggcatggcgctggtgcgaaacatcgtttcgatcatcgatttttacggttacgaagcggaggttatcgccgccagcatacgcaatccgctccacgtaaaagaagcggcacaagccggggcccatattgccacggtcccctacaaggtgtttcatcaaatgcttaaacatccgctgacagacaagggaattgaacaattcaacaaagattttgaagggacgaagagagccaatggatagagatctcagtttaaacttagcacgggttacggaagcggcggctttaagtggtgcacgcttcttgggaaaaggcgataaaaacggcgcagacggtgcggcagtcgatgccatgcgccgcatgttcgatacggtgcacattaaaggcaaggttgttatcggcgaaggagaaatcgacgaagcacccatgctttatatcggtgaagaaatcggcatggggggtcgtagcgatgaagccgttgatattgccgtggatcccatagacggcacaacggccattgcaaacggcatgaacaacgccattgccgtcgttgccgtagcgccggagggttgcttattgcacgcgccggatgtctacatgaaaaaaatcgccgcaggccccaaggcaaaaggtgccattcgcctggatgataccgtggaaaataatattcgcagggtttccgaagccatcggaaaggcaccggaagagatgactgtctccgtactggatcgcccccgccacgacgaattaatcaaagaaattcgcgccaccggtgcccgcattaagaaaattaaagacggcgacatcgttacggcaatttatacttgctttgaagagagcggaattgatatgattatgggcataggcggcgcgccggaaggcgtcatcgcagcagcggccttaaaatgtttaggcggcgatcttcaaggaaagctcgttatgtacgacgatgcacaaaaagagcgtgtggcaaaaagcccggccgatcccgaaaagatctacaccatcgaagatctcgtcaagggcgacgatgtgatctttgccgcaaccggcgtatccaacggcgatttactgaaaggcgtgcgctacatgaaaggcaacaaggcgactacccaatccttggttctgcgcttgccctcgaagaccgttcgttttatcgacagcgtccacgacttaaatcacaagccggagtatgcgaagtaaattgacaaaaagaagaaagtatgctatcctataaaagttagtaatagagatgaatttttaaagaaaggagtgtggacagatgaaaaaaggtatccatcccgaatataaagaagctacagtcacttgtgcttgtggtaacacctttacgacgggctctgtaaaagaggatttaaaagtggaagtttgttccgaatgtcatcctttcttcacaggacgtcaaaagtttactgatacgggcggacgtattgataaattcaacaaaaagtacaaaagatcataagaagacggcccgtgaaagcgggcccttttttttaaggagtttctctgtctatgaatgaatcctttaagacgaccatcggcggtcaggccctgatcgaaggggtgatgatgcgcggtccttcgaaaacagcttatgccgtaagaaaacccgacggcgacattgccctacgcatcgataaaaataagcaaatcgccgatcaatacccctttttaaattggccgattattcgcggcgcagtcaagctaatcgaggccatggtcatcggcgtcgacgccattatgtattccgcctcattttgggaagaagcggaaggcgagaaagacagcttttttagcaagcacttcccggaacagggagaaaagatcgagcagatttttaccgtgagcttctctattctcttagccgttttatttttcatggtactacccaatgtattggccacgtattttgagcgccacattgcaagctccgtcttgctgaatctcgtggaaggcgtctttcgaatcgggattttcttcgcctacatggcgttgatctcgaaacaaaaagacatcggccgcgtctttgaataccacggcgcagaacacaaatccatcgcctgctatgaagccggggcgcctcttgaggtagaggaagtaagaaaatattctcgccttcacccgcgctgcggcacgagctttctctttatggttttgatcctttcggtgattattttatccttctttggatggccctcattcttaggtcgcatcctcgtgcgtctattggtctttccccttattgccggggtgagttacgaggtcaaccgtctggtgggaaaatatgacacgccgctcaccatggctctgcgctatcccggactgatgattcaaaagcattttaccgtgagagaacccgacgacagccaaatcgaagtgggcatcgcctctttaaaggcggttttgcctgccgaaggggaaagtgatctatggaagtaaaggcggcctttgaagaggcttgtggggccttaaacggcgatcggcgccgcgcctatgaggtctttgacggcctctttcaaatggatcgtaaagcccttttaatgaatcctgaaaaaaatctttccgaggcggacgtttcacgccttcgccatgttattgaaaaaatggccgggggcatgcccatggcctacgctttgaaaaaagcctatttttacggcgaggccttttatgtagacgagcgggtattaattcctcgctacgatacggaaagaagcgtggacgctattttgcgcctttcgacgaaagcgaagcgcattttggaaatcggcgcgggctccggttgtgtggcgattaccttagggcggcttattcccgaagcaataatcaatgcggcagatatttccggggacgcgttggacgtggcaaagataaataaaaaaatgcacggcgcctcgaatgtgcatttcattcactccgatcttttttcatcgatagaaggcacttacgatgtgatctattccaacccgccatacattaccgcagatgagatgaaggcattggatgatagtgtcgcccgttacgagccccacttggcccttgaaggcggcgaagacggattggatttttaccgcagaatcatcgaggcggcgccacgatttttaaacacagggggctatttggtgtttgaaatcggggcaaaacagagaaaagatgtggaagatttactccatggccatggtttttcggccatcgggtctgaaaaagatttcggcggcttggatcgcgtcgtttttgggaggttagacaatgtttgaaaatttatccgtatatgaagatcgctacaatgaattaaacgagatgatgatggatccgaaggttcaaagcgacagtaaactgctgcaaaaaacggccatcgaacacgcagagatcgaacccatcgtaaaaaaatacagagagtatgtggaaacgacggaggccattgccgataacaagtccatgttcgatgaaaagctcgacgacgacatgcgtgagcttgtcaaagaagagctgaagatggaggaagagcatctggcggaaatcacggaggaattaaaaattctcttgattcccaaagatgaaaacgacgacaaaaatgtcatcgtggaagtgcgcggcggtgccggcggcgacgaagcggcccttttcgccggcgtcctcgtgcgtcaatacattcactacgccgacaatcacaactggaagactgaaatcatgtccagtaatgaaaacggcatcggcggttacaaagaagcgattcttttgattcagggaaagggcgcattttctcgcttgaagtacgaatccggcgtccatcgggtgcaacgggtgcccgaaacggaatcttccggccgcattcatacttccacggccacggtcattgtcatgcccgaaatcgacgatgtggaagtagaaattgaccccaacgacgtgcgggtggatgtgttccgctcctcaggcaacggcggtcaatcggttaacactaccgactccgccgtccggttgacccacgagcccacgggaatcgtcgtcagctgtcaagatgaaaagagtcagttgaagaataaagacaaggcttttaagatcttaaaggcgaagctttacgatatcgaaatgcagaaacaagaagatgcattgagcaaagaaaagaagtcacaaattggatcaggcgatcgctccgaacgcattcgcacctataattatcctcaaggccgcgtcaccgatcaccgcatcaattacacgagccaccgcattgacgacattaataacggcgatctcgacgatttaattgacgctttgacggcggcggatcaagcggcaaaaattgaaaatgtcgactaatatgtctcagattacccccgaaagcttgttttattatcatttatcagatataatggagaagcaaagaaacaacatgatataaggaggcattattatgcacgcaatgacacaagacaacttaagaagcgccttcggtggcgaaagccaagcccacgtccgctacggcatttgggcaaaagctgccggaaaagaaggtttccccaatgttgaaagactcttcaactgcaccgctgaagctgaaagagttcatggcaatctgcactttaaagccatgaaagacatccacggcgacttcgcagtaaccagcatggcaggcttcggaatcggcaccacctccgaaaacctccaaaagggtatcgacggcgaaaccttcgaatttaccgaaatgtaccccgcatttatcgaagtagctaagatgcaaggggaagacgacgctgtaaaggctatgcgttttgctatcgaagctgaaaagattcacgccgttcgctacgaagaagcgaaaaaagcagttgacgccggcaaggacttagacgcaaaagacattcttctctgccccgtatgcggctacatcacctttgatgcaagcgaagaagaatgccccatctgccacaccaaatccaaagcatttgtcgcttactaagactaaaaaagacatcttcggatgtcttttttcaggttctatgtcaaccattggggagtctagtaaaaactaggctcctttttgttttcctacacaccctcactcacttatcttttgaacaaacaaaaagcagtttcgtgcggaaatgatgaaagttacgcattccaaaggccacgcgcttcaccgtcttgatcttgttgtgcgttccttccacgtagccgttactccacgggtaatcaaagctgttggtgatctcctcgaaccagttgttgtaggcacgtaagcagtggcgccactcctttagcccgcttttctttgcctcttccatcc

SEQ ID NO: 31 - DNA, 118354 bp, Peptoniphilus rachelemmaiella
  source 1..118354: mol_type = genomic DNA
cgctcgtttcgtagcgtgtgatggcttctaacttaaactctacactgtacgcacgattatttctagagcgcattaagccttcatcgccaaattgtttgtaattgttcacccagcgtctgatcaacgaggagctaatttggtattccttagccaggattctataacctgctttttcgtccaagtattcctcaacaatttttctcttcaattcataactatattttgccattaaaaggcccccaaaggttggatttcttggtccaacttttgggggtcagtgcattccacgggagcggcaatttttgtgtctattttcgagaactgatgtagttcggactttctcttgtaatggtaatgttgtgcgggtggttttcttgcaaggtagcgggggtgattttcatgtactccgtattgttcttgagctcgtgaatgtttttcgccccgacgtagcccataccggattttaagccgccgataagttggtaaatgacgtcgccgacttttcccttgtagggtacacgaccttccacaccttcgggaacgtatttcttcgtttccgattggaaatagcggtcgctggatccgctgctcatggcgcctaaggagcccatgccgcggtaggttttgaagcgacggccttcgacatagatttcttctccgggactttcatcggtaccggcaaacatggagcccatcataaccacgtcggcgccagccgcaatggctttggtcacatcgccggaatacttgatcccgccgtcgccgataatggggatgccttttttcttgcctgcttccgaacaatttaagatcgccgtcacttggggcacgccgataccggtgaccacgcgggtggtacaaatggaaccgggaccgataccgactttgacgcagtcggcgccggcttcgattaagtcgatagtgccttgataggtggccacgttcccggcaaccaattgaatgtcggggaaggcttttttaatttcgcgaatcgtggtcaagacgcctttcgattgtccgtgggccgtgtcgatgacgaacaagtccgtgcccgcggcgcgaagggcttccacccgttcgtagacgtcgtgggtaacgccgatggcggctccggcgaggaggcggccgcctgcatctctggcggaattcgggtattgaatggctttttcaatgtccttaatggtaatcaagcccatgagatgatggctgtcgtcgatgagaggcagtttttcgattttgtattgcttcatcaccttcagcgcgtcgtccatggaaatgccttgcttgcccgtgaccaaattatcgctggtcatgacgctggcgatttttttatttaaatcgtcttcgaagcgaatgtcgcgattggtgataatgccttctaaaacattattttcgtccacaatgggcacgccgctgatgcggtagtggctcattaattccatggcatctttgatttcatgatctttggataaagagaagggatcggtgatgacgccgtgttccgagcgtttaacgcggtccacttccttgacctgttcttccaagggcatgctcttgtgaataatgccgatgcccccttcgcgtgccatggcaatggccatttgcgattccgttaccgtgtccatgccggcactcattaagggaatgttcagctcaatggcgtgggtgatttttgtctttaattccacttcattgggcaacacttccgaaaaccccggcatgagcaaaatgtcgtcaaatgttaaaccgtctcctaaaaatttcatcaaagcctcctcactttcctctactatgatagacatttattttagcaaaagataagccgtcattcaagacgaggatgtgagacgcttcggcttgatgcgaataatctccagatccttcggccccttggcgattaccttgccttctcggtcgacggtcaattgaatgtccgacgctcgcagcacatcgactaaagaggcgtcgccgtaaatttccacgtcgattttcttcggtacattgaaatcgcttaaattcacgccttttagagacgtcatgtgctccgtggatacttccaaggtgcgccgcgccgattcttttttcatgtaacgcaaaataacggattcatcgggattgaccaaatggatcccttcgggcacgatgagacgcacgggcacggcgttggtgctcataagctccttcgcattcacggggcgcgtcgtaatgctctcgatgccgtcgatggcaccggaatccccggtgatggtgacggtggcaggcgtcagaatggctcggtcccgattaaactcgccgccctcatcctgttcatagtttacctcgatgggcacgctctttgccttggatatggcggcctgtacccccaccgtgttcggcgtcacttcaaggccttcgataacatgcttgttttgatccagcggcgttaattcgacagaagagaccaccgtttcttttgcgtcggtaataaggatgtggcccgccacggaatgcactttgtccaccgattttttcggcccttttaccgtgacttcatcttgattcacaataatcctgtccagaaccatgccgtcggccggattgcccttggccgtcaccgtgaccggttttttcatagagaccatttcgtccacagagatggtgatggcggaaggattggattttttaattttcagattctcgtcggaaaggcggaaatggatgggaagccgttgagagcccggttgcacttccccgagatccacataggctgaaatatcctcttcttttaatccgatgatggcgctgcgattgccggagaccacgatattggtggtgtaatcgtcactttttaagagctccatccccgcttcacgcatggtggattgatttctgagttccacttccacattggtgaaatccttggtgattaccggatcgatttccgtaattataaagaaccaaagtagaatagacaaaatcagggagaaaattttcttaatcgtgtcttgattattcgcaactaaatttaaatatttatcgcgcattacatttcctcctcgtcactcttcggaaaatagatggccctaagcatctgctctaaagtggacagatccaggtggcggttaatgtttccatattcggcgacggagatcgagcccgtttcctcgctgaccacgatggcaaaggcgtcgcttttttcactaattccaatggccgcacggtggcgcgtgcccaattccttggacaggcccttttcctctgttaagggaagaaaacaggcggcggagatgattttatccccgttaataatcacggcaccgtcgtggagcggcgtgttgggaatgaaaatattgattaacaggcccgaggacaggtcgccgtaaataggtgtccccgtttcgataatctcatttagcccggttttccgttcgatcaccattaatgcgccgattttctggcgagacaaagaggccacggcgccgataatttcattaatggtggattcatcccgcgttcccgacaggacaaaaccctttcgaatggagctgttgcggccaataaattcaagacctcgccggatttccggttgaaagacgatgaacaggcccaaaaatccccaggtcaacatgcttttcaacaggtagttaagcatataaatttgtaaaatttcgctgagcttcgtcagaatcaagaccacgacgatccctttgcttaattgctcggcgcgggtgcccttgattaatttgaagagccaatagataatcaccgccacgatggcgatgtcgatgacgtcttgaatccgcagcatcgataaggtttcacttatccattgcatggcgatccgcctttccaaataaatacgatgtagcactggctacaaataaaaataatcccatggcgatcaaaccgtcgccgagactcatgaccttcgccgaagagatggccgaagcgtaacagaagcggtcgcataaaaagcgaaggcgcgtcgcctcattggccaagccgtgggtcaagacccggccctctgtaattaaagtgagggcacggacatcgccgatctttaacagcgcctccgcctccacaggcatgacgccgtttaaagcaactacgacgccgtttagggcaagtcctacgccggatagaatataacctaaatggcgccccatcaggcagcctacagccatgataaaaagtgcgagggcatgaacggccgaaaagtgtgccgcaagaaaaggcactgaaggcgccgcctttagtgcaataataaagagtgcggcgccggtacctgcgacgattaaatttttaaagcgaggctcctgtaaaaaaaacttgtttttccacgccagaatgaggcccagccatacgcccaagataatcccttcagttgtcattcttcacctacaaaaaatgcgctctcctcagaaagcgcatttgttttattattcttcgtcttggggttcttccgcttcgacggtttcaagttgatcgaagttgatcaaatcgccgattgccatggagaagctttcctcttcaggttttgcttcgacttgcggttgttctctgcgacgaggtttttgctctttctttctttcgcgaggcgcttgttcgtcttcgccgcccggttgaagggccttcatggaaagagaaatcttcttgtcttcgaagttaatatcggtgacgcgaacgtcgatttcttgaccgatttctaagacatcagacggtttttcgacgtgttgtctggaaatttgagaaacgtggagcaagccgtctacaccggattccaggcgaacgaatgcgccgaagtccaagatgtttacgaccgtacccttgacgtcgtcgccgacttgtacagtttcaacgaaagtatcccagggtttttgggtggtttgttttaaaccgagggcgatgcggttcttttcttcgtcgatcttcagaaccaatacttttaccttttcgccggggcttacgacatcgctgggatgtttaacgcggttccaggaaagttcggagatgtgaatcaatccgtctacgccgccgacatcgacaaatgcgccgaagttggttaagcgttgaaccgtaccttcgatgaattcgccttcttgaagggtaccgtatacttctttgcgtttttcttcgatttccttggattcgatgtttttgcgagagaggacaaattttcttctgcccttatcgaaatcgatgatttcgcattctaaatcttcatcgacgtatttgcttaaatctctttggaaacgtacggaaacgtgagatgcgggaataaatccgtttaagccgtcgacatcacaggtcaagccgcctttgacgacattggtgacatgagccataaccgtttcgccgttttcaaatttttcttccatttcatcccaaaccttcatgttttccacgcgtttaaaggataaaacgacattaccgtctccatcgtccattttcataacgtaaacctgaatttgatctccttggttgaagatttcattcggttttacattggggtcgttggacaattcatctctggagatgataccgtctgcgcggtagccgatattaaccataacctcgtcgtcggttacgtataatacctcgccatcgacaatttcaccgcgacgtacacgcgtgaaagagttttcaatggcctccatcatttcattgttcatttcgtccctgttcatattatccattctactaacagcctccttgattaccgagtccggagtggatgctccggcggtaataccaattttattgaattttttaaatggacgtagatcgagttgatatatggtttgaatatgatagacatgttcgcaatgttctgacgcaatctttacgagtttcttcgtatttgcactattcttaccacctataacgagcatacaatccacatgagtagccaacatgcgacaggcatcctgacggtcgtttgtggctttacatatggtattataccttaaaatctctcccgtgaaaataccttttagcctttcttctacagaatcaaccaatttcttgggattcgtcgtctgggaaacaagggcaatttgatttttctcacttaagggcagtgcgtccacttcatcggcctcaccgacaatatatacatcgtcgccataagaagcgatgccctttacttccgggtggtctttgtcgccgacgatgaccacggggattcccttggcattgttttcctccaccatggtgtaaattctcgagacaaaggggcaggtggtgtccacgacgcgattgccctttgcgttcagttctttctttaaagcctttgtcgtgccgtggcttctcgtaatcaccgtggcattgctcggcaaatggccttcgtcgatgagctcgacgccctttgcccgcaagtcgtcgtttacttgtgcattatgcaccagctcgcccaatatcttgacgtcgtcgtaggcctgtgctgtctgaaaggcgctttctacggcccgcttcacgccgccgcaaaagccgtagcattcactcaaaagtatttccaaggtagtctctcccttcgtaaatcgtggccattaaagcgtgcatccgcttttggtacacctcttccgtgagcttttctttttcgaagggaatgggcgttcggaatatgtaacgccgcttgcgaaagagtttgtagtccccttcaatgtacaccggcaaaacttcagtgcccgtgcgggcggccaaaagaatggtgccgggcttgccttgatcgtagtccacggtctttacccgcgttccttccggaaaaatgccgataatttctttgtttttcaacgcgcgcatggcgatgatggtgcttttcgcatcgccgtggttccggtccacggaaatggcgccgacgccctgaaggatttgtttcagtatcggtatctcaaaaagctcccgcttcgccatccaacgcacttgcttgggaaacaagatcgataggaaaagaggatcccaattgctcttgtgattggccactaagaggtaggccttctcttccagcgcaggcatattcacaacctcgtagggatagaggatttttaacagccacccggtaatcgccttaatgacattatagaacatggtcgttctccacatagctcgccatggtatccaagacttcgtcttcactcatatcggtagaatctacgagtatggcatccgccgcctgttttaacggggccacttctcggtttttatcgcgctcatctcgggcgtggatgtcggctttgatcgtttccagatcgacggactcgccaaaggcctggcgctgttcgtagcgtctgcgcgcccgctcttcttctgatgctgtgaggaaaaattttacatctgccgcgggcaggaccacggtgccgatgtcgcggccttccataaccacgccgccgccttcagcgaggcgccgctgaagagacagaaggtaatcccgcaccgccggctctttcgaaagctgcgacgtcttctgggagatggcctccgtgcgaatgacatcgcccagtgccacgccgtttaataagacggcgccgtctttatagtcgatggactgatcgtccacccgcgataaaagttcctctgtcgtaaggtcttcgccttcgtttacggcgatgtaggcgatggtgcgatagagggcaccggtgtcgatgtattcgtagcccaagcgcttcgctaaagcgccggctatggcgcttttccccgcgccggaagggccgtcaatggcgatggttttcatttgattcctcctccccggaacacagtccggctaagtagccggttgaaaatgcgatctgtagattaaagcccccggtgggtccgtccacgtctaaaacttcgccgcaaaagtaaaggccttcggcttttttgctttccatggtcgacggatccacgtccttcacatccacgccgccggtggtaataatcccggtgttttcgttaaacaggctgtcgtagtggaggcggaaatttttcagcgtgtgaatcagttcgcggcgcatttcttgggacaattgatgggcaggcaaatcctgcggcacttgcgcctgatccaataccggtgcgattaaagacttgggcaaaagatgcttcatcaaattatgcatggcccgattggaattgtccttcacttcacgcaaaagccgcttatcaagcacctcttctgtaagtgcgggcttgaagtcaagggaaagatccactttatcggagcgattaattttcgaagagaggctcagaacgatgggcccgctgatgccgaagtgggtaaagagcatttcaccgaaatcggaaaagcgtccctctttcgtcgtcgccgtcagggccacgttttttaaggacaggccggacaatgcctctaagtagtcttcttttagctttaagcccacgagtcccgccacgggtctcaccacgcccatgccgaaagcttcggcaaaaccataaccgtccccggtggagccggtgaggcgataggtcatcccccctgtggcgacgatgactttgtctgtgcggaaagtgtctctatttgtccttacgacatagccgcccttctctctttcaatggattccgccgtcgtgtttaggcgaatggctacctttctcttctcaagctcccgttccaaggttttaatgatgtccgaggacttgtcgcttttcggaaagactcgatcgcctcgctccacctttagtggggtgcctcggctttcgaagaaatctttcagcatgacggcggtcaagctgtaataggacgagtacatgaagcttgcatttcgattcaatgcctcaaagaaaaagggatcgtcgcagtcgttacagagattgcaccgtcccttgcctgtaataaacagcttctttcccaatttctcatttttttcgattaaggtgacctctgccttctccgccgctttgatggcggccatcatgccggcgggtccgcctcctatgaccaatatcatctaacacctcgcaatgccgacccagtagggcgggcaatgattttgattgggaaaggtgattttcaccaccttgtacactttctgatccaatgcgccgatcatctcttcgatgccctcgctctccaccttgccttcctcgtggcccggatagatggcgagactcaagagggcgccgggtttcatggcggcgaggatttcatttaatgtgtgcatcgtggtaggccatgtggtggtgatttttttgtcaccgccgggcaaatagcccaggttcatgacaaaaacatccaccgcttgaagatccacgtagcgggatacattttcgtggctgtcgcgaatcagcgccacattctttacatgcttttcctttaaaaaggcctctgtcttctcgatggcggcctgttgtatgtccatggccaaaacgcgacttgcccgctcggcaagaaacaaggtatcttttccgttgcccgccgtgagatccacggccacatggtccttcgttaagaaattttccagcacggtgtgggaccaggccaccgccgatgtcgggattacttccatgacttcaacacccgaatttctttttcccgaagggggcggtattcccctttgcctaacatgccaagctttaatgggcccatttgaatccgctcaagctccaccacttccgcacccacggcttcaaacatgcggcgaatttggcgattgcgtccttcgtggatcacaacttccatacgggtctttgcgtttctatgttctaaaattttaaaatttgccggcgccgtcatgccgtcgttcagttcaatgcccgaggaaagtttgtgcgccgtttcttcatcgacgatgccctttaccgtcacgcgataggttttttccagctcgtatttcggatggagtaagcgctgagtcaattcgccgtcgtccgttaaaagcaagagccccgaggaatccatgtccaaccgacccacgggatacaggcgctggccttttcttaagggaaccagatcgaggacggtcttgcgccccttgttgtcgtctgcagtggagacgacgccgcgtggtttatttaataaaatatagtgattggtcttcggcaggcgaagaagctttccgtcgacggtgacccgaacatcttcctctactttcatgccctgttccgttacggtcacaccgtttattttaacgcggccggcatcgataatttcttcgcattttctgcggctggcaacaccggcatgagccatgtatttctgaagtctcatgattcctccatctctaccattgcttcttctttcggcaagtcttccaagccggacaggccgaattttcgtaaaaaggtctccgtggtgccgtaaactttcgggcgaccgggaatttccatgcggccgaggacggcgattaaatcgatgcgctcaaggcttttcagcacctgatcgcagcgcacgccccgaatctcttcaatttcggattttaataccggctgcttgtaggcgacgatggaaagggtctccagggcggcattggataagcttttcgtccgcgtttttttcgcgaaatcgctaatggcctcaaaaagctccggctttgtggagagctgatagctgtcgttgacacaaaccaggcgcaggcctcgctcctcgccggataaatccgcctttaattcaccgatggcagcctgaagctcaatggctgttacctgcaaggcttctgccatttctttttccgtaatgggttcgccccaggcaaataaaagggcttcaactttggctttcagttccatggatcattcctttttttatcagtacgatgtcttttccttcttgacggcagctgatcttttcaagcttcatcagctccaagagggtgagaaataccgtcacgatttcgattcggctctgtgcatcttccatcatttgaaaaaatcgcggcttctcccactttctgaaggcggcgtcaattttctccgcagcctgcttgaagctaaattccgcggcgggaattttctccaaggattgccgcgccgcttcgtgaatttcaaagcgcaccatgacgtcgcgaaaggctttcgccaaacgggatgcgtcgccttcggccaagagctcctcctcggaaaaatccgagaagtcttcctgctttttataaatggcgccgtcttcataggcggccatttcatccaacaataaactcgccgccttcatgcgcttgtattctaaaatccgctccacgaggctatcccgaggatcctcttcttcctcttcctcctccgtcacgggcttgggcaaaagcatgcggcttttaatggcgagaaggtagctggccatggcgagaaaatcaaccatggcatccaatactgggcccgtcatcccgtctaaataggcgagaaaatcttctacgaggacgtggatttgaatgtcgtaaatatccatctcccgctttttaatcaaatccaacagcacatccatgggcccggaaaaggagccgtaaacgaattcgtagctcatgagacaaggatcatggcgaggcccacgcagacttggatgaagccttcaaccaccggcccgatgatacgggggatcgcaccggtgaccacgccgagaaataaaatccaatagaagtatttttcatattggtagaaggcgaattccgtcttcggcggcaagagggacgccaacactttcgagccgtctaaaggcggcagaggcacgagattaaagacgccgagcatggcattgtaccaaagaaagtgcagaaagaaattgctgatgacaaattgatgtttcgacgtccacacgaagaaaaaggcgccgagaagggcaaagataaagttcaccgtcacccccgccaaagacacgaggatcgtgccggttttgcggtttttgtaataggccggattaatgggcacggctttcgcccagccgaagcgaaagacgatcataaatagaagtccgacaggatcgatgtgatccaggggatttaaacttaatcggccgtctcgcttcgccgtgtcgtcgcctagaaagtaggagacgtagccgtggccgatttcgtggccgacgatggcgatgatcagtgccggtatcgaccagatgtagttacttatgtccataataaacctcgtctattattaaaggctccacggaaaccgactcgtcggaaaaacgggcaatggataaaaagcgctccgccagctcttcgaagaggcggttctttccgccgtaaaaggtggccagcacctcgcccttcttcacgtagtccccgcgcttcttgtgcaggtacacgccggcggccatgtccagttcatcgtccattctcacgcgcccggcacctaaatctctggatataatgccgacttcgtgggcaggcaaatgacttaaatagccttcggtttcactgatcacgtcgtaggtcttttcagcttgcgggaaaagatcaaaatcgtcgatgacattctcgtcgccaccttgattttttataaatactctgagcttatccagggccttgccgctttggattaagtctttcaccttttgttcaattgccttttcgtcgccgccttcggccaggtgaatcagcttcgtggataaggtgatgcaaagggctgttaaatcctcgggaccttcgccctttaatgtggcgatggcttcttccacttccagtgcattgcctacggcgcgtcccaagggctcttccatggccgttaaaatggccagggtctttctgccgaaggtctcgccgatgtgcaccatggtttccgccaattcccgagccgattctttattcttcataaaggcgccgtcgcctacctttacatcaaggagcaagcaatcgccgtgaatggcgagcttcttgctcataatgctcgatgcgatgaggggaatggaatccaccgtggccgtggcgtctctcaaggcgtaaagctttttgtccgccggcgtaatattggccgtctgtcctgcaatggccataccgatggcattggtagaggagacgatttcatccatacttaaatccacccgaaggccgggaatggattccagcttatccaaagtgccgccggtgtggcccaggccgcggccgctcattttgccgaagggcaaaccgtaggcagagagaatgggcccgataataagggtggtcgtatcgcctacgccgccggtggagtgcttgtccaccaccgtgcccttaatggaggaaaggtccacggtttcgccggagtcgatgatggtgcgggttaaatgggcgatttcatccccttccatgccggaaaagtaaatggccattaagagggcactcatttggtaatctttaacggcgccggaaaggtagccggcaatggtggtttcgatttcttctttcgacagaatttcgccgtgttttttcttttcgatgacttctaatacgctcatgttaaatcgcctcgatggttttcgtgaccaatgctttaaaatcgtcggcgacgcgggcggaaatctcgatcacttcctcgtgttccaaaggttgatccaaaatgcccgccgccatattggtaatgcaggaaatgccgatgaccttcacgcctcggtgattggcaataatcacttcaggcactgtgctcatgcccacggcatcggcgcctaaaatgcgggccatgcgcacttccgccggcgtttcgtaactggggccggtcatgtacatatacacgccgctttgatgcttgatctttaattcttcggctacggatttcaccagggccgcaagcttcggttcgtaggcataagacatatccgggaaacgctcgcccttgccgtcgttggggccgattaagggattcttcccgttgaaattaatatgatcggtgataatcattaagtcgccgggttcgaaggattcatttaccccgccggcggcgttggttacgatcaaggtttgaatgcccatttcgcagagaatcttcgccgggaagaccacatcagccatatccacgccttcgtagaaatggatgcggcctttcatggcgacgatgttttttcccgccaaggtgccgaaaatcagctcgccgctatggccctcaaccgtggattgtttaaatccgggaatgtctttgtagggaatggccacggcatcttcgatggattcggcgaagtcacctaagccgcttcctaaaataatgccgatctccggccgcaagtcggtttgttttcttaagtattcaatggttttgttcattagcatctctcatttcttttacggcatagaggccgatcatggttttcgcgtcaataatttcgcctaatttaatcatgtgcaaggcttcgtccaggtccatatagaccacttccaagtcttccgtgtcgtctaagtgcatttcaccgggcgtgggattttcacaatagaaaatatggattttttcgttggtaaagcccggggatgtgtaagcttccaagagaaactcggcagattctgccacaagccccgtttcctcggccagttcgcgaatggcggccttcatggggttttcgttgtgttcgatgagtccggcgggaagttccaggagactttttttcgtggcgatacggtattgcttcacaaagggaattttgccgtcttcacagagagccaccatgcagcaaccgccggcgtgctctaccacttcccgcttgccgtaacgttggccgtccagctccacggtatgacaacttaaggagacgatctttccttcataaattttttcgctgcgtataatgcgctcttcagaaatcataaaacctcctaaattcggtttcgtaacatttcgcgtgccgtttctctcgtcttttccgtgtcttcgccgctaatcatagtggccagcatggcgatgcgttcctcgtcgcttaatttttgaacgaaggagacggtgcgacctgcctccaaccgcttttgaatgcggtattggcgatcggcccgcgccaccacctgaggcagatggctcacgacgatgagttgccggtcttgggagaggcgtttcattttctctgccaccacttttgccgtcttgccactcatgcctgtgtccacttcgtcgagaatgagaatttcccgctcatccaaatcggagaatatgctgataaacgctagaaagatgcggctgatctcgccgcccgatgcgatgtccgccatggggaggagatcttcgcctctgtttgtggcgacgagaaagcgcacgctgtccatgccttctgccgccagggcactttcggaaaattccacctgaaaggccgcgccctgaatgtccaactcttccatttcacgggccatgcgcccttcaagtacttgcgacgcatccatccgccgctttctcatgcgaagggcgagggatgtggccgcttccctcttctcctcacaggcctgcttcatggattccacgacgtgctcgtaatcgccgatgaaggccagccgctccttactttgttctaaaaaagcctgaatcttttcgtagctgtcgccgtatttcctcttcatggaatgaatggcgtccagccgatccgtaacttcctgcaaacgctcgggatcgtcgtcgaaattctcgcccttgtcccgaatgctttgagccagatcctgaaagccgtagcgaatgtcttcaaaggattcgaagagatcggcgaagtgattgtcgttattcgccaccttctccagtgctgtgccgtagcgatccaaaagcgagcgaatgcccccttcttcataagccagctgattcatttcctgaagaagttccaaggtttccgtgtggctgtttctcgcgcgaaattcttcggccaaggcctcgtcttccccttcttgaagggccagggtttcgatctcatcgatttgataccgcaagagatccccttctctggccaaggcctcgggatctttcacctcgcttttcaggcgatttgtcagttggcggtattcgccgtaaatggtctttagctcggcgagatcctttttttgttcttcgccgcagaagcgatccaatagctccagctgaaaatccggcttcatgagaaagctgttttcgccttgcacttccgacagagcgagaatggagccgaaatcttttaaaaccccgttggtcacgatttttccgttgatctccgacaaggacggccgttcccgttcgatgcttcgctccacaataatcacatcttcaaagggaatgttgtgctctttgagaaagtccagagcctttttattcttcgtgataaaaacgccctgaatcgacgcccgctccgcgccttttcgaatcatatttttttgagcccgcccgccgagaatcaatccgatggcatccataataatggattttcctgcgccggtctccccggtcaatacggaaaagccgtcgtgaaattccatggacgagtgatcgataatggcgaagtcatcgatttgaaggcgtaaaaacatattagcgaaactcctccccggacgcccgcactacctcgtcgatgtcgatgggtttcgatgcggcgccgtccttcgtcataagcattaaaaattccgtgttccccgtcgcgccctgaatcggcgagaaagtaagtacctcgggatacatacccaagtcttgaacgagatcatgtattttatttaaaacctctcggtggacttcggggtcggagacgatgccacctttgcctaccttgtttttgcccgcttcaaattggggcttgattaacgcggcgatcttccctgtgtcggacaaatagctcacggccttgggaagcaccaattcaagggagataaaggacacgtcgatggaaataaaatccattgcatcgtccagatcctccgcatccaaatagcgcacattggtccgctccatgaccacgacccggggatccacccgcaaagaataggccagttgattgtatcccacatccacggcgtagacctttctcgcgccgtgggccagcatgcaatcggtaaagccgccggtggaggagccgatgtccatgcacactttgtccgttaaatcgatcccgcagttttcgatgattttttccagcttaaatcccccgcgggaaacgtattttaaactatggcccttgacgctgatttccgcttctacatcgatcatttgaccggccttggcgatgcgctccgtgccgataaaggcttctccggccataatcatggtcttggctttttctctggacggcgctaaattcttcttcactaaaaggacatctgcacgctctttcacgccatcacctgtctcgttttaaaatcttatcgatcagcgcttccgtttctttgaattgtccgacagaggcgagaaggcttaaacattcttccgtgtattcacgggccttcaacaggtagtcgtcgggattcacttccgcgccgtcttcttccaaatcgaagtagtcgtcttggaattgatagctcaggcccaaggtttcgccgacgcggtacaaggtgtcgttaacctctttggattttcccgccaaggcaccggccatggcgaagcaggcgcccaacaaagcaccggtttttcgcttgtagatcacttcgtcgcctgaggatgcaccggcgcgaatgtcaagcacctgaccgtccaccatgcccgtggtacctgcggctttaaataagtatttcatggcgtcgatgccgccttcgggatccaaagacgccccttccgcggcaagctctgccgcctgcgacaaaagcccgtcgccggcgagaatggccaaagcttcgccgtaggccttgtggcaggagggctttccccgccggaaatcgtcgtcgtccatggcgggcaaatcgtcgtgaatcaagctgtaggtgtggatggattccatggcggcggcaaagtaaaaggccgcgtcgccttcgtagccgaaatcctttaatacggtgtaaaacagcgtgggacgcacccgcttgcctcccgtaaacagggagtagatcatggcttcttttagttcgtcggccgccgagggaatggcctcgtaatatgcctttaaacgcgcatcaaagttcattgtcgccctcctcttccatgccttcagtgagcacacgcaccttttgttccaagccctttaagtctttttccagttcccggtaaagagatgtggccacttcgtagagctttaccatctcttccagagaaaggtcttcattttccatgcgctccacgattttttccagctgttccgacttttctttataattcatgaccgttcctttctatggaaagcacccgagctgcaatggatccgtctaaaagatccacctttaacacatcccccacgtcgacctcagttgccgatcgtatgtagcgattctgaacgcgcacccgcggctttacccgctccttgcccatggtcttcatgcgattatccagctccgccaaatcacgccgggcattttttaccgccaatgcggattgtcgcaccatacgctgtttcattagcgcgagactttctgcatcccgcgccgcccgtgccggtagattcacggcctttatgcgtatgccgtagcgatttagggattgtacgtggcgattcacggcctctttcatgcgaaagtccatccgttcttttacggccttttgagccagacgcttatttaaaatggcctccatggacacggtttgatgcaggcgatggcccagcacgtcgtttcgccgtctcgcctcgtgtagggatagggcaatggcgtgttccatcacctgaaggcggccccttgaggtggataaaatctcttccctcgggctgacgataatctccgcaccgtgggtcggcgtcgccgcacgcacatcggccacgtaatcgcaaagggtggtgtccacctcgtggcccacggcggaaacaaccggatgacgcctttcggccaaggtacgaatcaaggtttcgtcgttaaagcaaaacaaatcctccatgctgccgccgccgcgggtaatgaggatcacgtccacatcatcccgtgcatccagccgcttaaaagcacgagcgatggaggcgccggcgccttcgccctgtacgagggtaggcgagacgatgacggagacggcggggtttctgttggccgccacttgcagaaaatcgtgaagggccgccccggccgtactggtaaccacgcctacggtcttgggcatctcgggcaaagccacctttttgtccatatcaaatagaccttctttgcttagaaggtcttttaattttagaaaaagtttgtaaagggcgccttccccggtgagttccatggttttcgccacaaattgcagccgcccggagggggcgtaaatggccacggagccgttcatttccacttccatgcccacttgaaaatccatgtccgacgcttcggcgtcgtctctgtacatgatgcagtccatgcgggccttgtcgtctttgatcgtgaaatacatgtggccgctggacgctgttttgatttcggaaagctcccctttaatcaagacgtggttcaacatgtaatccgtcttgagcacttttttcgtataggcgagaagctccgatacactaattggattcatggccgccttctcgaacaatgtgacccagcacgccgttaataaagcgggcgctgtcggatgtgctgtacattttcgccaaatcaacggcttcgttaatggaaaccggcggcgcaatgtcttcgtgatacataatttccgccacagccacacgcaaaatcgacagatctacagtggaaatgcgacgaatggatccgtcatttaagtgatcgtcaatgattttgtcgatggcctctttgttgttaacaatgatttcgacgctttggataatgtaggccttttcatcgggggaaaatggaccatccgatgcggattctaaacgaaaagccgctttcttctcggtaaagacgtggcgatacatctcctctacttcgtgttcgtcccagacgctttcgaaaaaagattccgccacatccatggcaaattcgcctctgtgctccatggcaaaaagaatttgcatggtgccgattctggacagttttctgctcaacttattgcttaacaaaattcttaccctttacacggattctttttcttgggcgcgtacgccgttgacgtgaacattaaccgccgtaatatctaaatccgtcatattttcaagactgacctttacggcatcttgtacttcttccgccactgcaacgatgttgcgtccgtattctacgacgatggaaatatccaccacgcttttttcttcgtcggcggtgactttagtcttcccttggccccgtccgggcaagaaatcgccgatttctctctttgtggtgtagctattataaacgccttcgacgcgcgtggccgcttcttgagcgatgcgcgtaatgacgtcgtcggcaatttttacattggaattccccgaagggtcaacaaaatatttttcaaccatttctgcctcctattttaacctattataccataaaccgcaggccgacaaacacaggcctcctacctccgaagtcctctatttgtttaggattttcgttaaaaaactcattcgatggcccgccgacggcccgagggcgagtatggcttctcgatgctgtttcgtgccgtagcccttgtgttttttaatgccgtagccggggtatttttcatcccactgaatacagagcctgtctcggtattctttggccaaaatagaggcgcaggcaatggcgtaagacaaatcgtcgccgtggatgatcgccccttgatgacaatccaggtcgatggtttccgcatcgattaagaacaagatcttcttgtccgggaaatgggtcaatgtcgcctccgccgccctcttcatggcccgtcgggtggcctgtttaatgttgatggcatcgatgacttctgcactttcattggcgtaggtgtaaaaaagcgcctgctcttttatggtcccttccaaaaggccccgttttttgggcgaaagcttttttgaatccgtcacaccttcgatggactcattcaaaggcatgacgacgcaagccgccaccacgtcgccgaagaggcaaccgcggcccacttcatcgatgcccgcgatgtaatcgtagccttcgttcagccgctgtagatcaaaattcagatcggtcatcaacacgctccaagctaatcgcgccccaattgccggcgcgaaactcgtctaagattaagtgagacacttttgtgtagtcgatttcgccgccgcgaattaagcagcctcgccgcttgccaatggcatccataaccgccacgggatcatcgtaggtttctttaaggtcgtagcgggccatcatgggggcttcgaactttttcatggcttctttcaccagctcaaaggccagggtctccacgtccatgatctcgtctttaatggagcccgtgtaagccaaatggcggccgcgaatgggcggatccaacttgggccacagaacccccggcgtgtccaagagatcgaaggctttgtggtggcgaatccactgattggtcttggtaatgcccggccgattgccgatggcggcggatttttttcccgccagttgattaataaaggtggacttgcccacattgggaatccccgccaccataacgcgcagctttcgcttttccatgcctttattcgcttctctttcccgcaaatcagtgacggcattttctaacgcttctgtcagccgcttttcattgagcttcgatgtggcagaccaggcaatggccgaggtgcgcgtctgtccgttaaaataatcgatccagcgctgtgtttccttcggatccgccaaatccgatttatttaagagcatgagcacgggaatggaggtgagcacctcgtcgagaagcggattgtagctgcttacgggaatgcgggcatctaataaaaccaccgccacatcgcactgggccttcatgtttcttaaagactcgatggtctttttcatgtgccccgggtaccaattaatgttcattgtccacctcttttctcacaataccgtcgacacagcgaaaggcgccgtaattttcaggcttctcttcgcaaatgatatccgccactttttttacatcctccggtgccgaagccatggcgatgccgatcccaccatgggtaatcatggcaccgtcgtttcgatcgtcaccgacgacgaccatctcttccggggcgatgtttttcattttgccgtaggtgctcagcccccgccacttgtcgcttcccttgccgatgatttcaaaaagagagagcttcgggtctctgcttttcagcaaatgggccgtgagacccccttctttaatcaccggctcctgaattaaaccttcgaagacatcggcggtggtatagccggcgacggcgagaacatcttcttttaagacatcgtcgatggtcatttctctatacatgttttcgtaaaaaacaatgtaggaggcttctcgctccgtttgttcgtggagggtgaccaaatcgtagcctttgtcgtaactgtccacgtgaaaaatcggatgcagccccctggcttcgatggccgccgttaggggacggatggccgccttgtcgaaaacaaagcggtctagggtctcttccgaatttttatagcgaatcaaattgccgttgttgctgatgacgaccatttcatccttgtacggggaaagctctcttttaagcgaacgaaagggacggccgctagccaccacggtttcgatgcccatgtccttccatcgttgcacgtattggatcatagtttcatcgaaaggttgttttcttgcggcaatggtgccgtcgaaatctaatgcaattaatcgaatcataatccctccgaataaaagagcgactcatagagccgctcgtctttgtttaaaattttagttcttttcccttgtagataatacagcccagtccccagaagaccagtccgagcacgatgttgatcaccatgccgatccattggaaatcgccgcttccagccatgctcagcggattcaacgccgtgaaggggaagaaatccgcaatggcttgtgttgcacttcccatcaattgcaacgcagcccaaaccagggcgatggcaataaataagagaaggcttcctccttccgcgtgagaagcacgggaagaaatcgacgagtagaaaaagccgatgcaaagaaattcaaagcccagcaacagcaggcaaatgaatacctgtaaaagcaccaaggccagattgcgaatatcgtgaaccccgaagacatagagagaagcaaacgccacgaccaagacgaaaatcaagacgaggccgtaatgcaacatattggcggaaaatttgccgctgtaaatctccgtacgggtaatggggttggcatagagatactcaatggtacctgcgctttgctcacgagacaagctctttgcccctaattgaatggcaaaaatagcaaatagaacgcccaaatattggaaaataaagggaacgtagtctgtaaattgatcgaaggaaatttcgcgaccaaagcccaaaatcggctgcatgttttcggaaaaaccgtcgcggaaaccattggccaaagatagaagattgtcgtcttgcaaaagcgggaaaaaggccattaacaagccggttaaaattccgacaaccaagaaccaagcaaaggccttgcctcgattatttttcatttcgagattaaaaaccatcacgcatccccctttttcggtttaaaggaatatttttcctcgagtacatcgtcggtatccaccggttcgatggactgggtcttgcggctgtccaaaatcatcaaatcgtcgtcataggccaccttttcttcggcaggcgcatccgacacttcaggtttatcgacaccttcaggcacttcagccgaaggcgtctcatcctttaccggcggctcacttaaaaccaccgtgtccgcttcttttgcttgcggttgttcgcttgattcggcctcaaaggccttgtcgtcggaaaccacaatggtgtcatcggacagagcttccgccggtttcgccggacgcttattcacgacgccggatttaaagatttccaccttgttttccaagaccgcatcttccaagacgtaatttttcactttttgttgatgcaataccgtggtcagggtaggcaaatacccgtcgtagaaaaattccacgtcgccggattcatcttttaacagcgtcgcgccgatttcttcaaaggcaccgacactgatcagttcatcgaaaatacgaagcaccttgtcgttgttctttttatccttcaaatactcaatgccggtcaaacggccgccggataaataagccccccggtcgccgtaacgttgaccgatggataaatcgtctgtcaaaagcaatgcggaaaggccttccgaactttggagccgcttaatgtgagtaaaaagcttatccaacatggctcgagacaaagccttggacggattgtccaaaatcaataatttcggctttgctatgagggcattaataattgccacgcgcttgcgttcggaatccgttaaatcggaaaacttatgccgattatccagttcaaaatattccattaaagattgaatgtcgtccgtattctttaatccatgaaatcccaaggtatgattaaaaatagccatgggttttaaattatcgtaaatccaaacatcttcgggaacataaccggtaaactccttcacggatttagactccttttggccgtccatatcgaaaatgcggatcgtccccttattcggttttaagaaatggaacaaaattcgggccaaggttgtcttgccgctaccttccgttcccataatcgaaaaaatctcaccgtcgaatacttccaaattaaaatcattgaaaactaaattccgacgaaatttttttgtcaattcatttactactatcgcactcatgtgtcacctcgctttactttcatattatacatgaatgcctcgtaaaatgtaatcctatcccataaaagaggggcaaaaactatgatataatgggctggattagtatgagggggaagtatttatgaaattaggaattatcggcttgcccaatgtaggcaagtccacattatttaacgccattactcaagccggtgccgaagcggccaattatcccttcgccaccatcgagcccaatgtaggcatggtagaggtaaaagaccgtcgcctggacacgctgagcgatatgagccattcaaaacaaatcatctacgccaccatcgagtttgccgacatcgccggcttggtgaaaggtgccagcaaaggcgaaggcctgggcaatcaattcttgtcacatatccgcgaagtagacgccctggtgcacgtggtgcgctgtttcgacgacggcaacatcattcacgtggaaggcagcgtcgatcccgtgcgggacatcgacaccattaatctcgagctgatcttctccgacttggaacttttggaaaaacgtctggaacgggtgaaaaaacaaatgaagggcgacaaaagtctgcaagcggagcacgatttaatcgtaaaaatcatcgccgctttggaagcggaaaatccggcccgctctttagactacacggaagaagacaggaagcttttatcctccttcagtcttttaaccatgaagcccgtgatttatgcggccaatgtcagtgaagacgatattatttcaggaaacgcctatgtggatcaagtgcgagcctttgccgataaaaggggcgacgaaaccattattatctccgccgccatcgaggaagaaatttccggcttagacgacgaaagcaagggcgaatttctcgaagccatgggcctcgccgactcgggtctggaccgcttagtaaaagcatcctattccctcctcggcttaatcagctacattaccacaggggaaatggaaacacgggcctggacgattaaaaaaggcaccaaggcgccggaagctgcaggaaaaattcacaccgacatcgagcgcggattcattaaagccgacaccatcgcatacaaaaaacttgttgaagccggctccatcgcgcaggcgagagaaaaaggctgggtacgaagcgaaggaaaagactatgtcatggaagacggcgatgtcgtcaatttcaagttcaatgtgtaaattttttagaatggcttagttgctgcaatgcgcactactaagccattctttttatccgttctattctaaatagtccatcttttccacctattcctaattaaatggcgcatgaatggcgtacaaatggcgcacacgaaatagatttaacgtctttttatcttgagcatctaaataaaaaaggcttctaaggatccgctccctagacgccttttatcactcctcatattcaattctttctcccatccgcgttccactctcatataaaccaacagcagaaagaccaatcacaattcctgtaatcgcattctccgcggatagtcctgctaaagctaattgcataatcattcctattataacagcaagggtcggacaatacttgcttggaattcctgcaattttaaaggcctgtgtcaatccgactactgccgacgtcagaacaattgcatgttgcatttttgcctcctttttgatcatagcgatagagcattgttaccatttcttcgcgtgtcatttcagcaccagggcgagcgccgtctgtgattcctttttctttcccccactcccaggcgtctttagcccaatcggaaattttgttaacatccataattactcctttatcatatctttgcaaaccaagtcgttcgattaaagtgattaacttttgagcataattaagatctgttgcatacccacactcttgaagtgctttgcattgatccttataatttttagcatttagcacccgagtataattcaaccttctccaatcagtggaaacaaaaaaattgtcgtggtcaataatactatccttaatagtaggatattttctaaatgcggcattgatatgatatttttctcccgacggtttttgctcccatgtggatttcgtataggtttctccgtgccaatctaaagaatttttaatcccaaatagattgtttgcattttttgcaagatcgcttcttccccaatcactttctaaaattgcttgagcaatggccacagatggcaaaagtcttaatttcgtgccttttaaattctctaacactatttccgtaaagtctttgtctggagaattcgtcggtgacggagcgctttttttaattccataataatttgctagaactttggcggtagcttctgcacatgccctaaggttcgttacaaattttcgagcgtcctcgtggttgtcgtggaaagcatgttcaataataatatttttctttgctagaccgtgcctgagaatcccgtagtaattcgagccgttgcggtttctcctatatttcgtgccgcgattgtttgttccaatcgcggtggcaatggcgctgcacaattgatcacataaagatttacaagattcttttggatttgtgctgtcataaatttccacgcccgttgctcttccgtttgctgcgttagagtgaacagaaatcaaaaggtcaaaccccttggcttttgcacctcgtgcttttaaggacggatcagggccgatcgttgattttgtcatttcaacataaaagccgacacgttccagtgccggctttaaaaaatctcttgaataaataaagttattgtccccttcattgcaataggaccaaccaacgacaggaacaaaaccgcgattataggcgcgccctcccccatgacctggatcaagcattatctttgtcattctcaccctccttaatatgatgttttaattttagagattcgatttcgtctaaacttacctcgttgatttctgattgtattcttctaaaaaattgagcaaaccactttggaagcggcatccccatgtccgaataattttcaacgatggacacgccataagtggctcccatagaataaataaggaatttagctaaccaaccaaaacccagcagccacaaataggggcaggttaaaaagatcagtagtatgaccgccagatgctttgcaatgccggcggcgcccactttactgtctaagtctttgttcacaattgctttcgcccatccgctaactacatcaagaatcaccaagattgtaaatagatggtatagatttatctttgtaattcttgaataagcggcaattaccatgtccggtgttacttccataattcaccacctttctaactttttgtaacaaatgcgaagttcaatgataacctctcatttacacttttttggccgatatatttaatctcactatcgataacttttaaatagaacggaatgggatcatcacttggatacgccgccacagtcatttcttccttagcggcataaggcatagctgaaacgagttgaccgtttgaataacttccttgcacgtaacctgtcacagttacaagattgtcaatttttgtgaaggttagattgtcaatcgtagctactttgggtaattttgacttaatgttattaatgtcaaaccctgaagccactttataccaatataattcgtcgttactagtcgaagcgcacatgtaaataaaagggtaatgtgcagggggaatatattccacaccaacaaaaagacttcctgttatttgaggcaaaaggtacagtgaattgacaaatacgcttgttgctagagtcttaccgtcactgataatgtctatattattaacattataaaagccgggcttcaggttctttaatgtgctatattttaaatctgaaatctctccttttgttttaaatcgcgatacgtccttgatcgctgatttatcagcttttctttcgttcagttttgtagtacgcaaaaacaattcattcagagcaccactaagaagtattccttgtagttcgctatcttggattggttctctatcttgaattgaaatttttggaacgatcttatctggatctataaatccacctggtgcaatttgacttaatctaccccacaaaaaaactccttgctgtgcgctaaatggaatgttgctaagttcttcctcatttccattgtatgttagacggtcaaaaacatcgctctttttaacatacccacttaaatcttgaatagtatcggtatacttaggatctgctggaatagcgtctactttagctttagcttcggttgtataatcattcgttgacagttgttttccattttctttactgactttattctcgtctaaagatttaatgttctcttgaaccgcatctaaatccgcctcagtaaaatttcttgcaataggtgtattcacatcccaagttttagcttctccttgatagccgcgagtgcatccgaccagaatgtcattattcacagaactatacaatatagtttcagcactcttgtctgttcctattaccgcaagattcggtcctttaggaaatgctaatccatcttttacgtaaatatcagtatctgcagaattaatcgctttcgacaattttgtttgtggagaattaaccatgcccttatacatttctttcatactgtgtaatcacctctactttgtacgaatccttggaaaaataagtcaattgttacataagctaaatcgctcggcacaatttcgatagaatgccacgatcctctggaaataacattcttgttatttagcaagtacgtcgtcagatcgatttctcccgacgtgtcataaattgtatctttcactttgccatttactttcactgtaaaatatcgcacgtttccgtggcttcgaaaaataccaaattcaatgtcatgggtatgatctcttacttcgaagcgatgagtgtgggatggaatatttatgcggaaatcatgcgtgtgattttttaacgttataaaatgtgtgtggttaccggactgaagaaatttttctctataccacggatttccgtcgcgattataaagctgaatccatccagacggaatcccgtgattgtgaccgccaatggtgccgtaaataagttgatcaatatctgaagtggctgtttgatagccgccgccttctgtggaagaaccattgtaataaccaccacctgattctgtggaatcggtggatccgccgccgcctttgatcgctttagaataagctcggaatgaatcaatctttactttggcaatcaccttatttataacgcgcatttcctgcggtacataaaaattcaactccgctccataacggtcatcggcgtttacttgaatggactgtgcgtaaagttgtgtggctccttgcgcataagtcatttcaattcgctgcctgtcggctaaatctgcgactgtaccagcaattgacgtggaatcattagcgatggtgactttgctggtcataatatcggaataattgtattggatgccgataatggtgtctctgtatttatcactgacgacaacagtatcaccaagagtaaaatcatcatctttaaataaagcgaaatcaacttcaaattccataatcggctcttttaaccgatccagcataacttgcgcagcatctttcaaactatctactttttcataacggcgatcaacccacactcgctcttgcagaccatacttatcaatatatttttgttcagcctgtaaataagggatcccattattaattgatttaattgtcagttgattcacgccctcaccataaccgagcggatagattcgcgtgcaaatatctctcggattcgacgtggcttttaggctgatctgatttttcttcgggcgaatgtgcagctttgcttcgtccttcgtcagcttcttcagactcaatttccacgggtattgatccgtattaaatttccaaatatattccgcttccagcggttttggaatactaaaaagagccccagccaagttttcattttcccagcaatattcaaattgcctggaaaaatcacactcgtccagaacccaattttttactttttgtttattcagaacatattgaataacgtttttagtatagatgcctaaattcccatatacaacagtgccgaagatcacgtgatccaatagcgttgcgataacgtgctccgcctcgtactcataagaattttcatcttcagtcacctttaatatgcggtacaacccgtgaggtgtttttacatagttgaacatttttaaatgctcattcttaagatcattttttggcatggaaaaattgacaaaattaattgaattgatttttaattcttcagtaataccaaaggcattttccaaataggcgattttctttcgattagcatcttgtacttccaatagcatcataagaatcgctccttataaatcaaccgacccttaacaggcatgccgccgttggaatagacgctgatttttttggtgccgcgcccgatttcgatccattcgttgctgtcataactatccagaatatttttcccgtcatgataaaccgtataattttcagagttcacagtcacacgttggccattggaagttctttggtaaacaggaataatcgtcacatctaagaaggcgctctgcgtatttattccaaggttttcccttagttccatcatgaccatgtcgataaatttatctagtatgacggccgaatcaaaggtttcaataaaatcattaccaattgcaatgtcttctgagatatgcgtattgcaatatatttcttcttcgaatggatcgtcaatcataatgtcttcggaagatcgacctttcacgttcaacttttcatccagctgaaattgcatgatgcatgtcgaagtcacgatgccacttgacgtgatttcttcgccaaagctaaattcgacgagtgtgccgccagacagcaaagcgcccatgcccacttgattcgtccccgtcatggacagtgaaatatctgcataagaattgacacttagttccacagtcgccgaacaatgcatcgtaattatcggctcttgcgtatcaactcctgaaatattaaatggggttaagttgtacttcatgattagttaatagcgaattttaatgcgccgatatttgcgatgggcatatagccttttttgagttccttggctgcaccgcgatcgtaaatccaaatcgcttcacctaattttaaactgtccattacaacagtatgatcccacgttccccaatctgttgtgggtcgattaaagttcagcttgttggcatttttaatgaccgactgccctgtttcgttttcttcgggggctgaaaactcaatcgggactcgggcataattgtcgccgattagctcgcttccgcctttatcgggggaattattaaataatgccaaatgaggcgataccccgttcatgcttctaccgttgaaaatattcaaaagcttcttcttgtacgccgtcgataaattgcctgtggaatagatcttaatttcttcgggcataaacacaggcgcctcttgtgccctgatttccagatcttctgttagcttcccataggccagcatatttccacccaatttcgaatcgctgatccctatataggtgactgtgcccgccggcgactccgtttgcgggaagttgatttgttcttcattggaaatactaatgacgccatctttttctgcgggcgaattaaaacgaacaagttgtcgctcataaccgttataactaacttctactcccgcgccggtttcgttggggcttgtaatataaagcccaacataaaccactgcgggcgcggtaaactgaatgccttttaatgtgtttaaaaatgctctttctaaataatttgtcgcatacataattatctcctttttaagtgtgtaatcaaaaagccgcttgatccttttgatgggttttccaattcaagaatacacggtgtgtccatcgttcctcgataatcgatttgtaattcaccttcaaattcaatggttttagattcccgataagcgaaaggttcacaaataaattcaagggtaaatgtccgcatattttgtttcgggaaatccatgatctcaccgccgtggtaaatttcaccgatatagtatttgtccggctcgtcccacagatacaacttgccttttttacctaagatataagaaatttctctcaaatcggcccgcgacaacttttcaacgacgtcgcattccagtcgaattgttctttcctcccagcattcggcgccatagtcatattgaccatgacgccctggtatggcgatttttctttcgcgcttcgggggcaaaataaaatcggtttttacaactttgatattaaaccgatctctaaaattgacgccgcgaaactcaaaagaatcgcttatggttccttgcattaaatcccccttcgtcttaattctcggtcgattccccgtcccatttgcgtgccggcttggtacggagacggtcctgccgcttgcggatatacattgatattattgactgcgccttgtgcattggaaatctgcgttttcaagttgttgagcttgtgctgcgattgttgaatcgtcgcattgacttccatctcagccatttgacgcatttgatttaaaacatccttgaccgacttaatgaaactgtctttatttttgtcgaagcctttcgttagcttgtccgcggactttttcccaacttcgcctgccgtcttcacaatctcttcaagatttgtgacgagtttatcggtgtattgacctttcaagtttttcaattctcgatcgtaatactttttcgcgatgctttctgcaagattacgcttgcgtttaagaagatccatgtgacgatcccatccttcttgtgactgattcaacaagaattcaccgtatttcacagctttatcaatgtccagggtcagcatccgcccaatggcgtcggcgtcggctcctttttcgcttattcgatcaaggagacttccataatgtgcaacttgttgtacctgaggttctaagtccgtcaatttcaacatgtcttcgccaaattcatttttcacgactttaccttcggcgtctctgaccacctcaagtacatcgccataatcaataagtttttgtttcagactttccgctttatttttaatggattcagcggctttttcataagacgatacaataccgccgtacgtttcatcgaacgccttggcatagtcttctaagtttttcttcttttcttcaagtgcttttttatcggcttcaaggtctttttttctggcttcagatttctttccgctttttcttttttcagcctgattttccaatgcttcaatctcagattcaacctgttggattttttccttatgaagcgcttggaaagattcatacatcttcccgatgttcagaataccaaggctggttaactttcgatgacgttcttcaacttctcgccgctcaaataatgccatgttcatgtgttggtcggtcatgcttttaatcatgccgtcactaataatctgcatggattgttcgattgcaggcattgaatcttcaagcccgacagcgatcccttgaccagccggcaaaccgacttcagctgccattttcttcgatggcgaatggatgtctagcgatcgtcgtgcagcttttaatgccgaggacgcaactgaaattgccgcagatattacgccgctacgaccggcgcgaatcccacttgccatacctgctgacatgttacgaccaactgaaacaaatcgcccacggtaggaattagccgcacttactgccgcatttaatatcgctctaattgccgatacaacttgcccttgagatgctctaattccgttcgttgtcgacgtcatcagctggcagccttcattttggaaacggcttttacttgtcgaaattgcttgaatcaagccatttatgatcgacgtcatcgccgattgcatttgacctctggcagcattcacgccactgaccatagaagtcattgcagaagatacggcagaagaaatggcgccgacttgtgatttaaaccctgctgcgaacgcttgacccgcttgagagcccgctgcttgcatttgagacttagatgtttgtgcacctttaaccgcagcatcagttaaagatttacttgctgcctgtacttctcctcgcgtaccctcaaagcctgtagcataactcttgcccccgtcggtgcctgccgattttgttttggggggcgctgtctttaatttattaaccgcagcatcggacaaagctaaagccgcagaaccgctgtctccagctttactcttgatttgtgaattatatgcgtttgcaaatgcgtccccttgtcctgaggcttctgctgttccgttaaggttagccaccgccgcatctttcatgctggcagcactcgctcccgcttcaccagctccgccggccagcggatcgacaaaattacggaaaagttgatctcccagcgctgcagactgacccccatcgtcaagaccactcactgccgactgcattacggccgaagttgcagaagacgcttcgcccgaaccagacaataattcttgtaaaaaattatcgatcatagatcggcctttttctgccgattgaccgccatcatctaaattagatgtggcagcatcgccgacggatcgacttgcagattcaacttcgccttttccacccaataatcctgatgcaaacgacttaataagatttccgccagcagatattaattgactgccagcactaacgatgcctgtgccgattgctgcaataatgcctggaaccgcagctaatacagtaggaatgccttgaataatgccgacggccaaatgtgttaacaaatcggcgccttttgcaagcaatgccggtccttgtgtgccgattccagcaataaatcggccaattagttgtacacctgtgctgagtaattgagcgccattcgtggcaatgccgccgataaaagtttgaatcagtttaactgcagaatttaacatagcgcctggatcagacaaaagaccagtctttaatctttcaataagatacatggcattaagataaattgtttcagcaccacttttaattcctgcacctagcgatttaattaaacctttaccaacgcttgcgagattagccaaactaaatacattaatgatcgccaaaataatttggggtatattagcaattaacgtcggaatcgcttggatcaagccttttgcaatggtaccaatgatttgaatcccaatcattaggacttgagggatcgcactataaaccgcagatgcaaatttattgattagtctcggggcttcctgaatgaccagaggtaaattttgagcgataccctgagctaaacccttaaggatttcacccccagcttgaatcaacgtcggaatcgcaccaataactgaatcggcaatattgactaccatttgtaaaatggtcgtcatgacttgaggaatgttttgcccgattccttgggccaatcccaaaatcatctgggcgcctgattgtataaattgcggaacggcggtgcctagcacacttgcaacctggccaatcgcggccataattgatgttccgatttgcggtgcattttgtgccaacccttgaacaagactaacaattaattgagcgcctaatgctaaaaattgtggaagtagtgtcgtaacaccttcgatcaacgttgttgcaatttgcgagacactttcgccgatttgaccgatattttgagaaacaccgttaatcagttgttgaataatgtcaatgccgagttgcatgaattgaggcgcaacgcccgaaatatcagcgataacactcgccatggtttcgccgataactttaccgattaactccatccgactaccagagttctccatgcttgcggcgagttgatcgaatagggtgcttgcctgttcagaacttaatccgaattgctgcattgcccagtcgacaaattctgcttttgtggcgaattgttccatcttgaagctggcttgtacgaggttaatcccgagttcatcgacgctaattcctgcgtcttccaggttcgacttaagttctcccatgtctaatccgcggaacgccatggaaagggcgtcaatatagcctgtggctgtcgaaaccgaggttctcaaatcaccttggaaagtttggtaaaatgcaatacccaattcttccaatgccgatttcatgatgaccagatcgccttttaggttgtcgatcataaccttggccatctcttcagccgcgccagcagaattcctgatgttttgttcaagctggttccattcgccaccctcaatggacgacttcaaaccttcatacaaaatgctggcttgttctgcggatagcccaaaggcctccattgcatgattgacgaaatcttgcttgtcggcaaattggtcaaattcttttccgagggcggcgatgttttctttaaattcttcgccagggccgccggcggcttccaaggccatggaaatatcgtcgatattggtcgcgttggcagctaacagtgccgaaacggcagctaagtcttgcttattaaagacggtattcagccactctttcctctcggcggtggtcatattggccatctcaagggaaatatcacggaacacgtctttcaacggtcgcatgttgccttcagcgtcgaatgccgaaatccccaaggattccatcgctttccgcgctttgtctgttggagcagttaaactcataatgacgtttcgaagtttcgtgccgccttcagcaccttttatcccgttatttgctaaaatccctaatgcggtatttaattcaactgtgccgcctgccaaatctttcgcggtaccacctacagttaagatggcttcaccaagttgagcaatgtttgtattcgacttttgagatgtttttgccatctggtcgatgaacgagtcggcatcttcgatcgataaacccaatgcactcattgcatccgttacaatgtcggttgcataacccagatctaaaccgcctgctgcagctagattcaaggttttcggtaacaacttaatagcgtcgtctgcatcataacctgcgagggcaatatagtttaatgcttcagaggcttgagtggctgagaattgcgtcgttgcacccatttcacgggctgcagcttccaactgtttgaattctttagatccacctcgaatttgttcttgcgtgaatcccatggttgccgccacttgactcatgcccgattcgaaatcagatccaaccttaaccgccgccagaccgacgccgccaattgcggttgatacagcggcaatagcttttacagttccttttgcgaatttgcccgttactttcccgagcttactcatgccctttttaaacccagaatcatttaactctgtgtcaaatattagttttccatcacttgccatttctcacctcgctttctatataaaaaaatagagcctaaccccacagagaatctgcgaagtcttgctctttttcagatgccgtcttgttttgtttcagtgcatacagctttttcatgtttttataaaacttaatttcatcccgcgacatagtggttgtaattttcttcgcccgataacccatgacttttgccatgattgttgtttctgggagattgtaaaataaggctttgaatttccaccaatgcatctttgattcggttaagtcaatcccatacgcgtctacaaaactaacataaatcaaatcgccgtcttccgaaaatgaataaacgggatcaactttttcagttgatttttcgatagtgtctcctacataaatgtcaagaatccgagtgatcgcctcggattcattgacaataaattggtcaccataaaacatttccaatgcgatttttatttttaattcatcgtcaatttctttgtcttccatcaagatttcgaatcgcataaacgttttaaaatcggctttaaattggtattctagaccttcgatttttaccgagtagggtaaatcatctaagataacattactcattttttacatagatggatttaaaaatttcttctctctgtacattcatctcatcggtcaaataataggcaagttgaatgatgtgcatcattttcggttttttatcaccgaagatggttttaatcgcaccttctccgagaatcttatcgaagatgggaatcattttggcaattaaatcatcataagatccatagctcccgcttttcatttcgtctgcaagggcaatgatttctttaaatccttcatttgctacatcatcgaaaatgtcgatataaaaaatgttgtcttcaatgtcgactttaatttcattgttcgtgaattttaattttgccatgttaatggtctcctttctttaattactgttgcggtgcagccgaggcgtcgatggttgccgtttgccattcgtctttagacgtaacagtcactttcttgaagtcgccgtttactctaaaagtaccttcatacgtgtacgcgtccatagagccgccgtcagtgttaggaataacagaatattttcgttctcttgcttcatagccttttcctttactctttgtaaagtcgacgactaaaatttctacaacagcatcggtgccgataatttcgtcgtcgatgagttgtgccaatttatcatgaacaggatcgccaagtagttggtcgaagccccattcaatggatgccgaaataccaacaacgtcagtggtttcgaacatttcatcgacgtattgacgagtatattctttcggattcttagaattcgataggcctgtaaagcctttcattctgtggtaggtgtcgtctaccttcataaaagcgaccttgtctgctctttgtactaattttgtagtcattttaaacctccaaatataaaagttttaattgtatctgatattgtcctctgtcggcttccgcattgagcaaatagccgttggtcaatacttctattcgttgtgcgccgtccacttcgggaagcacacctttttcattattctcttcaatccagcgcgaaaaatcttcataaaagcctgaattttctaattgttgaatcacttctgaagaatggtaattcagtgtggcgaaagtaaatccatattgtttaatgacgccgccatcagaatatttcttataaatcggatccatgggatctgaataaataatatattccagtggctcaacgccaatgtaatttacattgattctggcttctgcatctaataaggggcaatccataaaatattgtctaatcgcttcaattgccgtcatgatctagctcctgcaatagctgctgcaccttttaaaatagattgtttgtgcgattgcttcatccgctcaaaccacttattcccacgcattggggcacctgaaaagtttgcgggctcataataccagcgctttgcataaggcgtttgttgaatgatctttccagaaccgatattggttccgttacttgcggcaccaatcaacatcccttgccgaaatggtgtataaggattcattaaacgcatacattcagaatcaataaatcgctgcacttcctggccttttccaagctttcgtttcctgtaggccgcaccttgatcgaaatcaaatttcttcagtaaaattttcattacttcgcacctacttcccaatgacgcattctctgggacccatagtctctcgtatcaacggtcgtcaccatgcgcacaaaatcatatttcttttcgaaatcttttaccgtggtaaattcatcgtcgatgatgcctttaacaattacatcttccggttgaaaagtaatttttccatgatgatttgttttgaattcggaaggtggaacataatctttgcaagaatcgaaagggatataaatcgtcgatcgatcggcgcttacaagcccagattgcaagatgtttgcgccttgattgtcttcccaatgaacattgtaaacgtaggatttttgatattttgtttccctgttttcaatgtatcgattgaaaattgttaaatctgcatttgtcagcattcaaccacctcgatacattaaaccagtcaatccaaaatacttttttacaatcccaacatatttgttttgcttcattgcatctagcttgttaatgtcatcaacggtagcggtcaaataatcgacgcgttgagatccgacagcttcagactttatgccgtccgaacgatgaccttttaaaaagtctttgttctggtcgaattcataagtgatcaactccataacgcaattattgaattgttctaccaattgaggattagtataatcaattcgtccaaaggtcaaataatcgatcagagctttcgcctgtttaaactttaaggaaaactcagacagagtcatatctctgcccgagcctgtaaattccttatataagttttccatgattaacccaaagaaataactctggcgatgggcacggctttatgatcgatgtattgttttccgctggatgcattggtgttgactaattcccagttcgttccgttttccaattcttgattggtcggagataaggtcttcatagatttattggtgaagttaattccatagggggcgaagcagtgacgttgacgagagtacagagtatcttgaccgccattcactttaggattgcgatccatttcgaagggaacctttacgcctgcatcagtaaattcgaacgcaccttcgcctaaaatataagtggtgtacttaaccacatcgccgccggaagtcgtttcaacttcagtaggcatggaatcgtcgataataacagagcgaccatttagcgttgccaaggtcaagtcgcgttgaacgcctgtcgcatcagtgtatttcagatgctcaagcaagttgagattttctaagttcgtggcaacttgagaatgcatgatcgccaaactaaagttaactttgttttctcccacggctgcttgaagtgcgttattcagcgttacttcattaaatttgccgctatcaactttcgtaatatcggaagtgtggccgtcgacaaactttttgttttcggcgccggtcataccgaagatgccttgtaagatagaaagaatcgtatcttgatcgatttcatcccaatattcggagacttgttttgccacgttgtccataaagtcgacgccacctgtaatatcataagcgaaatctttttcaacccatgcattcgcacgaccgacgacaacccgagtgtgggtaaaagtcggggtgtcattttctacgatgtccgtttggccgtcgtagttcgaaacagtaccgccaatgcgaccgaacaagggaacagtaacaatgtttccgcctgtttgttcagccatggtcggtttaatgcggtcattcatcacgatcgctttcgacttaactaattcatttcttttcagtttcgggattgtgtcgtaatacttgccgaacacttcggcattaaagtttttgctgtcaaataatcctgccatttcttttcctccttaaatttcagcacctggatgtgtcgataaataatccatcatctcagaataagtcatgttttctttcggcttttcaggatttgcagttcctccgaccgagccgcttccttgctgcggttggaataaataagcatctgtttcgcgaatgcctttgatctgtgcttcaagtgccttattaaaatcttctgccgttgttaacgcgtccatatccagcaacgcttttgcggctttcgtattctttaccttggcacccattaaagccgattcaatattaaaatcacgttttaatcgatcaatgtccgattggtgactcactgtcgattcttcgtatttttgcttatagtcttcggcttccttcttgattgcatccacgtctaaatctttaaattcttcaattttctcgttcgcattttttaattgcaattctaagttttctttttccgaatttaagattttattttcgttttctaagtctttaaattcgcttacgactaatccatgcagcctaaaaacttccttaatctgcgtttcatctaaccctagtgctttcagttcttctgttgtcatgtgttcctcctacacttagctttttgagacgtcgctctgtcttgtgtttgcgttttagattcgccaatctggcagaagcggaaggatttgaaccttcgatcttcggttttggagaccgatgctttacctaactaagctacacttctatagaggcggcttttcgccgccttgatcgaaaggagaccaaacatggagcagtttaacgtcttactcaggaccaacggactcctttttgactattaaaatagcgttgcttcttacgcaacgctttaaattcttcttctgataaaagtcgcttcatggcgattttatattttttctcatagggataacgaccttggtcgatcaatcgacggcaacattttgcttctttctcggtataaaaatgagcatgttgatcgtaatctccatactctctttttaataaccaaggccgctctaactttggataatgttttattgtcagcttcatattcttgcattaaaaaagctcctatttactcagaataagagctctgctttataacccgggaattgtttctttgattccctttaactcacgttgaactcgccttagaatagagttttcctctaagtactctaagcctttcagggtaatttgaacatcattcaacattaaaagatagcttccgtcttcgtagcgccggacctggactcctttaatatatcctgcatctatgagcatttctaatagatgatcgcgccgatgcttgttgatttccaaatgttctgcacttaagcgttcgacatcaaccttcggataatctagagaggtttgaagcgttgatagaatgctgtaaattatcttgaaatcttcaatcatctaataccacatcactacgcagtcttttatctcgcgctcaccttctaccatatctctaagggcatttaatgcgttaattgcatacggatagccactatattcccttttatccttcgggctaagattgacttcataatcatctaagtcgttacaattgacagaaacggtgccaaactcaccccaatcttcagggtaataatccgcagaaatgacattattttcttttcttacgtttcttaagtttagcataatactcacctgcctctttcttatagttgtataacttcgatgtttctttgtgcgcttcgtcttgcgtcattcctctagctatcagccttcgttcatggacttcgtgctttaacaatgttaaatcatgtttcttaatgtcattttgagctaatcgttgccagctttgagcaatggcaaagtccggatcgaatctacgataaccgtcaatcaaatggtgtttatcgatgaaaagatactcttttatctcttttataatagattcttcataaccagtgctcgctgcgattcttgctacgtcagtagtttggctccgaatctcattgtaatagagcttcgcatgctttcttgcctcttgagagtgctcatccgatattgcgccggaaatgtttctatcactcctattatacccatctttttttgtcctgtacaccttcgcatgattgctgaatttatcccgttcatggcgcaaccgctgtgctcgcactttgtgcgtcgttacactctcttcgtagccaagctcgtcatacatagtaatctttcgtttttctttcttgatggaattttccagatgccgtatgcgttgacctgcttcgtacgcagtgtattttttccctttatactcaaacggtcgcggttcttcgaaatcactatatgcaggttcagagattccctcaaagaaggggtaccagctgtgcctacaattaacgccactaaaaccgtcagcagagccataaccaatatcattcaacgacaaataatcaggtttcccacttaatgaaacaatctgcccctgccattcttggtgcgtgggtcttgcgccggcatgcgcggatatttccattaaatcttggccgacaagttccgcgttcatgagacccatttgcgtcgttaactgtctaaatcctgtgtttacgcacattcgcacggcagattctattcgtatcgttcttcccgaggcatagtctatgcttaccaagccgcggtcggcgcatttattgaccatttgtcgaataatttgatcggaagaaaaggcgccggatcttaaatttaaaactgcctgagatagttctgtccggtaaaactgcgtcaaccccttgccggcgaaaccggtagttttggtgatattctttaaatcatttccactttgtcttttaattgcctcaacgaacttcatgaccgataaattgtcttggtaatccggaagatgctttttcccttttgcatatagctttttgtcataggcatatgattttacacctgccgcttccatgatcttttcaatttcggagaccgattgatttgaaaactttgcaaccttcttcgtcatgtcattaaggctgtaatctacatcaatcattgcttccatttgatttctcccggtcgcggttcttaaatgtctcgctacatcccgaagcacatcgtcttcaagttgttctaaatacttctgaatctgtttatcagctccgacaaaataatctgggctaagcataggctactccaccgtttcgtcatcttcatcatccgtttcttcgacaccaggtagcatgttttttgcttcttcttcagaaattccatagcgccacatcaaataattttcaggcttcatcaaaccgactgccacttcttgcattcgaatcttctgttccgtttcgctatccacgatcaaggaatcatcaaaactaaaactaatgtcgggttcttgtttgtttagccagaagcaaatcagctcagctgttgcgaccaacgctttttgaatttctttttgaatgtcaacgattgtggcataagatcgttgcttactcgccttcacttcagttgccgtcttgtccacttgatctacttcagacagtgttccataagcaagcccaacagtgaattcaattcggcgaaggattttatttagaccattgaacaaagaagaatctcgaatcgcggggctaaatacttcataaaatcccgactcttgatcaatcccgagatttcggaataatctttctttaccatgaggaagctctcctctttgtgttaagacagttacgtcggcatcaatggcaagttcagaacctctaaattcccataaggtgcgttggtattgttcgtctgcatcttgaatcaagctcaatgctcttgcaaaacacgaaactacttctttattttgccaatccaggttattcgcttgaggattcttcaaataggcgaataacggtcgatcataatcaatcacagattcaggaacaattccttcccactcggcaatactatcttgagtacataattcgcccaatgttgaatagttttcagagcgatagaatgaattcgtcacgatccaatggtcatctctcacatgctcttcaagccgcgtgtaataaacatttttatcatcttcaaacttgattgttcgatcgatgaaaaccacgtgactgttaatatctttaataacataacgatcgggtgtggcaaaatcaaacttaatctcatcgcccgctgggtacggctttataatcaaaccgccaaatgccatggcgtactctgtaaagttcctacaatgatcgatcacttcttgatagatttgatttagttcttcgtcgtttacaatttcactttccaattcaatggtcgcaagtcttgcaaactcggacgaaatgctcgcagctaaacctagactttctaaattgtcaccaccgagccaggggtattcgccatggtagcaatccatccacaacataaaatcattttgattgcttgatttattgattccaagccgttgtctaatctcatcttgtaacacgctttcacctcctacagtacatttaatgctttaatatatctttcccacgaatattcgaacgcgtccaacgtatctatgtcggatgttccgtcatctaaccttataaaatcagttggtttatccggatcccaaacagccatagacaatgcttcggacaaactctcacaatcttttgtcatataaaaacgacctgaattcataagttggtcagtcactctaattcggtcgttgatttcattctttattgaattttttatcggcgtaacagtttttgtttgaatgcctcgttttaaaacttgttcagcggaatctacgtggcatgctgcgaccggtccatatttcatcgaaacaaaccgctcaaactctaaataatctctataaagcgtttcaggatcttcaggttctgttcttctgcttgccagtgcgtacaatcgtttcaagtctcgacttattccacttgcgacgaacgcatgctttgaaccagatccaccaaagtctaagccgatttgaatgatcaacggttctgagattttctctaagatatatttcttcggattgttggcaaagttccgatagatcagaccttctgccaccatacggcgacctaaaatatctcgatggtaccagaccgtattaggatcatattgacttttgatttctaaaatacgttctttcggaagattaatgttgtcgtcaatggtgaaatgctcgtagttatatccgccgatcaattcgtcgcccatatctcggtaccggtcaatgtattcgacataaattttatgtttcggatgtgacgggtttaaatcccagaagaactttcttactttcgcagccgctgttcggttgaatgcttctttgatcgtattatcgtgatgcaagttgatctctgttgcgatccacattccgtacgagttaccgcgtatcttcttataactgtcaactttcgcaccgcccgcaaatataacaattttctctttaaaattagtatgaggcccttttataatcaaggcctcattgtctttatatttgctccagcggcattgtcctcgaaaaataaattcaagaccgaagccgttagcatctccgatatttaattttgcattggctaccgttgatccagttgcgagatggattctgtcgggtaccatcatcaattccatagcgaaagcgaatatgttatccaccgttttaccggcacgaaccgcaccttctgccacgttgtacatgttttctttacatccgcgaatatagttgatatgcttatcgctaaaattaaatggaatcgtcttttttttcataaactaattccttgatttcatctaagtcttcaatttcttctgaaattcctttcagcttatcgatttcagtcttgagtttatcgatccgaagcttctgttcttctgtagcaagtccttgattacattgtgcttcgtacttcacaatcatatttgttagatttgtcatcgctctcgcttgcgatgttaagaagcgttcgtagcgatcccaagccgtgtgatattcgtactcgacgacatcaccgaattcaccctcacttttctttttctctagtcgcactaggtcttcacgattttttacctccatgatcgtctgtgcccgaataatggccgcatactgaattttgatgttctcccataggatatccagcggacttaatgattcgatggcatctaaaagtgcctgtgtttcttccggcaagtatttactgaacagaccgtgcttctctgcattcttgttgccgcgcatgttttccggttttggcccggtgctctttccgccatgtaatttacatcggccggttcccacatgatccgtcccccatccggctgttttcttgcacgctgtccctgcgcgcgtctttgcgccacaataattcaacttacggctcgacatcaccccacctctttaaaaacttattcatagattattctctatatattctgtcttatgtatcacggctgaaacccaccccgcgcaactgaaatgccgtgctttgcgccccgctcggttcgaggaaataggagatcaaaatgtaccatccgttcgaaacagtccatgcttacgattcatttaagaaggcccctccgagctacctcaggacataaaaaaagaaacctcccgcgggagatctctctacttatccatactaccattatgccacggcaaaatcggacaaaacggacaaaaataaaagaggcggcctgcgctacctctttgtatcaattccaatataatttttaatggccgtttgcaacaactgagaaaaattgatgttatattcttgagccgcatcgttaagccatttaggtatagtcagtgtcttttttaccgatttattttgaaacttatcccttactaagggcatccacacttccactaaaacaacggatagtcctttgttcaataaactcgaaaaactcgttggtgaagggatttcattcccattttcttcaagatcatataaacagagctctaaaacttctttagccgactccatgatttcgtcttcactctctgcaaaagtaaatccattacttatgtcaggaaatattatatcgtatatcccttcatcttcactaaatgaaatgatggcaggaaaaatatagcgatccttcataagttcctccttctcatttacatttaatattgtcacataagaaggtgtttggataacagggttaaaacttgagccctgttatccgttgaatgctactcacagtaccggccggaatctccttagaggtgcattttataggtacacttacaccggtttttttatttcggtaaatttcatgtgaaccgttagtccttacatgttcccaaccatttgcgagtagtttctcaacaacttctttgtatttttttcttggcatattccatcctttctgcagaaagattttttaagataagaatatgggcgattgggacattattagtatatacgtgttttcaatacgtgtcaatggtttttgagaaatctattttgtatttttctggcatggctttcatccatgcttcccatgctgcgcgatatcttctgccagctccacccgtcgacataacgcctttgaaagaccatcctcgtcctgctgtcctcgatcgacgaaatgaaatcttcgatgcgaatcgtctcatctaggcaagctgcaaggcgcttccgcagaatctcttcgagggcttgcttctttatgtctacgccttcaatccgcacatgtatcggctgatatggaaactccgcgttcgatgccgtcacccgatcagataaaggggcatggagccggctaatgcgtcgttccaactgtcgaatctctttcttaatgtatctgtagttttccagcgtttctttgtccatgctgcccccttatgcttgcgccttttccctgcgccttatgttatgtatcgcggcaaggtcccaccccgcgctcattgtgccgcgtagcgctccgcgacggcttgcttgggctctcgcccactaaacgtaaaaagtcgaaaaagatgttgtgtttgctttctgccgtcgccaccatattttttcaccggtccgataaatgctcggaaagaccgcgccatgctttcgcgtcgcaatccatccccagatttttgcactcggcgatctcttttataattaggtctttgctcttttccgtcaattcgtcgctgttatcttttagaatccgcgcgataatatccacgatatacgtgcttcgccccagcgcgtatctaaacgctgctatatataatacttgtttttctgctgtgttcatttttccctccacgtaaattccaggccgatctcctcttccagggcacgccccaccgtttcggccgctgcctcggcttttgcgtctttcttgatctgctcgatctgcgcccaggtgaggttataggtcggcgttttatttttattcttcatcggcaatgatgctcatttctttttcatcgccaatgattcttatttctttgatttcgtcgccatttattacgcgatagccgccgctttcggggatgcacacgaatccggtatcctcgatttgttccatcaaggtccctgatacgttcatcattatcctttcttcgcttttgtgtttttgggtttcgatccttgttttcacgacttcgctgtcgcttaaatgaatttcaattctcattttctccccctaaaaaggcacgtccgcgttgtctatcggataatatcccacgtcaccgccattgcttccgccctgcgggccgaacgtttgtccgccattgctgctgccattgctgccgccgttttctgctgcggtctcgataaagtggacgcggttaataatgacatccgtggtatacacccgttcgccgttcttctcgtaacttcccgtctgtatccgtccttcaaaggccactctattgcccttacgaaagtaattggccaacagctcggcggtcttcccaaaggccttgatgccgatgaaatcggcggtaggccgccccgctgcttccgcttcttggcgcttttcgcgactcattccccgatccacggcaaccgtggcgaaacagttcgcggtgccgccttggctgtattttaattccgggtcgcgtgtaaggcgcccgtatagtgcgactagattcattcttccaccactctaacttttaagttctcaacccatgcgtattcatcgaacgtaaattctttttttatcgcctcttttatatcttccatatgttttttgtaaaacttttctttatcgcttttatatttggatataagttccggttttatcccaaaatctttttcctgcttttctacatcttccactaaatcaaattcaatctttaacctcattttccgcctcctactagaaggttactagaaagttactagaaactactcttaactactcttccccgtttttcttaacgtaacaatgcgccggaatgtttataccgtgggaatggcttcccgattctttttcttcggcctcgacttttgccgcaagtctcgcgacataatcctctgccttgtataagtcttccagcccacctttaagggcatagcgaattaggtacttgaaggcattgccacgaagaaagccgacgtactgttcttccccgaggagcttcgccagaatcgccatactgtccgacccgtcttccagaacatagtgcgccggcgtattgaagtctgtcactcctcatcatcctccccgttgtacaaatcgagggcatcgcctattccccgtatagactgccccaaaatcacgcaaagggactgcacccacgcaataggccgcccggccatcacctggtgcatctcgtcttccgttagatcggaaaagcagcggttcacccatttcccgtcgcgttccactctgaaatacacgccgtctaagtttcgttgaatcatgccaaatcctcctcttttacgaaaacgccgtcgatggtcttgcccttgcggtccttgattttttcataggccatggataaacactcttcccagtcgatccctaattgcttggccagaatgaccagagtcaccaatacatcgccgaattccatcttcgtgttgtcgaattgtatatagtatcctccgccgccaaaattgatttcctcaagatccagcatggtcttaaactcgaagacctcttccataaacttcatgaactgcttgtccgcgttggaaggatccacgatccccttttcttcgccccacgcttccactttcttaatcaattcgttcatcttcgactcccttcaatctgtcgggatttccgacatgtttatctagccctgtgttttataatttagccacttccaaacttccctcgacatagtcggcattggtcaagtccgcaccggttaagtctgcgtcggttaagtctgtatcgcacaagtctacaccagttaggtcggcacctctcaaatctgcgcctatcatgcttgcatatgctaaatttgtatttgccaaacaggcatcttttaaatttgcccagcctaaattcgcaccgcttaaatctgcgccttttaaatttgcgccgctcaaatctgcctctactaaacaagcgtcgcataagtctgcatctctcaagtctgcaccgctaaaaatggcaagctctaaaaaagcacctttgaggttcgctcctcttatatctgcgtttcttagattcgcgcggacgccttcttttttgtgactgcacaaccaattttcgtgctctcgcaatacttctcgcagttcatctttgttcataatctgccccgttcttccaagcccgcataaatccttaacaaaccttaactacaacagcttcccttgctcatatcccaagatttcaaaagcatcatccacattccgcgcgatgccgtatagcaccttcgccgatacatccgaccgcataaaatcaatctgcggctgggaaaccctgcccgatgccgtcttcacttcgatgaaaaacatcttgccatccgcttttcggtagccgaagagatccggaaaaccctccggcagcgcccgcacgaaacgcttcccgtccggactttttaaaagcccgctggtcgccacccaacagcggcccagcccggtgccgttaatggcatcggcaatctctcgctgaatcttcccttccttgcctctcaaaacacgctcccttccacatgccgaatgcaatacaaatagccgccttcaacctccacataatagcctttgctgacaagcgcctttaccagcctcacccgctccttaaagctgcggtaagggatcatcagaacttgaaccatccctacctccatggactttgttttgccacttcctcgagcatattttcgattttcatttttttactttccagttccttcccatggcttcgcagattctctggcaattgtgcctccctacgttcaatggcgcttgtgttctgataggccatgcgaaaattcgcccggtccgccatcggatcttcgctcaaacaaaagctttgaaagcctaagcggcgaatcaccttcccggcgatcgggtctcgctcttcaatccaagcaatggcctctgcttcccgatagcctccaaaacgtgatattgcccgctgcaccagcccgtaaccatacgagaaatcacgaatcgccacatcctcttcagtggcgagttcccgaatctctgcaatggtcggcgcaaacttgttggtcgcgatgtgctttgccacagcctttgtgagaacatcaatgggaatgtctccgagcatcttgaaccagaattcaatggccaatcgattttcaaaaaggccggacttcgggtagctctctttgatgcccataaacaaattcgcataggcctgcggtattttattctcgttcatcctgcatcatctcctccagtacctgccttgtgcgctccgtccccgatgccggccgaggcccattcaacggcgtgatgctgctcgcatctaaaaaatcttcataacgcccgttaaaaaacgtcgacccgttcataaacgcaagagacgtaaacccattggcgcgttgattcagcacatcttgcttgtagttctccactgcgcgcaaaatagcatcttctccgaggtcttgaatcgccgccttggccttcttcgttacggcactcttgccttttttgttgggataagcctgccacgcggtctcgaaaaaagaaaccgccgcggggtttggtttcgtttcgtttcgtctcgtttcgttttgttttgtttcgtttcgtttaatgctagagctttgcttagcatttgctaagcatttgctagacaattgcttcttcgccttactaagcccgccttttctgccggcttcagcacgctttttggagacgtcatccttatagtccatgtgttccaaaaagcggaccgaataaaaagattcgtgatcttccgtaaactcaaacaaaccgaaatcttcgacgatcgattttataaactcattgctcacccggaagtcaaaagcaattaaattgtaatttgtggaaagcatgtagtctgtactatctaggagtcgctcgaggatagcaaagaaaacgccgtagccctccatcccatgcttcatgcgcaatgcaaggatcttttcgtcgttcctggcattggaataatgcgggaaatattgtgttgttgccatactacctccatcactgtaggcataccaagaaccgattcggcgctagatatgcgtacaaaaggcatggcaaggggcctatgcccctcaccgattatttattggctgcttctgcctctacttcctgacaaatcttttcgtaatccgtcttcttgatctcgtcactgtggccatagccgtacttactcatcaccgacttacacaactcagcatcgcccttggcaatagcatagagccgcttcgcctgcgcttgggaaatcgtgccgtcgcggtctgtatagaccttttgttgattcgtgtactgattcccggataaatccatatcctcaatgtcttgtgtaaagacgtcgctcagagagcctaccaataatgctgcatccaccatggcacgcttcttggccatcttcagcaccgtgttgtccatggtataaggatcctgcttaatgtattttcgttcgcgcgtgttgcagctgccgaagccttccgtcatgacctcgccgttctttttcaaccggcatgccacctgatactggaagaaacccgtatcgaaatcccgtgtcgaatccagaatttcaaattcactggtcaggcccaagagcataatcagcttttccgcgccaggcttaagaagcgtcggcttccccgtgccggggatcacgccgaaatcgtgattttgtgtaaattgactttgcaccaacgtctgaaactgcttgatcttttgaatactgccttggatcgactgcaaattcgtcgattcaatcaaagacagggcatttacctcttgcacttgcatttcattcacattcgacataacgaacctcctcacttaaattttccactttcccggcgatgacccggtccaagagctcccaattgtcgtagacataagccgccaatcgacgcgtgaaaagcttgcttaaatccgtgtcctcttcaaaaaatgtctgcaaagcggcgattttaatcttccggtctaacttcaaatccatgtttgcctcctatctaagccgcagcgacttcgtgcgtaccagctctacgccttccgtcagctccccggcctcaatggccttcttgatctccgtcttcatgggcttgcgttcgatcttccagtaagcatcggggataagatcttcattgagaatgttgacgctcggcgcgttcgcctgaatgctccacttaaagatccccgaagtgaccttgtccttgcccatggcttccagattctgttgcacatagcccttaatatccgcgatgcgattttttaccgccgtcttccgggctctcagccgcttttcctctgcttcaagtgcctccgcttccgcttccagattgcgaatcaccttcgccgtggattccaacttttcttcaagggctgcttccacaccatccatggctgccgcaacggccacctcgtcgtcgatgttctcgagattctcataaatctcagtaatatcgtaaagcctcatttcacgccctcctcttccatcaactgccggcacaagttgttaatctcgactaaaagcaccggcttcttttctttcgccgcctcaccgatgcgaatattgatttcgcatcgatttaattcctccaattttccttccaacatttccccgattgtcgagggttcaacgtcttcgtaatacattttgatctcctttgtgttatactaatggtggttattgaatgatctcgcttggacacctgtccggcgagattttttcatttacgcgcgtcgtctctcggcacaaatcattctttagcaccgaagacctcaacccgcgctcatcctcaaacaaataataatgggtgtattcaccgatgaccttcccggaaacgaagttcttgttatgtctagttccattcattttgttgtaggtcacgaaataccactttcctatttccaacgcccgcagcgttccgcctatatttttcggcttcggcgcatcccaatacatgcccgtgtcttcacctgcaattaaaggcctcatgtcttcgctgcatcgtgccacgatgggctgccgttgactacaccgtgccgcgacaggttgctgttgacgccacttgggcaaagcatcaaatgctgcttcaatcttttctgccactggaccgattacatactcccttttccgcgagtaaataagctgcaccgtttcatcggcgatgccgaccacatcggccacaacctcggtaggtccgtggtgcttaagcagcgcgatcaccttcgggcgaatgtccgccagcgacttccattgactattcatgcttcctcctaataggggtactggccgcgttccttactgtaagccaccgcccacgccgctttattgttaagctgcgtcacacaggcactttccgccaactcatcacaagcaacggccaacataaagctcaccagcgccaccaagccgataatggccaagaacgccatggtcctgcgccgtatatacttcgcgtcgttatacatcacacacgctcttcgtttcattccttcacacgctcccttccgcgaaacaaatacgcctcaaacgcactgcgctcaaccaaaaacttgccaccgcttccacccgtcaacactgggcaatccgcattgtgtaaaatgcgataagcatcatgcttcttcaaatggtagtcagccataatcgtcttcgcatcaataatttcaggccgtcgactcatacaagccccctctctaaacattcttttctatccatagccgaagctccttggccgccttagcaatggcctccaaatgctccaaaatttgttccaacgcctcttcctcatctgcactgacgacaccgtcggccacgatctcgatcaaggaatcctttaccgactccacatccttcaagctcgaaagcgtctgaatcgcgatgcgatcaatcccattcagggaaagctccgccaccgtttcaaggccgattgggcattcattcgaacagaagaaatttaaaagctccggcgcacgatacaaatccgccatcataagcaccaaatccggctgcggatggcatcgtgtccccagctcataatttgcaatcgtcgacggatgtacccccagcgcctcagccgcaccttcacgactttttaaggcatcgttgtacgccgccgcatccatacgcgccctgtaaaacgggttttcctgcgtacgcttgtgacaaccacccatcactcacctcctttatttgctataatcacctcgaaaggagatgttaacgtgaaactaaatcccgataacgttagaaacctacttctccatttagaggagaatcttgatttcgacaaagccatccatctacaaaccggagataccgaccccgacaccctttacaccgctacaaaactaatagaagcaggctatctcaaaggttcagtcagccactttatcggcggagggtgcttaatcatcattcagtcaattacctgggacggccatcagtttttagataatattcgccccaaaaccagctgggaaaagaccaaaagcctatcaaaacaaattggcggggcatctttagatatacttagcaagattgcagtcaaagtaacgacagacctgatcaatggtcaacttgaatagaaacttttgacttcggtattgttagctctaaacgtaaacggagaatatccgaatcagacgataaagaataacttgaaacattttcaatttctttgtcgtctatttttatactgaaaacctcgctcgtatctgtaattgataaattcatcactcactcctccttccttgcaactccattccgtacatccggccttccctgcaaccacgtgctatagaggaagcgacgtgattgacgtagtatataggtagaacggaaaggcgctatacaagttatttgtactcttcaggcaaaaaaatttcattgatttcaacatcaaatagctttgaaagctttatcgccttctttaggtcaatattatttccatttctctcgagttctgaatagcctgaaactccgctatatccaagataatcggccatgaattgctgagtgtatcctttttctactcgaaggttctttaaccgattttgtaatttaacttccataattcacctccaagcgccttcgaattacaactatcttgtatttatggtattacatgttacttgtactgtcaaggcatttttacaatattcttgtatttcttacagaatgtttgaaattcatccgtcaatcgaatacaatttatttgtaggaggagattatgaatactattggggcacgcattaaaaaacttcgacaggacaacaacatgacccaaaaggaacttgctgagaaaatgtcggttagattgtcaactatctcaaattatgagactggatacagcacaccagacattaatacattggccaagttagcaaccatttttgacacttccatcgattacctagccggtaaatctgaagttagttctaatcgcgaccctctcctcgaaggctttccggaaggcgtgcaaatcttacgccgggccaaccgcgaactcactccggaagcgaaagcgaaaatgatcgaaatcgccaacatcttcatcgatagcgtcaacgcgaaagaaaacgaagaaaaaaataagtaatttttactacatatgtgataggaggaatttatgccacaagatcttgcacctttagcctggactttcagttctgagtgtaccgtccctgctgacatacgtgagctcttaataccgggtgaaacagctgtttgtgcctattcaacgattcgtgattgtgcaatttttacaaacaagagacttatcgtaagagatgcacaaggattgaccgggaaaaaggttgaaatttactctctcccctacagttccatcattatgtattcttccgaaaacgcaggtacgctagattggaattcggagattgaactctggacaaaagccggtcgtataaaaataaaacttggcaccaaagccgacgttcggaaacttgacagaatcatcgctgccgctactctaggtggcgatttatcagactttaaagaagaataaaaaagggcactagcccttttaaaaatcactttgtgtcgaacataggttttattattctctcttattatcggaaaggagcctccctcatgactgcagggtcacatggtcaactttattccatctactatgaaaccttcctaaaattcacaaaagatcgaacgatctttaaaaccggtaacgcatttttcgctcattatagagataagccgaacttgccgttttactattcagaaattacggattttaccgttcaatttctcgggttccatatttcagaccttctattcttaggcaatcccatccatgaaaatggagataccataatatggaacaggcatcacgcttataattccatgaagtacggagaaacaacagccgaagatgatgagttattctccgatctgacaaagcaatatgacatagaattattggaggcctttgaaagagagtttacaaatttttgtttattcaacgaatcattcttttcgaatcccatgttcctcaattcaggtaacattaatccctttagcctggcttctatccgatacattgaaaatcaattggatgatacagaccatgtcaatgttctcttaaaaagaaacgacggcgaagaactttctttgctgctcaacagacataacctcgatgctgtaatcaattcgtttgaagccattcgtaacagatttgaggactgatatgccgaatgaagctaaagttatagattttcatataatacaaaactcctcaaacaacgcatctcctttctttactgaaaagaccgtcaattctaggtatactatagataatggatggaatgatagcgaagggagagatgatatggacaatagatcactggaaaaatacattgaaaaaatggaactggataatagagagtttagaaatgagatgcgcgaacgtgatatgcgtgccgaagaaagattacaacaaatggaatcgcgcatagcggaatctcaacggcaatctgaagagaggtttaatcaatcagtcgctgaaatgaagacgattctatatcagacacaagagaaggtacaagatatagaaaaacaaaatcgtcactttaacattgctaacctcgttgcgattataggattagtcattgctttcctcgtagggctcacccaaatcaaccaaggcttcacttcaataattcaatcgatcacatcggaatcaaccacaacacaagtacaacaacgataaaccccttgcctttaccacacgccaacgcagcaagacgttcgcctttactatgttaagccgccttcgccgttaaatagacgtagactcgtatgttcgattacataaggaggatcccatgaaaaaaatattgctcccgttactcttatcaatcaccttgatcaccgcatgttcaaaccaagaagtagcaaagaacgatgctgcttcgaatgcgcccgccaaatcagctgcagctcacgagaagattgatgaaaaaaaacttcaagaattttacgaaggctacaatgaaaatagttccatttctgctacttacgatatagaaaagatggcaatcaatcataccgtgtttaacatcgacggagctcaccccactttcactaccaagtttttagatgctgcgtttaatgaggcaaagctattaaaagaaaatgtttctcccaactttacgctgtatttttatttcgaagacgattctgaaacgccgttccttgtggttaagcaagacaaaattatttccaaaaccgtcgattttgaagaggttgtcaactatgagacgaattttgcttctttcgacatgaaaaacttcgaattccttgatggaaaatatggaaagaaaatcttggccattaccatggactacgtaaataaaacagaccagccgcaaaacccttggttaaactttgctactgccattaagggcgagcaagaaacggatgctactgtcgacttactaaatggggcgaatggcttattccctgatgattataagcccgaagcggtcaaaatgggcgaaactcaagtaaagcctaacacgccggttgaagttgtcgttggtttccaactgaacgatccttcggccaatgtctatctaaggtccatgttcggcaatgactttgaaaagttgatcgaacaatagcctggattaggaagataactaggccctaccttcgttctcagggtaagaactcgcgataattatgaggctatcttattccaatttatttcgatttattggaataaagaattgacaactcgtcaaggattgttacaattattttaagagggaaacctctgaaactgatatcaatccttggaagtagctcccccaccatacggggacgggcaaaaccaaggattttttgctttaaagaaaaacgaacccgacaataccggtagatagaaaaacacattaataaattcgtaaaactgcttgcaaaaacaaaacctagaatgtaaaatgaggatagagattagcagtaagtatcccaagggaacttgcttgcggaaaaggccctccattctagtagtggaggacctttttttatgaaaccttttaaaacgttaagcgaacaaattgatattttgagagaacgtgaactcataatcacagacgaagaaaaaaccgccaattacattttgcacaataactattacaatcttattaactgctacagtaagtacttctttgagaaaaaggacttctatcaacaaggcacgacatttgatcatattgttgctgtgcaccacttcgataagaatctaaaatcaacactatttaaattcattatagatgcggaaaaaacctttaaatcaatatttgcgtaccgttatagcgaattttatagggatattccatttccctaccttgacattaaccactacgaggacaagcaaaaactgaatgcctctaaaaatatctcgcaactatctaatattattctaaaacagtctagaaatcgtgataactcaatttcccactatgtaagcgaacaccatgatgtccctatgtgggttctggttaacaatctaacctttggccagacttcaaaactctattcaattatgactatgtctcttcgaaatacgatatccaaagatcacagctattttttgaaagaaaactgcaaaaatcaggccgctattctccaggccgatcagcttgaatcttatttaataaacattgtagaattgaggaacatcattgcccataataacaaagtaattgactacaaatgcattaagaacaatagattcaaccgttatttgcatgccccctataacattgatcaacgtgcacctagaaacgatgtttataatgcctttctcactatgcaatgttttttaaccccaaatgaatttacgcaattaaataatgcgatcgtgaagcgttttaataaactcagacgccacatcgatctcaacgcctacaaaagaatctgtgacgacttaggcttccccgagcagttagagaaattacaacagtagcagttaactagaaataaaaaagcccctaccctgctgcaacagggtatagctgcatcggcaattatcaaaccgcgatattcaatttgaatgaatgtactctccattttcgtgtttacaaatcgaagtctcatggtacaatcatattaacaatgtgactggacagggtttctgtccgaccatgaaggcttccggtgcggaagcctttttgtgttacgtagagaaacagacgtctaactgaaaatgccttttcagtgatttaacatgagcctagttaacgtcaaatagccatattaaggatagagtcacctcttccctgttttaacaggtgaggtgctatcctattatttttcacgtctttaagaacaaacgttttgaaaggtgaccttatgacgcaagaaaccatcgagcagctggcagccaatctgctactttcaacagaacaccccctgcacttccccaccgacttgaaaaaagtcgcaaaaaaactgaatgcctccatcgttaaaagcaatcttcgcggtgaaagtggctacattcttcaatacaaaaatcacttcctcatctgcatcgacacggaaaaccaccgcgtaacccacaatcgcttcacaattgcacacgaactgtcccacatagcattgggccacctcgacaaacggaagcacatcccttatgcgcaaaaagagcaagaagccaatgatatggccggggccctactcatgccctttcatttcatggtcgcttacagagactatgaaacccgcatattgtcagggttcatggccgtaagcgagcaggccatggacattcgcaggaaacaaattatcaaagatcaccactatcacaccgctgtccaacgtaactactaccaagataacctcactcgtgatatacgtggcggtgtctaagaaaggagaatcattatggcaagaggctatggcgaaggcacctggagaaaactcgcatccggaaattggcagctgaccataagcgtcggtacaaacgccaaaggtgaacgtgtacgtataagcggtacaggcaaaacgaagaaagaagctcgcgaacaagttaatatcaagttgaaggcatttaatggttttgacggatcaaatataactgtcgcggaatgggctgaaatatggctcgaagagtacaaacgcccgaatataaacagcaccacttacctcacctacgaacaccagctgcgcaaccacttcattgaaccgttgggcgattatcgcgtaaaggatcttacgaccatccaattacaaacccacatcaatacaatcgataaaaaacactcccgcgccttggcccgggcaatcaagtctagaatcacctcttgcttgaaaaaagcagtggacattggccttatcgacaaaaacccggcaataggaaccgaactctccaaaacaagaaccgtcaccgttcgcgccctcacccgagaggaacaagacaaacttgtcgaacgatgccgccgggaagaatatgccaacctcattttattcctgctcaccaccggcctacgcatcggcgaagcgacgggacttacctgggacaacgtcgactttaaaaaccgtaccctcgccgtcgcccaaatcatggtagaagaacatggaaatccccgcttgcaaccctacccaaaaacagacaacagcgttcgtactgttcccctttcagatgatgcctatgctataataaaagaaagagaacgaaacaacgacccggaaaacaacgtcttgaacctcgtcttctactcgtcgacattcaacttcaggaccctctcaaactttaggcgatactttgatcgactggttgaggaagccggcatcgaacgcaagctgacaccacacatgctgcgccacaccttcgcaacgcgcctcattgagcaaggcgccaacattaaagccgtctctcagttattgggccatgcaaaagtgaccaccaccctaaacatctacactgaagtcttcgacgatgaaaagattgatgtgatagatacgtatagcatcttataatttggcgcacgaatggcgtaaaaatatctgtaacccgcatggttatcgcgttacattagacatttcaagttcaatgtctgatccgctttaggcgtttttttcataacaaattaacagcaattttcatccgaacatttatgaatttctcatggaaaggactctgatttgaaaagaaaatttctatctattttgctggccgcgtccatgctgataggctttgttccgcaatcggcaaatgcccgtgatgccagactttgggtcgaaggtcgttatattacaggcgatgtgtcaccttttattcataaagaccgaacgctggttcctctgcgccaagttgctgaagctttggggcttgatattcagtggaaagcgcaggagcgtcaagttcttattaaaatcaatgataaggattacatcttcttccccggtgaggcctattatcgtgccggggatgcaaaagtagctatggacacggagaccatgattcgtaatgaccgtaccttcctaccccttcgcgtcattgctgaagccatgggtaaaccggtatcttgggatcagacaacctatacggccattgttgggacgggttatcgtcccgaagtgtcctcgaacaattcaaatataactgaaactatcgtgcaaaaaaagcctgtttcaccaattgtacaaagcaataacaaagcacaggcaataggtgccccacagggaaaaggacatatacgcggaaatagaaattctcgtatctaccaccttccccaggatgcaagctaccacaaaatctcaccaagaaatactattctatttgaaagtgaagctcaggcccaggcagccggctacagacgcgcgaaaagataaggtctatgtacagatagtagaagccgttggttatagtgaccaacggctttttattttgatgacatatgcgtgcaaacttcctaaagtcttgcatcgtcccgtaggctttaagttcattttatttttgtaatggctgcaaacccatggtattgagtgtcgtttacactttcggttttgctttcatcccaattaatttagaagaaaatatagaaacggcatttatctctgttttatgaaatctcaatttccccaagctcattgctattcgaaaacttcttggatatacttttagcgacaagtacatttgttttaaaatccagagaacgccatttatttcacccacggcgacttgactaaattataaatgtgaaagaatggaaaaattcgcagtttaggaggagtactatgaagtttggcgtaaggaagcccagcttgaaaaaaagctttaaagccagaacgaccggcaggttgaaacgctctgtaaaaaaagcacttattcccggttacggaaaaaaaggcatgggttacataaagaatccaaaaaaggctgtttataacaaagtctacaataaaacgaccgtagatttactaaaacccattaaaccggtgagctcaccaaagaagaagaaagcgaagcaaccgaaaaaaacaaagtttcattacagtgcaacaaaacccgaaaccgtaaagcagggattggaaaacgaaggcgactctccggatcaatatttgacacggccaccacgtcggtggttaaaatttatcgcgataattctgggacttgcttcatggggtgccttattcggtggacatccgaacattttcctcggcgttctctacggcattcttgcttacgccgcatatcaaaaatcgaagcctcgaataaatattctatctaagccgaaaactgaagcggttacacaaacgaaaagccccgttatcgacgacaaaaaagcagtcgatgtcttaccgacttctgctcccaaagttcccgatacagacaatgctgcaattgctcccaccaaagacaatatggatgtgcgaaacttacgtgaacttgtccctccgaatgtatttgatctgctctggtttattaatggcccgtatagaaatatagaacgagaaacacaaaccttcgacaatggcttctactctttcgaaatcagttttcaatctgaaccttctgctattaatgtgcatttacccattgttgagggaacacaagatcaaaaaataggctattacccggcttacgacaagcttactgccgtagagcgttttatctatttaaaatggcttcaagacatatctcagcccatcgacatttcatacgtttttattttttattacggtttggagcgctttttatttactgaaaaaattgagcaagccgtagaaatgatttttgaacttaaaaaatatcattccgagaataactcttttaatagctattccaacgatgccattttaattgccgctatgatggcaaaaagacccgattggatagcacgtttaaatctgcgaaatttgagcataccactttatgccacaataaaaggtgccgttacgaaatgtttcaccacccatgaaataatattgtttgctaaaaaagttgggtggacgaatccacgctatattaaaaatgaacctcaaaaatttgaagccaatctttctcgttgtttaaaagaacagtttggaataaatcaatttatcattcaagaggagcagtataaggaagtaactgactccataacgatattccttgctaattattctttatctcaagaaagtcggttttcagaacttcccgatatcctaagccatccggatattcaaagcgcactctatggtcttcttcaggaagcccacgaaaaaaccaaattgcagcttcgcgaagagagaaagatgaaaaccgccgagtaaacagattttttagtgccaatgaaaaaacgtctaaggattcacacgccccagacgtttttttactttatttccttgcaactgtacattttgatccttgcttcctcttctgccctctcttagaaaacgaaggattcagaaaagctcttttgcctttttaaagcataatgatcatttctccccttttcaatctttcatcttgctcagcaacgattttcatgtatttatcttttaagtctttcggtgtatcttctttcaagactatgtatttatagccgtgctcagtcttcgctcttttctcggttaaatagggataaaatttgggctccatcattgtattgcgtccttttttatttattcaatatcgaatcgataagtgctttattcttcaattgatcgatccattgcttcgggatgctgtcgaagccgtacatgatccctgccaagccgccgaccaccgctgcggtggtgtccgtatcatcgccgaggtttaccgccgtgcacacggcttctcgatacgatgcggtagttagcaagcaccaaatggatgcttccaatgtgtgcaaaacaaagccggtggattgaatatcttccactcgtttggtttttatttcgtccatgcggagtgtttcgccgcgaatcaattgccgcgccaaatgaacgtattcgacacaggcctccctggagagtttatgggcgtgggtgatggccgatacggctctgatctcgtcgtctgtggcttctgtgaatgccaagggcaaaatgcgcatcagtgaaccgttcccgttggcgtggtaatcgtccagtccgccgccctgctctaaggcaatgcgcgtcgtcgtgccgacgtcgaatgtctcgccattggccgtgtaggcgctttggtagagccactcgcaaaaccgcttccgcatatcctccgggtcgatgcagcctctttctttgatggaatccaatgtagccaaggtcatgctcgtatcgtcggaccaagtgcccggcgcctggttccacgagccgtagccggtcatgccttcacaagtaaaagttccccgttttttgaattcaaagggcacgcccagggcatcgccgatagcgaagccgtaaatcgccgatttcaacatttgatccactcctcgattttataatccgcgggaattcttcctgctttttggtatttaatgaattcttctttggttaatgaattgatttttacaaacttctgcatgatgtcattcttattcaaagggttaacaaaatcaacaaacagctcgtcgtaaggcatccaatctggcctaatgtaaattttcccattatctaacaagggaatgtagtcgtctgattcatgtttaaattgattcgccattttcataccgcccttgtgctctgatcttatacaaaaaaaccgcccgcaggcggttcatttttattcagcttcgtcttcggatacttcaatgtcttcgaatgcttcctcggatgtttccgggtaggtatcgaagaagtcgtaatcgtccagatcgaaatcgtcgtaatcgtcaaaatcgtcgtcttcgtaaacataatcttccaattcagctaagtcttcttctacgacatcgacatagctttccatgtcttcgaatttttcatcgacgacttctgccaattccgcgaccacgtcgacgagttccagtaaaatttggccttctttcgacgattcttccagtcccaatccatctgctaaaccttgaacgtaagcgatgcgttgcaaaatgtttttcatggttgcctccttggctacactctggacatatattcgcctgaacgtgtgtctatgcgaataatatctccccgatcgacaaacaagggcacaagtagggtgaaacctgtctcaacggtagcgggttttgtcgcgccggaagtggtgtcgccctttacgccgggctcggtttccgttacttctaattcgacaaagttttccggggtgacgttgaaaggcttgttttgatagatttgaatcgtcgccatgtcgttttcacgcatgaaatttaatgcgttttccacgaattccttttcgatgggcatttgttcgtaagattcggtgtccataaagtagtaaagttcgccgtcggaatacaagtattgcatttgcttcgtttcgataacggcactttcaaacttttccgaggggttgaaggtggtttccttcgcaccgccgtttaaaaccgaacgaattttagcacgaacgaaggccgcaccttttcccggtttaacgtgttgaaaatccacgacttggtagacgtctccgtctttaacaaaagttacaccttttctaaaatcaccagctgagatcataatttcctccttaattgtactgcctatttattatatcaaattgaaaaataacccacaagatgtgagctgccgccttagtaaagcttttttaaacggtagccgctgggtttaatgaaatcgtcgaaaaaacagaagtgtaattccgcggaccggggctgaaagtttacttttatcggcccgttcttctcccctatgagaaggccgtctacgatgatttgtccctctactgccgaaccgggctctcggatgaatacaccgcttagatggatgttgcctttcacggaggcgcctttttttaaccataggacgccgaccatctccagagggctttctgtttcaagggcccctgccatctcccaccgcagattactcatgttgtcgagaaaggggctttctgtcccgtccggcgcgacttgaaggatgcggccgtctttttgtttcaaatggagcgggccttcggtatggagcaggcgcgttccgtctttcgatggttttttaaaattttcttcaagcagggactgccagttgtcatagacgccggcgtctttcatctcttctacgctgagcacgccgtcttgttgattgaaaagagggttcaccccgttgaatttaagggtcgcttttccgctaatgcctttgtaggtgcaggccgtttccagttttagtgcggtgtaggctcccttttccttgacgggaaacagcgtcggctttttgtcttccacatcgtcaaaggacactgcaggcaattgctccgtgataccgtgttctacgacgcgagcgatcagctctttgttgaccccctcattggctaaataggccagggactcggcgtagtaagaagcttgtttctcatctttttccgtgcgaatcaacaatagattgtcttcgatgcgagaaaaaatcaccaaagacaggaggctgatgatggcaaagataaatatcgccattaaggcgatggaaccgcggcgcctattcataggcccctcgcaaggcgacggttcgcttcgtttctttccccgcacgcaggcggatctctaaaaggtctccctttttctcgaaagtcatttgatccacatgcttcaatagaagggtgcggatgccctttgcaaggcccaatcgatttttttcgtattttatgtggctatgaaaggcgtatcgcgacagtatatcgccctcaaaaatgtatgtcacgactttatggccctcttcccctttttctcgaacgtaaaattgaacggcgttctcttgaatgcggtagacggcatcggcgccctgtagctcatccaccatgctgtttaaagcaaaggtgacgtcgttgtcgcgattcacacgctcggtgaagccggccgcgccgcgaagcccgctgaataggatttgacccaacagggcgataaggaccgcgccgatggccaatgccagcaagagctcaaggagtgtaaaggctttttttcggtcggagggataccaaaaggctctgccccgtcgtttcatcaagcacctccactctctccgtggctttgtcgtagtctgtaatgcgcacgcggattccctcttcagctttatcggcataggccatgtaggattccatggtattgacactgcgattcagcctgtctcgtttcgtgtcctgttcgtttaattgtttgaagcttccccctaaaaaggcactgagcatcatagtaatcaggccgataatggccgcggccaccatgacttctaataaggtaaagctagttttcttcattggctctctccattcgtatgcgtccgctcaccggggctacgatgagatgaaaggtgttcttgccaacgcgaaatgtggcggttccgctgttggaaggcctgcccgagggactgaaggcgaaatcgttgtgcttttccgatgtattcatatcaacgaattccaggtctttttcataagagacgactttttccttttcgtcgcagatcaccacgtaactgtcgccccggaagttcatgcgcgtgtgtttgcgcgtcatcatggcgcgctttctcagatcgctcaattcccctgccatggtatgaatttggcgttcagctttaaatcgccgaacgcctttcatgcccatgaccccgatggtgatgaggaccgccacaatggcgatgacgcaaatcagctccacaagggtcatggctttacatttagttttcatgggagagtatttgaacgtttcgaatggccatcgattcattcaccgaccccggatcgacaaagctgtagcggatttgcgtggcgcgaatcgtgccgtccatgccgtttaaggggaagaaaattcggaagaatccgtcgcccatatcttcttttcgaaggggcaacacttccttgctgttgccttcgagatcggccaggatcaggctgaaattgccttctgtctttgcaccggccgccacatcgatgctgaattcatagccgtttttcggcaggtagaatcctcctgtatccatggcgatgacgcgggcaatgggctcggcgccttctcgtttcggcgtatcaaatttcatttgcaaggcttgatagagcttgtctacgtcttttcccgtttgcggttccagcacgacgggcaggccgtcatccgtggtggccgacaagagacaatcgaagacggaataccgggtaacagccggtgccaagttgacggtatctttcgtcttcggcggcgtatccgattgaggcttcacttgcggttttgcctgcgccgcgggcttcggttgaggcacgggattcggtgccggcgtcgacgttgcgggcctcgtcgcagatggcgtcgtggtggttctcgatgtggagggatagacgggtcgccaggtggatgtactcgacgatgtgctgtggctcgagctcgatgtgctcggcggcggcgtaaaggtgctgccgcttcccggtgtagccgtcgtgtccggtgccgcaggggcggttgcttccggtgccggggtattgaatgtcttcgatgccaaggaattgtccacaatatcgtagggaatggacaggcgaatggtcgtcgtttccacattggatgggtctttattgtagctaatggaatcgatgtttaatttataggagacgccttgcagggtttccaaatactgactcaaggcatcggtggatccgctgtgttcgaccaccaagttcatgagcccggcattttcgccgtcgggcaccacttcttcgctggtgatctcaacattgggatccgaggccacgtcgtttgccacggcctgttccacatccgtttcttttaatgtggtttttttattggcaaaggccgcgccgtcgccttcttgggcgtgggcaacagaaggcatggcattgagcgccgctttaagggcttcctgttgcgccatgggcgcgtgaacaaaggcgccgtagccggtacccgatgccgctaaaatcagcaccgccgctaaagccgcctgttcttttttagaaaagtttccttcttttattcgattgattacatttttaatgtatggcttcatctcgctgtttcgctcgggaatgtcccctttgcgagaagaaaaaaagtcaaaattcacaccatcacctcttccgattattgtatcaaagggcctcgtgcctgtcgatggaatttccgtgaaaaacaataaaaagagcctgcacaaggtgcaagctctccttttaaaaaacagcattggcttttccgtaatcatatacggcgcgggcgatcatttcgtggccctcgggcatgagatgaatgccgtcgatgtaaagggccggatccttcggaataaccgaatccaagtgaaggccttgggccttttgattcagctctttcatcttctcttggagtgacacgatcatgttcattcccacaaagagatcgtcgtctacgatttcaggggtcggaggcaggataatcaccgctttggcgtttcgcccgcgggcgtaggcctcgagtttttcgtaagcccctatgacctgcgggacggttccttctccgaggagatcgttagcgccgcctaaaaccaacagcacatcgccttctttgagcacgggaggcatttgagaaagctctgtgatccaggcgccgttcatgcctaagttggcaatgggcttatccagtatctccgccagccgactgacccagcattgatcgaaatcgacgccgtagcccgccacataggagtcgccgaaggcaaagattttagtcaattttcttgctttcgatttcttctttcaattcgctgaggaaatcggcgaattctacatcgctgcgttcattgccgtcgcggtcgcgaacagagatctttccgctttccgcttctttttcaccgacgatgaccatgtagttgactcgttccatttgtgcgtcgcgaatcttcttgccgatcttttcattgcgttcatcgtattcgacgcgaatgcctgcatcggaaaattctttggtcaccttcagggcgtaatcttcgaatttttcactgatgggaagcactttgacttgtaccggtgcgagccacagagggaatttaccggcaaagtgttcgaccaaaataccgaagaagcgttccatggagcccatgagggcgcggtgactcataaccggttgttgtttttcaccgttttcgtcgatataggttaattcaaagctttggggcatttggaaatccaattgaatggttccacattgccaggtacgaccgatggcatcgcgcaggtggaagtcgatcttcgggccgtagaatgcgccatcgccttcattgatttcgtagtccatttccttgctgtccagggcttttctcaaggcgtcaatggccatatcccattgttcgtcagtacccatgctgtcttcgggacgggtagagagttcgacggtgtagtcgaatccgaaggtattgtaaagttcatcggctaagtcgataagcttaatgacttcttcttgaatttgcgaaggaagcataaagacgtgggcatcgtcttgggtaaaggtacggactctgaacaggccgtgcagggcgccggaaagttcgtggcggtggacttggccgaattccatgagcttaatggggaagtctctgtaggagtgcatggattgttcgtaaaccaaaatggatcccgggcagttcatgggcttaatggcgtagtcttcgccgtcgattttggtgaagtacatgttgtcgcggtagtgatcccagtgaccggagcggtgccacaagtcttcgtttaagatcatgggcgtcttaatttcgccgtagcctctttcaatttgcaggtcgcgccagaagcgttccaattcgtttcgaaccaacattcccttgggatggaagaaggggaagccggggccttcttcgcggaagctgaacagatccagttcgcggccgatctttctgtggtcgcggcgcttggcttcttctaagcgttccatgtattcgtctaattctttttgtttcgggaaggaaatgccgtagattctctgcagcatcttgttcttttcgtcgccacgccagtaagcgccggcaatggacgtgagcttcacggccttaatgtcttttacattttccaaatggggtccacggcacaaatccacataatcgcctaaagtataaatggcaatttcttcatcggcaggcagatcttcgatgagctcgattttgtagggttcatctttgaagagttcttccgcttcggctttggaaaggacttttcgttcaaagaccgggccttcttttacgatggccttcatttccttttcgattttttccaaatcgtcggtgctcaattgttcatctaagtcaatgtcgtagtagaagccattttcaatggaagggccgatggcaaatttcgtgttgggccacaaccgcttgatggcacaggccattaagtgggccgtggagtgccagaagatttgtttgccttcttcgtcttcgaatttaacgactttaatggcgccgtcttcgtcgataaaatcgtgttttcctaaaattacgccgttgtaaacacagccgacgctggctcgttccaagccttgggaaatatcggcgattaattccttgaccgatttcttcgaatcatattctcttgaacttccgtccggataacttactttaaacatcattcacctcaattaaaaaaaccgaccgccccaaaaggacgatcggtaccgtggttccaccttcattacttctcaaaacatgtaacgcctgttaagcgctgccgattaaggcagacgtccgggttggttttccacaaaattaagagctttcaccatcctctttcgctaaggctttgtgtactcgtcccttcattcatggtaagaagtatagcagatccctgttgcttttgcaactgtgtttctgcattatacctcacgctttaaaaatttgattatttcttccgggctcattgccacttcttcccctgttttcatgttgcggagcttgggcatgttgctttctacttccgcctgaccgaggacgatggcgtaggccacattcaggtgatcggcgtatttaaatttcttgccgatttttcccgattcgccgtagaagatgcagcgaatgccttcatctctcaaggtctttaacaagcgcaggccttcttctttcgtctcgtcgaagggaataatcaagcaggctgaagctgcatcatcgtagctttttaagagccccgcttcgtttaattggtaatagaggcgagacaggccaatggaaatgccgacgccgggcagtttttgcttggtgtagtggcccgccaaattgtcgtaacggccgccgctgcagacagagccgatggcagggtagtcgtctaaaatggtttcgtagacggtgcctgtgtagtaatccaggccgcgagcgattttcatgtcgggaatcatgtgcttatccgatacgcctaatgtgcgtgcgatggaaaagacttcttttaattcgctgacgccggttttaaattcctcgtcgtcgatggccatggcgtcgagggctgcaaacacttcgtcggtggtgccggaaatattgatgaattcggcgattttttcaacggcatcgtcggtcaagccgatttttgaaagctcttctttcaccgattccacgccgattttatccaccttgtccacgatgcgaagcacttcttgggagtcgctgacgcccagggctcggtaaaagccgtttaaaattcggcggttgttcatgtggatggtgaatgcctcaaagcccaagtcttggaaggtctttgcgataatcgaggggatttcgccgtcgttgaacaaagacagggagccgtttccgataatgtcgatatcacattggtaaaattcacggaagcggcccttttgtgcccgctcgccgcgataaactttgccgatgtggtagcggcggaaggggaagcttaaatcgctgtagtgttgggccacatagcgcgccaggggcacggtaaggtcgaagcgcatggcgatgtctgtggagccttttttaaaggcgtagacttgcttttccgtttcgccgccgcctttggctaagaggacttcctctttttccaaaaccggcgtgtcgatgggcaaaaatcccttttcttcgtaattttttcgaatgatgtccttcattcgattaaagaccaattggtctttgggcagaagttccataaagcccggcaatgtggacggttgtacgatctgtgtcattgtcctcctccttctattacaaacatggcgatggatgcggccacgttggcgtttaatgaatcgatggtttctttcatgggaatccgcaagcgcagatccacttcattcaatatgtcttcccgcaaaccatgggcctcgttgcccacgagcaagacgatgtctttgttttccccgtcaatggtcatgccctcgccgcgaatatccagggccacaaagcggcaatgctccttatagaccaatagctcttcgtctgacacataggccacgggcaagcgaaatgccgaggccatggaggcgcgaatgcacttgtcgttggtgggatccactgttccgggcccgataagcacgccgtcgaagcggaaggcttcggcggatcgaatcatgccgcctaaatttcccggatcttggatgccgtctgtatagaggaagcggcccgctttcggcaagcttttcgcctccactaaaaaactacggcaaagggcgatgatgccctggttgctctccgtggatgccagctccttaaacaagcggtgatccagcacggtggtttccaccgctgcgccctcgataagatcacggtgctcattgagcttgtctttatccacgataagctccttaacaaaaccttcagccagtacctcttcaatgaccacggcgccttccactaagagggcattggatgcattgcggtactttttgtccttcaactttttccacgactttaggcggcgattgtcttttgaatcaatggtcttcatcgcgttactcgtgttgaagctgctttaagtcgtcgtcgctaccgaagaaaataatgatgtcattgcgctgcaattcttcttctgcgacacgacggacgatcaggtctttgctccgacgaatggcgatgacattgacgtgaaagtctcggcggagttggagatcgcgaatgctctttcctatccatttctccgacacttcgtattcaatgatgccgtagtcgtcggaaagttcaaagtaatcggtaatgccgttgtccgtcagttgtttggcgagacgtatacccatgtcgatttccggatagattatcgtgtgggcccccaagcgttttaaaatatggccgtaacgcttcgtcggcgccttggcgacgattaaaggaacccccgcttccacacaggcgatggtggccataatggcggaatccaagctgctgccgatggcgatgacggcgcaatcgaaattgctcaggcccaaatcgtcgaagacatcttcatccattaaatcggcctgaatggccgtggtcacatcctccgacacgtacttcacccgctcgggattcatgtccaccgccaaaacgtcgttgtgcatatgatataaggtctttgccacggtggaacctaatcgaccgaggccaaagataataaaacttttaaccatacctctctcctatcccacgataaattttccttccgcatagcggaatttgcgcttgtgttctttgtgaaacagccccatggcaaaggtggtcgggccgattcgtcccaaatacatggtaaaagcgagaattaatttagacgaattcttcagcatcatggtaatgccacgggtgacgccgacggtgccgaaggcggaaaaagtttcgaataaagcgtccaacaactttacatttcccgcctcaaacatgacgacggcggaggcgacggtaaagaccaaagccaccccgatgacgaagagggagtaggcctttcgtacaatgtcttttcccacgcggcgatgaaacatttccgtatcgtcgctgccgcgaagactggcccacgtggccgccaagacgacggcgaaggtggtggtctttaatccgccggccgtggagcccggggaaccgccgataaacattaagaggcaactgccgaaggcggtggggtcggtggtggcgcccatgtctaaggaattaaatcccgccgtacgaaatgtcgtggactgaaaaaatgaagccaagagcttttcgtgtaagggcatggatgccaaggtgaggggattgttccactcgaataccgagaccatcatcgtcccggcaattaataaggcgatcgtagtgacgatgaccaatttcgtatgaggactcaagcggcggcgccttcggtagcgccaaagatccgcgtacacgacaaagcccaatccccctaaaataatcaaagcggcgatggtgagggtgatcaagaaatccccttgatagggcacgagggaatcaccgaacaggtcgaaaccggcgttacaaaaggcgctcaccgagtgaaaaaccgaaaaagcgatgccttttttcatgccgtaaagtggcacaagatgaaaagagagcaccaacgcccccactccttcgatggccaaggtcaagagggtggcaaatattaacaaacgcaccaaacccgttaagctgtcggcattgagctgctctcttataaacagccgccccgttaatgaaatgcgctgaccggtaaaaattgaaatccacatcagcatggtcatggtgcctaaaccgccgatttgaattaatccgaggataatgcatttcccaaagatcgtccagccggcggcggtgttgcgcacgatgagtccggtgacgcaagaagccgaggtggcggtgaacaaggcatcgacaaatcccgccgatgtgtgatccgccgaggcttgcgggagcattaaaagcaatgtgccgattgaaattaaaaccaaaaaggaaatggccaagacaaaagacgggttatgggaaatttttttctgaagacgattccgtaatttcacgctctactcctaaaataaaatacaccccacagggagtatccccatggggtgtagcacttattctcccttagctacttgaacgagttgtgcaaatgcatccgggtcgtgaatagccagttcggaaagaaccttgcggttaatgtctacattggctttttttaatccactgataaagcggctgtagctcatgccattcaaacgtgcggcagcgttgattctcgtaatccaaagtttacggaaatctctctttctttgctttctgccggcaaaggaatagctcatggagcgcattgccgcttgatttgctacgcggaataatttcgatttcgctccgaagtagcccttcgcttgttttaatacctttttatgacgacgctttgcgttgacgcctctttttactctagccatgtcttacctccccgattacggaatcatgttgtcgatgcgacgaacatcggccgtggaaaccaacgaacctttacgcagattccgcgttctctttgctgtcttcttgcctgttaagtgacctttgtaggctttgaatcttcttaatttgccggttcccgttctagtgaaacgcttggcggaacctctgtgcgttttcattttacccattgtattcctcctacttattctccgatttcgagcggaaaaacatgaccatgtttctgccttccatcttcggttttttgtctacttccccgtattccgagacaagttccgtaaattcatccaagacttcgcgaccgatttcggtatgacccatttctctgccgcggaaacgtacggcgacttttaagcggttgccgtcttttaagaaatccttggctttattggccttggtgtttaaatcgtgggtctcgatcttcggcgtcaaacgaagttcttttaccgtaatcgtcttttgtttctttttcgcttccttttctttcttcatcatatcgtaacgatactttccgtagtcaaggatgcgacagaccggcggcttcgccttcggcgcaatattgacgagatccaatttaaattcgtcagcaatggctcttgctttttcaatggatacaacacctaactgttcacctttcggatcaattaagcgcacttctttcgcgcgaatttctccattgatttgaatttctttaatgactaaacacctccataggcaacaaaaaaagcgggcacacaaagacccgccaaatgattggaacaaaaccttaaaaccattgtcgtaaggtgagaagcggacttcttcttcatgctcgactagtctatcaaattttacaagatgtgtcaagctttttctatttcagccaaaatatgatttagcttcgtttgaatcaaatccaccgccactttgttgtggcccccttccggcacgatgatgtcggcgtagcgtttcgagggctctacaaattgcaaatgagccgggcgcaccgtggccatgtactgatcgatgaccgaatccaagctgcgggcacgttctttcatgtcccgcttgatgcggcggagaatgcgcacgtcgctgtccgtatcgacaaaaattttcatgtccaaaagatccaagacccgcggttcggagaagagcaaaatcccttcgatgagaataatctccttgggctccaggcgaatcgtctctttttttctgttgtgcacggagaaatcatactccggcatctccacgcttttgcccgcctttaatgcctttaaatggtcgatgaacagctcgttgtcaaaggcaaaggggtgatcgtaattggtcttcacccgcgcttcgggcgataaatggctttgatctttgtagtaattgtcctgacgaatcacggtacaacgggcatcgccggtattttccaacaattgttcagtgacggtactcttgccgcttcccgatccgccgcaaatgccgattaagatgggtttcaatcctctaccttctttcgaatcatatccttcgcttccaccgggtggggaatggctgccgtaaatacctgccgcgccttgttggctacctccagaggcgtgcccgcctcatcaaccatgtcctcgatggtccaggtgaaatagtctttccccggcccgaaaacctccacctcgtcgccgacaaaaattcggttacgctgctcgatggtggcccgtttcgtctcggggtcgtagtctaagacgacgccgacaaaatcgtaatctttgatgtaggtcacgaaatcgctgattccttcaggccccttggcttccccgtagtaaaagcccgtggtgaaatctcgatgggacactttttttatctcttccagccaacgggggtcgtagcgataatttttcggatctgcgtaataggcgtcgatggccatgcgataggcccgtattaccgtggccaagtagtaggcgcttttcacccgcccttcgatctttaaggatcgaatgccagcttcgattaattcatcgatgtgttcgatcatgcaaagatccttggagtttaagataaagctgccttcctccgtagattcaatggggaagtattcccccgggcgattttcttccacgagacggtacttgtagcggcacggctgggcgcagtcgccctgattggcatctcttcccgtcatgtaattgctcatgaggcagcggccgctgtaactcatgcacatggcgccgtggacgaaggtctcgatttccaccccgtccacatccttttcaatggcgcgaatctcatccaaggtgagctctctggcgagcaccacacgttcggcgcctaaatcccgccaaaaacgcacggtctcgctattggtcaaactcccttgggtgctcatgtgaacgggaagcttcgacgccttcttcacccgcataaagatgccgggatcggcgacgattaccgcatccaccttcgcttcttccaaagcgtgaaggtactcgtccaagccgtcgaagtccttgtcgtgaggaataatgtttaaggtgacgtgcactttcctgccccgggcgtgggcataggcgacgccttctttgattttttcaatggaaaaatttttcgacgcctttctcaggccgaaggcttctccccccaggtaaaccgcatcggcgccatagtcgatggcggtctttaacttctccaaatccccggccggtgccaatagttctatcttatccatccaatctccttaataacaacaatccgtcgccgatgggcaacaccgtagccgataaatcgtgtgcatttaaaacgcgacgcaagaggcgtttcagccgcttcacgatggtgatttttcggcgcttaaataattttttcgacgcgagcataccgtgaaagaggacattgtccatgaggatgacgccgccttctgaaaggaggcgcaaactttctttcaggtagatctcatactgccctttcgccgcatcgataaatataaaatcgtagctgccttcatccgtttgaataaattcctcggcatcgccgacgattaagcggaccctgttttccaactgttgattttgaaaatgggtacgggcgttaatggcccggtccggatccagctccaccgtggtgatttccgcctcgggcaatgccttcgccatcatggaggcggaatagcccactgccgtcccaagctctagtatcttttttgcacccagaaggggcaggaagaaattcaaaaaattttccacctgcacatccacaatgggcacgccctcggcttcggcaaaggcgcgtaattcctttagatacccggtctgcggcggaagtagctccgccaaataggcttcgataaatggttctgttacgtgcatgagaaaaaagccggttaaaccggctattaaacatccataataatgggcagaatcatggggtttcttctcgtcttcttaaaaatgaagtttcttaaatcgtcgcgaatttgcgatttaatcgaagaccagtccttgatgttttgcgtcttgcaattttccactgatttcgtcaccatgtcccgtacgtcgttcattagatctgtggattcgcgaacgtagacgaagcctctggaaataatgtccgggcccgaaaccatttgaccggtttttttgttcatggcaataatggcaatgattaagccgtcttcagagagatgctttctgtcccgaagcacgacattgcccacatcgccgatgcccaaaccgtcgattaacacttgccccgcttccacatctttcacgcgacgggcttcggtcttggtcatctccaggcaattgccgttgtccatcatgaagatattgtttttgggaatgcccatcttttgcgccacttccgcgtgttttaacaagtgcttcacttccccgtgtaccgggataaagaacttcggcttcaaaagattgatgagcaatttatgctcttcttgataagcgtggccggagacgtgaatttccgacagggattcgtaaataacgcggacccctttgtccaaaagacggttgatgaccgtgttcaccgcattttcgtttccgggaatcggatgggcggaaagaataatcacatcgtctttggtaagctgaatgcgcttgtgctcgccggtggaaattcgggtcattgcgctcatgggttcgccctggctccccgtggtgatcaacaccagttggcggggattgtatttattcatgtccttaatatccacaatggtattgggcttcacttttaaatagcccagattttccgcaatgcccatgacatttaacatgcttcggccgcttaagaccaccttgcgattgtagcgctccgccgccgtaatgatctgttggatccgatacacattggaggcgaaggtggcaataatgatgcggttgttgcgcatcagggcgaaaaggcggtcgaaggtggcaccgacttttcgctcgctcatggaaaagccttccctgagcacattggtggattcgctaaacaaggccagaacgccgcgattgccgatttccgccaggcgatttaagtcgatgggatcgccggagatgggcgtaaagtccactttaaagtccccggaatgaaccaacacgcccagcggcgtggtaatggccaaggccgccgcatcgggaatggagtgattgacctgtacccattccacttcgaaaaacttgccgatttttaccggctgcttgtagctgacgtttaccattttcgtcgagcgcaggaggcgatgttccttcagtttgttttccaaaagcgccaaagtcagcttggttccgtacaccggtacattaatctgttttaatacatagggcacggctccgatatggtcttcgtggccgtgggtaatgacgatccctttgattttatgtttattcttaattaaatactgaatgtccgggatgacgatgtcgatgcccggcatgtcatcttcaggaaaggtcatgccgcaatcgacgacgatgagctcgtctttaaattcgatgacagtcatgttctttccaacttcgcgcaacccgcccaggggtatgatgcgaagtttctgtttattcttcattggcttctccttcttgtttccgactgcacttatcacagataccgtaaaattttaaattatggtcggtaatatgaaaatgcacggttttttctatttcttcttctaaatcgtccagtaagtctacattcacttccgtaatttcgtggcagatattacaaaccaagtggtgatgtttatgcttttcatcttcaatgcggcgttcgtagcgggtcgtgccgtcttcaaaggtgagtgcggttaaaaaaccgagggattccaacaagctcacagcacggtaaaccgtggcgataccgatttccggcattttctttcccgcgtattgaaacacttcttccgtcgtcatgtgttcgccttctctttcagcaaaaacctccattacgacttgacgctgtctggtaaacttatagccttttccttgcaagaattctttaaatgtattttccatggggcaccacctatattttttactgtcaccgatcgccgatagtcacactgaaatccctttatcaaagggacatttgatccaaatatgtttgcaaaatcaatacagccgccaatttgtccacgtgcttttttctgttttctctgcgcacgccaccttgcatcagcaccgcttcagcaccggatgtggtgagtcgttcgtccacgtaaacaatgtccatgtctagggcctcttttaaataatcggcgtaattcatggttcttttggcttgaaaacccaatgtattgttcatgtttttcggtaatccgacgatcaacttttcaacgtcgtacttgtcgataagcgccttcagcgcttcgacatcttccgccttcgatgtccgaataatcgtcgtcaccccttgagccgtaatgcctaagggatcggagacgctgacaccgatggtcttgttaccaatatcgagtcccaataatcgtttcattttaaatcactttaatgcaaaattccggacataccgtcgcacaatagccgcataaaatacacttgtcgtttaccacggcgcggccttcttgtacatgtatcgcatcttgtttgcagcgactttcacaactgccgcagccaatgcaataatcgccgataattaacttccgtttctttttcgaaacatcttccaatgccttttcgttttccttgccacgcaaaaaaagatccgcgttgtagtcgatttcttctttggactgcatgccgatcgcggtcgagtcaatgcagtcgatggacgaaatccactttaaagacgctctgttttctgcgattaagtggccgccgcccaaggctttcatggaatagatgccgatgccttttttgtgtctctcgcttatggcgttgagcatttcttccggcgttccgtcttgaatccccacgcctcttcgattgataatggggtgaatcacttcgatctcggggaaaagcgccgtggcattgacgcagccaatgaaatgggtggaaatgccgatggcacggataaagcccgcctgttttaattccaccaggcggtttaatgcgcctttgtggccccttagggtcaggagggactcctgttcgtgtaacatgaatatatcaaggtaatccgttcccaattcctccagcgctttttttacgctggcgtcggccgttttttcatcgtaacaataggccttggatgtaatcacccatgcctctcgcccgagttcttttatcgccccgtcgatgtaggcgtagttatcatagatttctgccgtatcaataaagttgatacccttttcgttggcataaaccaataattccgtgcctttttttaagggtaaattcgcctgaaacctcgaaaaggtcaacgagccgtagcaaagcggcgacacctcgatccctgttttccctaaaactgccataaatcgctcctaaaaatagaatagagatgagcccaagcccatctctaatcttcctttaaatagaatgtcagtaattctgacagaagttcgtcacgttcaatggattgaatgatactgcgcgcgtctaggtggctggttatataggtgggatctccggataatatatagccaataatttgatcgatgggatcgtatcccttgtcttctaacgcatgaaatacagtggttattcccgtgcgaatcttctcgctgtcgccattggttttctcgaatatatgcgtctcaaactgattattgtccatataatctcctccataagcgtattataccataaattccatcaggggacattagtttcctatggcatttacaatatcttttacccgcgccatggcctcttcgactttgcttgcatctttggcaccggccgtggccatgtccggacgaccgccaccgccgccgccggcaatttttgccacttcgcgcacgatgtcgccggctttaaagcctttttcgattaaggctttgggggacgcgctgacgaagtttacttttccctccgaaacagtggatagtacgatcagcgcgctttccttatcccgaagtttttcagccatgtttcttaaatcttccacgctcacgtcggtgaagtgaccacggatcacattgacgcctgagatggattccacttcgcccacttcttcggccattttgctcttggccatgtcggcgtgaagcttcgtaagttctttttccagtcctttttccttatccaggtgttgaaccaatttgtcgataaccacatcgtcagtggcctttaagaggccggcgatttttttgttgatggccatggagtggttcagcaattgatataccgcggggccggtgacggtttccatgcgccgtaccccggcggaaatgccgttttccgaaaggattttaaataaaccgatttgggccgtgttatccacgtgggtaccgccgcaaagttccttggaatagtcgcccatggacacgacgcgcacttcatcgccgtatttgtcttcaaagaggccgacagcccctgcgtttttcgcttcgtcgtaggaaagaatttccgtcttgacgggcagggatttgaaaatttcctcatttaccgcttcttcaatggcttgaagatcttctttcgagacggcttcgtagtgggtgaagtcgaagcgcataaagtcggggcctacataggagccggcttgattgacgtgatcgcccagtcggtctttcagggctttgtgaagcaagtgggtgacggagtggttgcggcgaattttttctcttcgcatgttgtccacggcagcatcgactttgcccgctgcggcaatgccttcttccaccgtacccacggcgtagatgtggccggttttcgttctttgggtatcttccacgcgaattttaaatccgtcgccggtaatggttcccgtatcgccgatttggccgccgctttcgccgtaaaatggcgtcggcgacaaatagaagaggcctttttctcctgcgcctaattgttccacctcttcgcctttagcgaggatgtgcaaaagcttcgcctcggtgacttccgtggtttcgtagccgacaaattcgatggcttcgtccacgtcgttcaattcgaaagaggaggcactggaccatccgatttcgtcggaatcgtctctggcttctctggcccgcactttttgggcctccatttccttttcaaatcccgcttcatccaggctcatgcccgcttctgagagaatttcttccgtaaggtctaccgggaagccataggtgtcgtatagtttaaaggcttcggcgccggaaagctccttcttgccttcttcttttaattttgcgatttcttcatctaaaaggctcatgcctgtttccagggtctttaagaagcgctcttcctcccgcaaaataacgcgggcgatgacttcgcgattgtcgtctagttctttgtactgcaccttccaggaatcgatgacgctttcgcaaagtttgtacaaaaacgctccttcgatgcctaaattgcgtccgtgtttggcggcacgacgggtcaggcgacgttccacatagccccggccttcattggagggcacgatggagtcggagatcataaaggtaatggcgcgaatgtggtcggtaatgacccgcacggattcgtcttttttcttgtccgtgccgtattcataattggccatggcgcaaatatcttccaaaatcgcgtgaatggcgtcgatttcgaaaatattgttggcttcttgcagcaccgatgcgatccgctccaggcccatgcccgtatcgatgttgggattggccaggggatggtattccccttcttcgtctttatcgaattgggtaaagacgaggttccacacttcgatgtagcgatcacaatcgcaacccggcttgcagtccggatcgccgcaaccgtgttcttctccgcggtcgaaataaatttccgagcagggaccggaggggcccacagccagttcccagaagttatcgtccttgcccaagcgcacgatgcgttctttcggcaggccgatttcttcgttccaaatggcaaaggcttcgtcgtcatctaaatagaccgtggcccagagaaggttcggatcaatttccaggacgccggttaaaaagccccaagcccagtgaatggcttcgtgcttaaagtaatcgccgaaggaaaaattgccgagcatttcaaaaaacgtggcgtggcggtctgtttttcccacgttttcgatgtcaccggtgcggatgcatttttgcgaggtacacacgcggtgggagggaggttccgcttctcctgtaaagaatttcttcatcggcgccatacccgcaccgataagaagcagggatttgtccccttgcggtactaaggaaaaactgggcagagccaagtgttcgttatgttcaaaatagttcaagaacgcggagcgtatctcgtgtaatcccaatggtttcataatgcctcccgatatttgtatagtctctgtataaaattataaagtcgtacggggcgaaagtcaattttcttgcaccgtttcgccgccggcgaaaaagaaaataagcggcagataaaccgccgcttattgtacttttcttaattcttcttttttcctcttgtcttcccttaacttcatcatgacgaagtttttcaaaataaccaatatggagaagatgggcacggataaaatcatgccgatgacgccgaatgtgccgccgccgataaagatgcaaaggagcaccatggccgggtgaagaccggtgcgcttgcccaaaattttcggtgcaaacaaattgttttcagcccattgcagaaagaagaagagcaccgccacccaaatggccttggtccacgaatccataaaggagaagaaaaaggccggtacaaaggcgaggaaggggccgatgtagggaatgatgtcggcgatcatggtgatgagcccgatggccacggcgaagtttacaccgaggataaagagcatcaacatggtcatgagaccgacgataaaggcgaggagcaatttccctttcaaaaattccatcatggccgaattgatttcgccggccaggtttaaaatgtccgagcgataattcaggggaatggctttgtacattttgaccttgatgcggtttttatccaccgtaaagtagtaggtaagaatcaaaaccaaaacaaaggtgacgatgcggcccaaggcggcgtacatgccgcttgccatggagcgaatctgatccaggaagctgttctccagggaattgacataggcttccacctgtttctgcccgctggacatgatccgcgacatatctaaattcgtcatcttctcgatttgatcggatacatcgagaatgcgggcgttccactcgttgagccactggggcacggcgataaataaattcctcagctcttcaatggtcttcggtaagaccacgacaaataagagcaccaagatgagtataaagcccacgtaaacgattaaaacgccgaggcgcctggaaagccgtttcgtctccagataattcaccaagggattaataatgtaggcgagtatcacggaaatggccaaggccgccagggtcgtgcgcacgacgggaaatttcgtaaacacgtagcgcatggcgatcagtgccaaaattccaagaaggatgagcccgacgatttttaaatccacgtggatgcgccggctcttgtcgatgtattggttgccgatattgatgagataataaacgcttagcgcaatgagcaaaatcagcaatagcccccgaactgccacgaggaaattcggggtcactacattaaagaaggaatcaaactgattcataggctacctcatatccgccagggacatggaatttaaaacgccgtccacttcgtcctgtatgcggtctaaaatggatttggctgaacaggccacgcctcgctcacaattgatttcttcatcgcctgtgcagcaggaaaatgccatttcaccttcaagggccgcgatgacttcgccgatggcaatgtcttccggcggcgaggccaatacatagcccccttgggcgccgcgaatgctttcgactaatttacgtttttttaagcgtgaaaacagttgttccaaataggccacactaaggccttccgcctcagcgatgtaattgaccgaaagcgggcctttgccatagttttccgccaaatggtacatggccatgaggccgtaacgacccctcgtcgataacttcatgtcttcacctccttaattcctagttgttttctatgaataagatactccattcaccctatcctgtcaaactacttgacaacgacattcaagatcttgccgggaacgtaaatttctttgacgacggttttgccttccgtttgtttagcgaagttttcatccttatgcatggcttcgatggcttcttctttcgttgcctctctgggcaatgtaatcttaaagcgtaccttgccgttgaattgaacgggcacttcgataacatcttccagggtttttgcttcatcgaaggtgggccagctttgttcgcacaggtagccgcccattttacacatatcccaaagttcttccgtaatgtggggtgccacgggatttaagagaatgaggaatgttttaaattcagccgcattcacgccgactttttggaagaggttcacggcactcattaattgagcgatggccgtgttggcttttaagtgttcgtagtcgtagctgactttttggatcgtttgatgcataaagacttccgtctcttttctgaatgcatcgccgggttgaacattttccgccagattccaaactctttccaggaagcgacggcagcctttgacgccgttgtcggaccagggcacggatttttcgaagtcgccgataaacatttcgtaggttctcaatgtatcggcaccgtaggtgttgacgatgtcgtcgggattgatgacattgccgcggctcttactcattttgccgccgtcttcccctaagatcatgccgtgactcgtccgcttttggtagggctcatcggtgttgacgacgccgatatcgtagaggaatttatgccagaagcgggaatagagcaagtgcaaggtggtgtgttccatgccgccgttgtaccaatccacaggcatgaagtattccagcgcatctttgctcgccagtgcttcgtcgttatcgggatcggtgtagcgcaggtaataccagctgctgccggcccattgaggcatggtgtccgtttcgcgcatggcgggcttgccgcatttcgggcaggtggtgtggacccattcctctacttccgacaagggggattggccgttgtccgtgggttcgtaattttccacttcgggcagttccaaaggcagctcttcttcaggcaccggcacccatccgcagtcgtcgcagtgaatgagggggatcggttcgccccagtagcgttgtctggagaagacccagtcccgcaatttataattggtttggcgattgcccaggcctttttccgtaatccactcgatcatcttgtggatggcatcttccacttccatgccgtccaggaagccggaattaatcatatggcccgtatggacgtccacataggccgcttcttccacattgccgccgtcaatgacggggacgatgggcaggttgaatttcttcgcaaattcccagtcgcgctcgtcgtgagcgggtacggacataatggcgccggtgccgtaggtcattaagacgtaatcggaaatccaaatgggaatctccttgccgttggccggattgacgccgtaaaggccttccagggccacgccggttttttctttagacagctccgtccgctcgaagtcggatttcttttccacttccgcaatgtaggcgtccacttcgtcgatgtttttaatcatgtcgcggtggtcttttacaatgggatgttccggtgcaaccaccatgtaggtggcgccgaacaaggtatcgggtcgcgtggtaaatacattcaataccgtgtccgtatccttcactttaaagtgaatttccgcaccgacgctcttgccgatccagttgcgttgttgaatcttaacaggctcgatgaagtcgacgtgattcaatccttccaagaggcgatcggcataagcggtaatcttcagcatccattggctgcggcgtttgtgctttacttccgtgccgcaacgctcgcatttgccgccaaccacttcttcgttggccaggccaactttacaggagggacaccagttgacgggcatctcttccttgtaagccaagccgcgtttaaacaattgcaggaaaatccattgggtccagcggtagtatttcggatcggtggtgttgatttctcttgaccagtcgaagctgaagcccaggctttttaattgctttttgaaattggcgatgttattttccgtgacgatgcggggatgaattttgttcttaatggcgtagttttccgtgggcaagccaaaggcgtcccaacccatggtgaaaatgacgttttcgccttcgtggcgacgctttctcgccacaatgtccagggccgtgtaggggcgcgggtggccgacgtgaagcccttgtcccgagggataggggaattcaactaagggataaaactttttcttttccggttcaatgacggttttataggtctcgtgttcgtcccaaaaatcttgccatttcttctcgatgactttaggatcataatttttcatcgtttacgcctttctaaaactctgcattgccgacggtccgcgggaaggggatgacgtcgcgaatgtttttcatgccggtaatgtacataacagctcgctcaaatcccagtccgtaaccggagtgaaccacgctaccgtagcgacgaaggtccaaataccagctgtagctttcttcgtccagaccgaaatcctttaatttttcgacgaggacatccattcgctcttcccgttggctgccgccgatgatttcgccgatgcctggcaccaaaaggtccatggcggcgacggtcttcttgtcttcattttcgcgcatatagaaggccttaatttctttcgggtagtctacgatgaagacgggctttttgtaaacttcttccgtaatgtagcgttcgtgttccgtttgaagatcgatgccccagttcaccgggtacttaaattcgtgatcgctcttttccaaaatctcaatggcttccgtgtaggtgatccgaacaaattccgattcaaccacatttttcaggcgatcgataaggcctttatcgataaaggaattgaaaaattccatttcttgaggcgcgtgttcgaaaacgtagcgaataatgtacttaagcatatcttccgccacattcatattgtcttctaaatcggcgaaggccatttccggctcgatcatccaaaattccgccgcgtggcgttgggtgttggagttttcagcgcggaaggtgggtccgaaggtgtagatgtttctgaaggcggtggcgaaggcttccccttgcagttgaccgctgacggtaagattcgtatgtttgccaaagaagtcttcactgaaatccactttgccttcgtcgtctttcgggggattgttcagatccaaggtggtaacttggaacatttcccctgccccttcggcgtcgctggccgtaataatcggggtgtgaacgtagacgaagcgacgtttttggaagaactcgtgcacggcaaaagcgattaagctacgcacccggaacaccgcttggaaggtattggtgcggggacgaaggtgggccttggtccgtagatattcaaaggtgtggcgtttcttttgcagaggatagtcactttctgccaagtgttccggcgtgatttttttcgcgtgaatttcaatgggttgttttgctcccgggctttcaaccaattccccttccacgcaaatggagctgtaaatagggtatttggcgatttccttaaagttttcgatgtccgattcataaaccacttgaatgccgtcgaagccgctgccgtcggagagttgaataaagccgaaattcttcgaatctctggaggttttcacccaaccttccaacaccaaatcttggcctaagtaatctttatagttctctaatacttcacgaatttccactggtatcctcctgtttgatctctcttaaataagcggcgagctttttttcgtagcctctttccgtcggtcgatagtaggttttttcgttcatatccaagggcaggtaccgctgcggcacatagcccgtggggtaggcgtgtgggtagcgatagccttcgtgtggatccatgggctgatgctgatcccgcaagtaaggcgggatcacagagcccacgccttttttcacatcactcatggcttccccgatggccaggtagctccgattgctcttcggcgccgaggccaaataggccgccgtttgcgccaaggggattcgcccctcgggcatgccgatgattcgaagggcctcgaagcaggcaacagctaaatttaacgcgtggggatccgcattggaaatgtcttccgaagcggaaataatcatgcgccgggcgatgtattccggttcttcgcctcgatccagcattttcgccatataataaatggccgcgtcgggatccgagccgcgaatggattttataaaggcggatatcgtatcgtagtgattgtttccgtctcggtcgtaggcttgattattcgtcatagacgcatcggccagatcctgtgtcgtaatgtggatgcgccccgcctcatccggcggcgtgctcaataccacaatctctaaaagattcagggcgtatcttccgtcgccgtggcttaaatcgatgagcccctccaatgcaccggcctcgaaggccacctcttcttttccgtagcccttctcgtcgtcactaagggcccgcattaaaagtgctttgatggcatcgtcgtctaagggatagagctgcaccacctgcaatctggaaagcaaggcgccgttcacgtagaaatagggattttccgtggtggcgcccattaatatgatctttcccttttccacataaggaagcagcacatcttgttgggacttattgaatcggtggatttcatctaaaaacaaaatcgtctcccgaccctgtgcccccagcctctcctcggcctcttccagcaccttgcgaagctccttcacattgcttgtgacggcagataagggcacgaaggcccgatgggaatccttcgccatgatctcggccaaggtggtcttaccgatgcccggcggcccgtaaaaaagcaaagagggcataaagcccgatgccatgagcctgtgaatgtatttgcccgggccgatgacgtgttcttggcccacgtaatcctcaagggtttcgggccgcatgcgctgggccaggggcgcgcttttttctaaatgattttccgcttgaaatgaaaacagatccataacaatcagtccgttttcttttgccgcaacgcttccagctccgccatgaagctgtcgatgtcttggaaccggcgatacacagaggcaaagcggacataggccacttcgtccaaatctttcagccgttctaaaatcatttcgccgatttcatccgatgaaatctgcttgaccatcttcgcttccagcgtcatttcgatatcatccaccgccgcttccatggcttccaaaggcacggggcgtttctcacaagatttaatcagcccttttaagattttattgcgatcgaagacctcgatgccgccgctttttttcttcacggtcatgggcacgacttctacctgttcataggtcgtgaatcgtctgccacaggccatgcattgacgtctgcgccgaatagaggcgccttcttctgtgggtcgggaatccacgaccttcgattcttgatgttgacaatagggacagcgcatgattcacctcctaaacgagaaaagacgtatcctgaaggatacgtcaaaaatctcttatctcattctgcgaagaaaatccgggatatttaactcatcatccttatttttcttggcggatcctgttttttcttcttttttatcgtcgcctgatccgacaaagctcttgcttgtttttttcggttgaacatcgcgatcatcgccgaattccgtggcgatcaccgtgatctttacttgatcctttagggactcgtcgatgccggcaccgaagataatgttggcttcttcgtctacggtggagcggatcaaatcggcggcttcattcatttcaaacatacccaggtcgttgcctgccgtaatgtttaatagtacggacttggcgccttcgatggatgtttccaaaaggggactttctacggcatttcttgccgcttccgtggcgcgatcgtcgccggaggcgtaaccgatacccatgtgggcgatgcccttgtcgtgcataacggtctttacgtcggcgaagtcaaggttaatgacattgggaacgctgattaattcggaaatcccttggatcccttgtttcaaaatttcatcggccatttggaaggcttgggagaaggtggtcttcttatcggaaatgctgaagaggcgatcgttgggaatgatgaccaatgtatcgactttgccttgtaatgcatcgatgcccttttccgcttgtttcatgcggcgagcgccttcaaaagcgaagggacgggttacgacgccgaccgtaagggcaccaagttctttcgctacatcggcaataatcggagccgcaccggtaccggtaccgccgcccatgcctgccgtaataaagaccatgtccgcgccttcgagggcttctctgatttcatccaggctttcttcagcggattgttcgccgatttccggattggcgccggcgcctaagcctttggttaccttttcgccgatttgaattctcgtttcagccagggaatttttaagtgcttggcggtcggtgtttacggcaataaactcgacgcctttcacccctgcattaatcatgcggttgacggcgttgttaccgccaccgccgacaccggctactttaatttttgcaaattcttcgtgatccatatcaaaatccaacatattactcctcctagtcgcgcacaatgggcctttaatatcatatcaattgattctattttatagacaaatagcctacaagtcaagatgccttcacggctcaatctaccttattcagcggcatctgtggctttcgacggttctcgcttttcatcgttgcgggcatcagggtctttttcggtttttttgactttgccgccttcatcccttttatctctttccgcctgcttttccccttcttcttcgaaggaagcttcattttccggcgcctcctcttcgtctaaagacgagggcttcaccgccaccggatgatccccctgatccagatagatctcgcggtagtcttcgtttttcgccttcatttctttgcggatttcttccagctgtttcgtcttatattccgcatcgtcaaaactggagatatgcaccatggttccgtcggaaaaagccacgcgcataccacgatccaaaatggagacggtgtgaatgtctttcttcatttcggaggcaaacaaggtcttaatcatgtgaatcttttttccgttgcccgtgcttttaaaggccacttggcccatgcgcaccccatgggtgacgacgccggtgatcttcggcaaattgggatcgtaggagcgggtggtctccagggcgcggaaatcatcgttgacgagaatgtagccttcgccgctgtataactgggcgaagggcttttcctcttcgatggaaatggtgagggtatgaggaaagctgagcccgatatgggcctctttaacatagggaatttgttccaggcgatttttcagctgctgcttatttaatcggaagtagcttttgcccatgaattcgcgggcgattttcactacggtgtttttgctcacggctttcgtgccggcgacttccacgtctttcatggccgtaaatctcgaaaagccgaagaggccgccgatgatgatggctaaaacgagaaccagagcgatgcgccgattgcggtattttcgctgcagtttcttttttcgccgcggacgttttctcggtttttcaggcttcatggcgtcacgagtcctaaaatcgcctcggcaatggcatcggtgcccttggtgttgaccatgtggtaggcgttggcgcccatttcacgccgcttttcctcgtcgtctaaaagggattccaccgtgctcaaaagcacgtggcctgtgagctcatcttcttcgatgaccacggccgcacccttttctttatagctcatggcgttatggtattggtgattgcccgccgtgtatgctttaggaatcaaaatggagggcaggtgcatggcactgatttccgccaaagtcatggccgatgaggatgccaccaccaaatcggctacggccaagtattccgggatttgatgggagtaatccaaaatggtgtaagaatcttcgtccacatcgctcatgcgatgggtgaagtcgtcgtaatgttcttttcccgtaatatgcaccaagtggaagtttaagtgcgggtgtttttccatgatttcaagtacggcttcattggtggattcctgtccgccgctgccgccgaaggaaaggaccaggggcttgtctaaattgtagcctacggcttctcttcccgtctcttcgtcgattttttcaaaagaggcgcgaatgggattgccggtgtaaagtttttttgtatgttccggaaaatatttttccgcttcttgaaagctgtaggcgattaaatccacccgcttggcgagcaggcgattggtttttcccggataagcgttttgttcctgaatcgccgtcttaatgcccatgttctgtgctttcaacacgatgggcgcacagacatagccccccgtgcctacgaccacatcggggcgaaagtcttttataatctttcccgcatcgcgcaggccgtggaacaattccatcatggtcataatggattctttgttgattttctttctgggaagaccctggatgtgtaccggcgcaaaggggatgttgtatttggccgccagctcttcttccatgctgtctttttttcccacgtacagaaattcgatgctgtcgtctttcttttccatggcttctttaatggcgagggccggatagatatgaccgccggttccgccgccggacaaaatgactttcaatgtaattctccttttctcgataatctaagcagtatgccgctcatgcccatgaccaagatcaatgccgtgcctccgaaggacacatagggcagggtaaggccggtgacgggtaaaatccccacggccacgcccatattgaaaaaagcctggaagccgatggagagaaagatccccgtggcgatgagtttttcgtaaaggcttttttgcttcaacgccgttaaaaacccgcgatgtataaacaaggcaaagagggcaatgactaccgtggtgccgataaagccgaattcttcgccgatgacggcaaaaataaagtcgttgtaggcctccggcaggcgatcaaacacttcgtgggaacgaaaatagccgatccccgtcaccgatcccgtgccgatggcgtaaagggaatgggccagttgccagtcggtgttggtgatgtcgtcgaagggatgaatgaaggatgtcagtcgcttcatgcggtaggccacgcgaaatacaaaaaggtacataaaggcgaggcccatagaaaaaatgctgataaattcggcgagattcatgccggagataaaaaacatgcctaaaaggctaatggcgatgaccatggccgatgaaaagtcttctttcataacgatgaccacggacagcccgatcacggtgacaatgggaataaagccgcctttcttcctctttccccggtgaagcacgcagagattcgccgtgtaaaaaatcgacgcgtattttaaaatgtccgccggcataaactgaatgtgggtgtggggaatggcgagccagcgggtggcgccgttgacatttacgccgagtttggtgtagagggcggcgcaaagggccatactcacgacccacatgggaaaggccaggcgctgaaatacctttaagggcacgacatagcccgcgccggccgccaacgtgccgacgatgacaaaggcgatgtggcgctttaggtaaaaggaaccgtcgccgtggtcggcgaggccgccggtaaatgagctggacgccaccataaagatgccaatgaccaagagggagaccatggcaataagcaggcgcggatcagcgtattttcggattcgttccatggttttatcagccccatttctcccttacaatttgtttaaattcatcgccccgcacttcgtaattggggaattggtcccaagaggcgcaggccggagaaagcaacaccgcctcgccggaaaccgcccgatccatggccgcctccgtggcctctttcatggtctcaaattccaagacctctttcacgccggcttccagggcttcttctttaatgacagccttggtggcgccgtagacatagaggcaggcgatggcatcggcgtgtttttcaaagagggctttaaaatcgcttcccttgtcaaagccgccggccagtaaatgaatgggcttcgataaacttgccagagccacgtcggtagaatcgggattggttcccttggagtcgttgtagtagtctacgccgttaaaggtgtccacaaattccatgcggtggctgacgccgcgatagttcatcagcgtctttttaatggattccacgtctacgccgagaacgtaggcgcaaagggccgcctccagggcgtttcttacattgtgatcccccacgagcagcatgtcgctgcgattcatgagaaagaccttctccccttttagggacaggtacagggcctcttgatccttgaaggcaccgtcttgttggacgggtgtggtgcttaccaccagcgcctgatccatttcttcgccgatcatggctaagtaaggatcgtcgatatttaaaatgagtacatcctcatcccgttgattggcaaagactttttctttgctctttctgtaggcttccacggatttgtggtgatccaggtggtcttccgtaatattggtaagtatcgccactttcggccgaaaatccaaggtggtttccagctgaaaactggagcattcgataactaagtaatcgtctttttttgcccgcttcgccaagggcaagacgccgacgccgatgtttccgcctacataggcgacttttccgccgtcgattaaaagatggtacaagagatccgtggtggttgtctttccgttggttcccgtgacggcaatgaaattttcgcaagcactcaggtgataggccacctcgatgtccgaaataatcggcacgcctttttccgccagggcaggcaacaggccgctgtccaggggaatccccgggctttttacgacgaaatcaaccgcttcgccgtcgtaaaagggcaattcgtcttcgactaaatccacgcggcttttgtcgtcgtcgtagacgtaaagggtattgtccgccttcaatgcgtcgatggcgcttaatcctgtggtacctaatccgtaaattaatatgtttttattttccatgacacgctcctaaaaaatcaagaagtaacttatgatgcaaaggatcagctccaccaccgcaaacatggcgacgatttgcacttccctcatccccttctgctcgaaatggtgatgaatggggctcataagaaaaattcgctttcccctcgttttaaaggagatgacttgtaaaatgacggacagggtttcgataaagtaaatgccgccgcaaatgggaaggagcaggggcaggttcaaaaggatggcgatggcgaccacggcgccgcccaaggccagggagcccgtgtcccccataaatactttcgccgggtatttgttgtaaaacaaaaatcccaagaggccgccggctaaagtcaagctgaataaggcgatggcatatcgtcccattttggcactgactaaggcgaaaaagagaaggagaatcgtcgttaccgtggaagacaggccgtctaagccgtcggttaagttcacggagttcaccgtgcccacgacgacaaatataataaagggaataaagaacatgccgaaatccacggcgcgcatggtccccggaaggagcacggcggtggttaaattgtcggagcgaagaataagaaaatataaaagcacggcgataaaaatttgtgccaggagcttttgcagggccgtaaagcctaaattccttttattgaccactttcaggtagtcgtcgataaagccaacgagggcgaagcccagggtggaaataaacagcacgaccacttcgtaggtcatatttttcgtaagaagggtcccgagaagggccgccgtgagaaagatcaccccgccaatggtgggcgtacccgccttggacaggtgactttgggggccgtcttctcgaatttcttgtcctgcgtgtaatctttgtaataggggaatgaaaattttcccgccgatcatggcgagaatccatcccgtcaccaggctgattactcccgtgactatactcatgcttgccttctcctttaattgctatggccctttctgcgggctctgttcgtcttttctttcgttgcggtattcccgttgtttgtattgttttgcttgtcggatttcttgtcattgacatcggcttcaaatcgaatatggattttttcgcccttaggcaaaatctcgccggccaggggctcttggctcaccaccgtgccttccccttccagtacatagtccaatttggaagactccagaatcttttccacttcttttttcgtcttcccttggaaattgggcacactgcgctctttcccgtcgttgggatcgatttttaaatccacaatggtgttttcgtccacttccgtgccggcttccggtgcctgtttaatgaccatgccgaagtcgccgacattttcagaggccatgttgaatttaagtccagcatcggttaatacctttccggcatcttccaaaagcatgttctttacatcgggcacgatgactttcttcacttttttcgattgatcgctgcctgtcggcgtcacgtccccttcctgcagagccgccgccataatttctgatgcgatgggcgccgctacggtgccgccgaagtaatccccttcaggttcttccacaatgaccagtaccgtgtacttaggatcttcgatgggtgccacggatacaaaggaactgatgtatttatccttttcgtagccgccggtatccgataccttgcctgcggttccggtctttccgccaacatggtagcgattcaccgcacccatggtgcccgtgccgtgatcgacgacgtgcatcaggagggtgcgcatggtttcgctggtggattcgctgataacctggcgacggacggtgcgtccttgttttaccaggacattgccgcttacgtcttgaacttcatcaacgacgtagggctttaagaggtagccgccgttggccactgcggaaatcgccgttaccatttgaacgggcgttacggcaatgccatggccgtaactcatggtagcgagacgcgcctcgttgatttctttgacgcttttcgggacgatgcctttttgttccgccggcaagtcgattcccgtcacttcgccgaagccgaaggcttgaatgtatttaaatagtccttccttcgaaagctctctggcgatgtttacaaaggtcacattacaggattcggaaaaagccttgtccatggtaatgtccccgtggggattgggaagggatgtacaggtaatggttacaccgggaatgtcgcggacatagcccgtgcagtaataatgctttttcggattggtggtgttttcttccagcgccgccgcggccgtaatggttttaaaggtactccccggctcgtaggtgtcgctgacggaaaaattccgccaattgtcgaataaaattttcgcctgttgctcgctttttaaatccttccatacagccttttgctctttcgtcgtggggctgtaggggtgatttaaatcgtaatcatcggtggaggccatggcgcgaatggcgccggtttgcgtatcctgcacgatggccgtcatgcgatgggcgtgctttttttcttggtgggtatctaaacaatcttccacttttcgttgcaaagattcggaaatggtcagctttaaattggcgccggcctgaatgggcaattgattgtttgttttcttgccgaaagttggcgcgaggcgcaaaacatcgtcgtaatacttttcgatgccatagcggccgtctccgtcttttgccgcaaaaccgatgaccaaagaggccaagtcgttgttgggataggtgcgggcttcgaaatcttccaccacgacgccgggtatgtcggagtctttcaggcgcaaggccacggagcgctccacattttgcttcaacggaacgtggccgctttttttcatgcgcgcatcaaattgcgcctcggtcatatccagggacttcagggcgaagcgtttcagcttctgcacttccttctccctgtctttcgctttcgccaacaccctcgtatctacatagatgtcggatttgctgatgttggctgctaatttatttccgtcggcatcaacaatcaagccccgctcaggctttaccacgccttttgtcgtcgatgccagggcttggcgcgttaaattatcggaatcgaaaatttgcaaatagcctacgcgcaaccacaaaataaaaaagagcaagaagagaaacgcatatagaaacgccacttttctgtccatcttccgaagatggttcaaaagaaatcgacgattcctacttctcttcctcactcttttcgtttgtttcctattctgctcccccacaagagcctcccactatttatttaaaaatgtgcagtaccgagatcatcggattcaggtagacgttttcgttgacgtcattttcttcgttgcgtaccttgacgtcgatgtattttacctgatcgttatcgggatagaccatcccgagctgaaactttgcttttttcatcatctcgtctgaattttttatttcatctaagtcggcaatcatgtccctatgggttttgtccatgtcgaccaaggccttgttctgtgtttctatggccgcatttaaaagggcgatatgcgtatgggccttcagctgcaaacaggcggttatcccgagcatacaaagaatcatcccgataagggccgaacgggaaacccacttccgcttctgccctttcgcgggccgccgccggggacgtttattttcgactcgtttcattataacactccccttaaattttttcagctatacgtagctttgccgaatgggcccgatgatttcgctttaattcttcatccgatgctgtcacgggctttctggttatgatttctatttcacgcttcttgccgcaggtacaaatgggttgcctcggcgggcagatgcaatctttatacagatactgaaagctgtttttcacgattctgtcttccagggaatggaaggtgatgattcccagccttccgccgggctttagaagacgaaccatgtccggaatggaagattccaaaacgtccagttcccgattcacggcgatgcgcagggcttgaaatgtttttttcgccggatgaccgccctcttggcgcacttttttcggaatggccttttttatgaccgacaccagttggaaggtggtggcaatgggcgcctcttttcgctcttttacgataaattgggcgatgcgctcggcccaacgctcttccccgtagctctttatgattttcgccaggtctttttcgctgtaggtattcacgatgtctgaagcccttaaggatgcgcttgtatccatgcgcatatccagaggcccgtcgaagcgataactgaatccccgctccgccgtgtcaaattgatgggagcttacgccgatatccagcaaaatcccatctgctttttcaatatgtaaagcctttaaaatggccggcatatcgacgaagtttcccttcacaagctgaaaatttccgccaatgctctccaggtgctttctcgcagccccaagggccgcgtcgtcttgatcgatgccgatcaaaaggccgcctttaagccgctttaagatttcgccgctgtggcccgcaccgcctaaggtgccgtcgatataaatgccgtcgggatgaatctttagcccctcgattacctcgttcattaagacgggctcgtgttgaaattccatgttccctcctaaatgccgagatcggataatttttgggcgatttgatcgtaagacaatgcgtcgtcgtcggtgtagtcgttccaaagggtgtcagaccaaatttccatgcgagtgccgacgccgataatcaccgcgctaccgtctaatttcgcataatccgtgagattttgcggaatgcgcacccggccctgcttgtccagctcgccgtcacatgcgccggagaaaaagtagcgaacgaaggcgcgggcgtctttattggtgagaggcaatgtcttcagcttctcttccatgcggcgccactcgtccatggggaataaaaagatgcactgatctaagcccttggtcatgacgtagccgtcactgatgccttcgcgaaatttcgccggcaagaccaagcgcccttttgcatccatggtgtgttttacttcaccgaaaaacatagcgcccccatttgaacccttttctaccactttctcccacttaactatattttacaccattttattgggtattcaagcacaaattaaaaaaaccacctaaaaaggtggtttccttgtctgatttattcctttgtcgatgatttcccgtcgattaaggtataatctccggtctttttgcccttggattgtaccaacagcaagagaatgccaagggtgatgccgatgatgctcaccacttgcgccgtgcgcagcggcccgatgtagaggctgtccgtgcgcaacccttcaataaagaagcgaccgatgccgtataaaatcatgtacgccccggccagttcgccggaaaaacgccgcttcttcgacagataaaagtaaagaaagaggaaaatccccacatccaacatggattcgtagagaaaggtgggatggaccatttgcccgcctacattaatcgcccagggaacggtggtcacgccgccgtgggcttcgccgttcataaagtttccccagcggccaatgccctgtgccaggacgacgccgggggccagcatatcgagcagttcaaaaaagctgatttttttcgcgcggcagtaaataaatatggctaaggagccgccgatgaggccgccgtgaatggccaggccgccgtttcgtatggcgagcacctcggatagatgggcgctgtaatattgccactcaaacaaaacgtaataggtccgggcgccgataatgcccaggggcagggcgaaaatgctcacatccaccgccgcctctttgggcacgcgtggatttcgctcgatgagcttttccgcaaaaaagatggcgagcagagcgcctgtggcaataaagatgccgtaccagcgcacctccaggccgaagagggtaaatgccacgggattcattttactctcctacgatggcgatggatttcgacgcgccgatgcggctcgctccggcggcgatcatggcttcggcggtttctctgtcgcgaatgccgccgctggcctttacgcccatcttgtcgccgacaacttcgcgcatgagcttcacatcggctgtcgtggcgccggctgtggaaaagcccgtggatgtcttcacgaaatccaagcccgcttccttggcaagggcgcaggccttcttcttttcttcgtcggtgagaaggcaggtctccagaatcaccttgaccacggcttctttcgccgcttccctcacggccttcatgtcttccaagaccagatcgtagtcgccgctttttaatgcgccgatattcagcaccatgtcgacttcctctgcgccgttatccacggcttccttcgcctcaaaggccttcacggttttcgtgttggcgcccaggggaaagccgattaccgtgcacacctttacaggtgaatccgccaatcgctctgccgccagagatacccagcagggttcaaggcagaccgaagcaaattcatgggccttggcttcgtcgatgacccgaatgacttcgtctttcgtggcatcgggattcaggatggtgtgatcgatcattttatttaatctcatgtttacttcctttcaataaggcaaaggagcccattacaatgagccccgccgccacgatcaagccgattcgcttgaccatgccgaagaaaaatggctcggggagcatttggatcatcagatccgtggcgggatccatttgccataacctgttggagaaaaagagggtgtggaaggtgtaccaagccttggtgaaattcacggcgaccatggccgttaagacgagaaaggtggcgatcaagaccaaggtggcccggccgacgcttctcagcccttctctgacaccgaatcctttcgccaagccgcaaaatccggccaaagcaatgactgccgccgccaccgaaagtttgcgcatcaggtgaaacagggcgtagacatccgccatatgtgccaattcgttctgattaaaataaggcttcaacacccgattgtcgccccgctttaaataatcgcggagcccgtcggagattttgtccaattcatgcaaggactttcccgtttcttcaggaattttattttcaatcatctgccgatggtagtacactttatttccgctgattaaatccgtggccgtgccgaacaggaaaaagaccaggcaaatggccacaatcgcggctaaaataggcctcattcgtcgtcttcgtcgtcgttttcccaattgtgaatgacttcttgtacgtcgtcgttttcttccaactggtcgataagcttcgccatttttttgcgatcttccggatcatctaagaccgtggtggtttgaggcagataggtgatttcggagatgacgaattcatagcccgcttcttccaaatttttccgcacggtttgataatcctccggggaagtaatgatttcgatgccgccctcttcggtgcgaatatcttccgcaccggcttcgatggcatccatttccacaacttccggatccatgccctctttgatttcgatgcccaattggcccttgcgatcgaagaggaaggaaacggagccgtcggtacctaaattaccgccgtgtttgtcgaaagcgtggcgcacatccggtgccgtgcgattgcgattatccgtcaaacattgcaccatgacggcgatgcccgaagggccgtagccttcgtaggtgatggattcaaagttgccggcgtcgccttcgccggctgcctttttaatggcgcgctcgatgttgtcgttgggcatgttttcggccttggcgctgtcgatggccgccttcagggcgggattgtaatccggatcgtcgcccccttcttttacggcgacggcaatttttctcgccattttcgtaaagatcttgccgcgcttggcgtcggcctttccttttttattttttatgttgtgccatttcgaatgtcctgacatgataacctcctttattcataacgcttaattataacacgcaccctacttatctttcaaacctcggcggcaatgcccgcttgtgggcactggtttggtggcgacgggcaatggcctctttgtgctcgccttcgttgtttccgcgaacggcacgatccaactcggcgtaggtaaagcccatgtcgtcttcatcggtttgaccggcataaagacctgccgtgggttttttctcgatgacttcttttggcaggcccaatgccttggccagttccaccacttccgatttcacaaagtccacgatgggcattaaatcgcaggcggaatcgccgtatttggtgaagtagccgatgtagtattcgctggcattggagcagccgcagaccaagtagtttctgtcttgggcgtagtaatacaacgtggtggtgcgcaggcggggcttcacattggcctttgccatggccacgtcgctttcaaaggacgcatctacgagggcgttaaaggtgttcgttaaatccactttttcgacattgaggtccaagctttccgccacgattcgagcgtctttttcatcttgaggattggagtcgatgggcatgataatccccagggccttgtcgccaaaggcgcgcttggaaagacccgccaccacggcagagtcgatgcccccgcttaatccgaagaccacgccgtcggcatgggctgcggccaccgtttctctcatccattgaaccactgcatcaatctcttgcttcatcatttcctccgtaaataaattgttcgtatgccacgtcatctacgaggagctttccttcatagaccgggcgttcagtttctttttcttctattatatcaacttcgccggatgtggcgtcttgcaaataagattcaaaggcatctttccccgacaaatacaccgtcgtcgtcacctgcacctgatcactgaaggccgaatctaataggggatagccacgctcccgcatgtagttttcgatggtgccgtgggcggtgtaagcgtagcgaaaggtaatgtctacggcttcgtgcatttccacgattttcgcatcgattaatgcctccgatgttgccgtggagtaggcgcggatcaaaccacctgcgcccaataaggtgccgccgaagtagcgggtcacgacacagaccacgtttctaaggtcatttcgcttcagcacttccagaatgggtggtcccgccgtcttttggggctcgccgtcgtcgtcgtatttttgaatcagcccttcttcgccgataatgtaggcggtgcagttgtgggtggcgtctttttccttttcgcgaatcgccgcgataaaagcctccgccgcctctttcgtctcggcataagccacccggccgataaattcggatttcttttcgattagccggctttcgccctttcgatagacggttttatacatagcgcctccttacataggctttcattcggtcataggcgcgcttcggcaaggtcgccgtcatgcacacgccgtcggcgtcgtattccaagcgctccaccgggtaattggctttaatggcttccacccgatccatttcatgaaaggtaaattttaaatccactttcacgtaaaggccttccacttttttctgaacggcttcgtaaaaataatcgaattccctatcgtgcttgcaggatccgtagatgaccgtctcctccgccggcatgaagggcagtttctttccctccattaaatcctttttgttgacgaagagcagactgggtacgtcggcggcgcccaggtcatttaaaagcttgcgcgtcgtttcgtagcgaagggacgcatcttcttgagaaccgtcgatgacgtgaacgatgagatcggattctctcagctcttccaaggtggtgtgaaaggcctcaaccaaggtggtgggcaggtttgaaatgaagccgacggtatccgtaacataaaccaccaatccgtcgggcagacgaatgcgtcgggtgtcgggatccaaggaggcaaagggcatatcctccacgtacacttcccgccccttggcgttggattctctcaagagtcggttcatgaccgaggacttccccgcattggtgtagcccaccaaggcgatggcgggcacctgtgaatgaatgcgattttttctgcccgtatcgcggatctttcgcgcctgtttcaactttttcttcacccgctgtatatctcctgagatgcgtcggcggtcgatttccagtttctgttccccggggcctcgggtgccgatgccgccgcctaagcgggagtagtttttcttgccgattaagtggctctttccgtattccagctgagccaaatagacctggagcttgcccacgtcggttttcgcacgcgaggcaaaaatatccaatatcagggccgtgcgatccagcacatccacttccagcaccttctcgatttcacgcatttgaatgccggagaggctttgatcgaagatcacaagatccacctcttccgcccgcacgaaatccttcagttcctcgagcttgcccttgcccatgagggtcgccggattaaaggcgcgcaccttttgctccatggatgccaccacatggccgcctgccactttcaccagggcgtttaattcccttaaactttcctcataataattctcggatccgtcgtaaaccgacgccgtcaccactttttctctttcttccatgacgcctcctgcctaagcttctttttaaatatacacaaccttccacttctacgcaacaatggcccatgatataatgacaaaaagggggtctctatggggattaaacatacacttcgccgcaaaaaaacatggcaaatggttcttgcagccatactgtttcttcttgtgctcttggcgggcatcgtggccatttggatcgtatccatactgaaagatctgccgccggtggatttcaacgacttgactacgtccattccgcaaacatcatacatagtagacgccgagggcaatcccatcgacgaagtggatccctccgtcttcagcgaaaatatttccgtggatcacgtgccggatcatgtgaaagaggcttttctcgccgtggaagaccggcgcttttacctccatcacggcttggacctgcgccaattggccgcgagcatcctggccaatgcgaaaagcggcgccatcgagcggggcggctccaccatcacccaacaattggtgaagaatgtttatttaagcggcgagcaatcccttgaccgcaaaatcaaagaagcctacctcaccttgggcatggagcagaaactcgataaagacgctattttagaagcctatctaaatcgcgtggacctgggcttaggcagccagggcatcgaagcggcatcaaacgcctacttctccaaacacgccaaggaccttaccgtggaagaaggggctctcttggcggggatcgtgaagtctcccgccacttaccaacccattaaacggattcccgcggaagaaaacgacaccaccggcgtcatcgccacccaaaaaatcggcgatcacagctacgatttagtagaaaatccccgcgccgcagaacgcaaaaaagtagtgcttcgggccatggcccaagccggctacctcacctccgaggaggcggacaactacgcccaaatccctatctcttttcttcccagagaagacgcccccgccccctactcttcctacgtggcagacgtgatttccgatgaagccgcccgcattctttccaagacgcaaaggatcgataaacaggccgcggaaaaaatggtgcgagaaggcgggcttaccatccaggccaccattgtaggcgacttccagaaaaaaatggatgccctctacgataagtaccccgccctcatcgcccggggtagaagtcgaggcgcaaactttgtcgactttaccaccgacgagaaagaccgaatgatcgacaacgaagggcgcgtgctctactacgcatacgacggccttttcgacgaaaaaggcaatatgcatcttcccgcaggggcctttacgaagacggatcagggctttgaaatcgacggcgaatactttacggaatccaaggggaatattcttttaaaaaatctctattatacagacgaaaacaacaacctccgcaccatggccggtgccggaaccctgtttcaggcaggagacttaaaagatcccgacacccttctgcttcaaggcgatctctacgaaacctataaggacgccattcaagtaacggaagatgcgctcattctccccgcggatctgtttctccttccggcaaagggcagtctgcaaccccaatcggcggcgattattgccgataatgccaccggcgccgtcgtggccctggccggcggcaacaacttaaaagatcccgcccgccttcgctacaatcacctgacgagcaagcgacaaccgggcaccgccatcgtgcctttaactacctacctcgccgcattgagctgtggcgacacgctggccacagcctacgacgacacgcccatgcgcatagacggaatcatttggcccaatgtggattctttttacggctacgacattctggcggacagtgcggcaaacaatcgcttggccattagcggaaagattttggaacgctatggctacgatcccattctgaaaaacctgaatcgccttggcctttacaagggagagcggcaagacgatgcagtgaagacgccgaaggaaaataccaagcgccacgacatgacctacgatgccatggcggcggggaatttcgtcgacggcttggatctcatggcccttaccaatagctacgcccgcatcgcatcgcccattgattcgaaaaactacacggttcaaaaaattaccgaccgcaaaggccatgtcctttacgagcacggaaaaacggcatcgaaaaatcaacccatcgaagacgtgcttttgcgctacgctttagcccgttcgcccctggccaattctcttcgcgccgcgggatacgataccttcgccgtctcgggaacgaataaatacaacgccgactacttcgccatcggcgccacgcctcgctacacgtacggcctgtggatgggcaatgatttacaaaaaattgccttggccggcgatcgctccctcatggaaagcttttacgcctccctcgtcgccattcccgacgaccgagaaacttgggcactgcctgcgggcttcgaaatgcatgaagtcagcgacaaaaccggcctcttggccaccacctacgcccggcgcgcccactctacggtgaccctgcccttcgcaccgaacacggcgccgacaaaggaaacgcagaattatacgcgcaagcttatttgctccgtctccgggcaattggcctccacctactgcccctatgaaaccattacctacggttattactttgtgcggccgaaaggctacgacccgaaagccttcgacggcatcgtgcccaaagattactacacccttcccacaagtcattgccaagtgcacaccaaggaatggtacgatgcacaaaatcaagaaactgacgacgaggatcaagacaacgaaaacaacagccgtcaaaataaaaccaatgggcacaacaaaaccaaccgtcaagacaaatccggcgatcaaagaaagacccaacggcaaagccaatccggccgtcgccgctaggtacttgcgtaaatcacatgccttacgggtatggtcatagtagaaggaggcagtcatgaaactatggaaaatcgtaagatttttggcactgtctaaaggtgccaaagcattaagaaaaaaaccggtgcgcaaagcggcagcaagctttgtaaaaagttacgctttgtggaaatacattcgcagaaaataaaagcagccctcgccatgcactgacccccaaaagttggaccaagaaatccaacctttgggggtcttttaatggcaaaatatagttatgaatttaagagaaaaattgttgaggaatacttggacgaaaaagcaggttatagaatcctggctaaggaataccaaattagctcttcgttgatcagacgctgggtgaacaattacaaacaatttggcgatgaaggcttaatgcgctctagaaataatcgtgcgtacagtgtagagtttaagttagaagctatcacacgctacgaaacgagcg

SEQ ID NO: 32 - DNA, 116166 bp, Peptoniphilus rachelemmaiella
  source 1..116166: mol_type = genomic DNA
tcacgctcttttagtgtaaaatgagaataatgattcatcgttcctcctggttgattggttttcgtcgacataattttaccagaaaacggtgaatcattttttgttgcacttagattgtaaattcaaggcgaaaaaagacccccgccgaagcgagggcctttgagaaaagctgagattagttttcttcagacaattctttgtagcgtttgtaggtttgttttgcatcttcttccgaagcgtcgagaagttcttcgccttcttcgggggagcgacggagcaaggatgcgtaacggttttcgctcataaggaattcgcgataggacttggagggttccttggaatccatcttgaagggattttcgcccttggcgatgagctcgggattgtagtggtacagttgccagtagttactttcgacggcttctttttgttgtttcgtcgcataagccatacccttggtaataccgtggttgatacagggcgagtaggcgacgatgagagagggtccgtcgtaagcttcggcttctttaatgaccttgattaagtggttcatattggcaccgagggcgaccttggcgacgtagatgtcgcggtagctcatggccaacagacccaagtctttcttcgcggtcttcttaccggcagcggcaaattgtacgacagcacccttcggggtagccttcgaagattgaccgccggtgttggcgtaaagttcgttgtcaacgacgagtacgttgacgtcggcgccggttgcgaggacgtggtccaatccgccgtagccgatgtcatatgcccagccgtcgccgccgtacatccagaaggatttcttggtcagttgttctttgtgggcaaggacatagtctcttgcgaccaacgcttcgccgtcgagatccaaacgtttcagtgcttcgattacggcgtcgctgcgttcgcgggtgccttcgccttcgttgtagttgtcgacccattccttaaaggcagcttttgcttccttgtcgtcgatggcggcgttgaccttttccagttccatggcgaccttttcacgttgttgaccggtagccaggtacagacctaagcagaattccgcattgttttcaaacaacaggttggaccatgcgggaccgaagccttggtggttggtggtgtaaggtgcgatggggaatgcgcagccccaagcttgggaacagcccgtggcattggcgatgtacattctgtcgccgaagagttgggtgagaagtttcgcatagggggattcggaacagccggcacaagcgcccgagaattcgaggagcggttgttcgaattgactacccttaatggtgaacttgttcatgggattttccttgtgggataaggtcatggcgtaatcccagttttcttgttccggaagttgcgattcgaaaccttcgaagacaagtgctttttccttagccgggcaagtttgtacacagttaccgcatcccgtacagtcgaggggatccacttgaatggcaaattcgtattgatcgaagcccttggcggggaggctgcggaagttttccggtttgttctttgcttcttcttcatctaacaagaaggggcgaatggctgcgtgggggcagacgaaagaacattggttacattggatacagttatccggttgccaacggggtacgtgaacggcgatgccgcgtttttcgaatttcgaggtacccaaggggatgtagccggattcgtagcctttaaatgcggatacgggcagatcgtccccgtgaagttccgtaatgggaagcatcatgttgcggacgtaatccgataaagtcgggtcgactttcgcctcttccacggtaaggttcttccattcggcgggaacgtcgaatttgtggaggttttgatagcccacttcgatggccttgtagttcatgttgacgatcttgtcgcccttgtgttgataggatttcttggcgaattccttcattaagcgttcggcttcatccatggggatgatttcggcgagcttaaagaatgcggattgtaaaatcgtgttggtacgacgacctaagccgatttcttcagccaattcaacggcatcgatggtgtagaattgaatgtcgttttctgccaaatactttttaactttgttaggcaggtgttcggcgagggtttcgtcgtcccaagtggtgttcattaagaagacgccgcccggacgaatttcgttgacgatgtcgtagcgggtaatgtagctttggttgtggcaagcgatgaagtcgccgtaggtaacggcattactgttacgaatcggttcgtggccgaagcgcaggttggatttggtgatcccgccggtcttcttggcgtcgtattcgaagtaagcttgaacgtacatatccgtgttgtcgccaatgatcttaatggagtttttgttggcaccgacggtaccgtcgccgcccagaccccagaacttgcagttgatgatcttgggattgcgaataacgaagctgcgatccaccggtaaggaacgataggtaacatcgtcgacgataccgacggtgaagtcgtctttcggttcgttttgatttaagttttcgaagatggcgttaatttgtgcgtggtcaacgtctttcgaggaaaggccgtagcgaccgccgtaaatttcaggcgcatctttggtgttgttgtaaacagcggaaacgtcgagatacaaaggatctctgccgcccggttccttggtacggtcgatgacggaaatccgtttgacgctcttgggcatttcagctaagaaatgttttttggagaaggggcgatagaggtgtacttgtaagtaaccggtcttttggccttctgaatttaagcgatcgacggtgtctttaaccaaaccgctgacagaacccataccgacgatcacgtgttctgcatcgtctgcgccgtagtaattaaagaggcgatagtccgtgccctttaattcattgactttgttcatatagctttctacgatttcgggaagacggtcgtagaaggtgttaatggattctctggattggaaataggtatccgggttttgaacgatccctctttgtttcgggcgttccggattcatggcgttttgtttgtaatgttcgacggcatcccagtttaagagattgcccagatcttcgtaatcgaagacttcgactttttgaatttcgtgagaggttctgaaaccgtcgaagaaatgcatgaagggtacgctgccttcaatggctgccaagtgggcgacggcggccaagttcatggtttcttgaacatcgccggatgcgagcatggcccagcctgtttgacggcaagccataacgtcggaatgatccccgtaaatagaaagaacgtgggaacctaaggtacgagcggcaacgtgcataacgcccggataaagagaaccggcggtacggaacatactggggatcatcagggccagaccttgagatgcggtgtaggtcgtggttaatgcgcctgcttccagcgaaccgtgcaaggtagctgcagcacctgcttcggcttgcatttctactaaacgtacttcttgtccgaaaagattcttcttgccgtcagctgcccagctatcgactgaggctgccatgggggaagaaggggtaatcgggaaaattgctgctacttcggtaaaagcgtaagagacataagccgccgcttcgttaccgtccatagacttatagactttttcggtcatgtacacactccttaacattctttcgagatgatgttctattgtcggcggaccgacaggtgcggggaagggttgtgtgaaaacgttaacacatcgggcttcctcgtcctcaaaaaacattatatacaaagggttctgaaaatggtaggtgaatttcagaattctatcaaaaacacaatttctaaagaattttgtcgacaaacaacaatattggcagataaaaggggaaaaaactaaaaaacaaacgccgtcatgaaggcgaagcaaaactttctcggcaaaagattaaaatttgcagtgcttcttttcccatacttttagaatttcgacgaattccttcaattttatacttcgatttttatgagtcaatcttcttttcgcgtcctgcgaattttgaaatggttaacatccgggtcggatcatgccctttgtgagccgccggcgaattgaccggtgggaagaggagatgctggacacccgcgacggaaaagattgagggcaatgggcgtcgtatcgcaggtcgaggatagatgaagatcgatttatttgttgaaccgccgagaaaattagattataatgtactttaattctcataaatgaggaaatgaatggaatcgacggtgtcacgtcacggcgatcggcgagagcggcgattttgtgcggaggtagatatggataatttaaaaggaaagaagaaagtcaaggccatcggcatcgagaccttcgtgttcctcgtcatactaattggcgggttttatttaatcggtcataaaatgggcgtcggcatgatgttcaaaaccatgatggccacggcccacgatttactattacagacggtcttattgattatggccatggctgtgctcgccggggccattagcggcgtcatgtcggaattcggcgccatcgccttgattaaccgcatttttgcaccgatgatgaagcctgtttgggggattcccggcgccagcgtcaccggtgccgtggctacctacttgtccgacaatccggcgattatatcttttgcaaaagacaagacctttactcaatacttcagaaagtatcaagtgcccgccctttgcaatttaggaacatccttcggcatgggcctcatcgtcaccacctttatgatctcccaaggccaggaatttatggtcccggccattatcgggaatgtgggcgccctcatcggatccgtggtcagcgtacgcctcatgcttattcaaacgaagaagcattacggcgattcggccgatgatccctacgacgaaaccttaacggcagaagatcttgacggtaaaaatgaatttcgctacattcgcgaaggcaatctctttcaacggacgctggatgcgcttctggagggcggaagaaacggcgtggacatgggcgtgtccattattcccggcgtgctcatcgtctgtactttcgtcatgatgattacctttggccccggtgaaggcggccattacaccggcgccgcctacgaaggcgtggagtttttgcccctggtcggtcaaaagctgcaatttatctttgagccgattttcggattccaatcgccggaagccatcgcctttcccattacggccttaggcgccgtcggggcggccatttccctggtaccgaattttattaaaacaggggtggccctacccaatgacatcgccgtttttacggccatggggatgtgctggtccggctatttaagcacccatatcgccatgatggatgccctggattccagagagctggcaggcaaggcaattttgtcgcacaccatcggcggcttggtggcaggggtcgcggcccacttcatttacatgctcatcgcttaagagaaaggcgcagagggatctgcgcttttttgttgcacggagaaggttttgtgttaaaattcatatagattactttgaaagaaacggggaattaatttgcaatcgatgaataaaaagaaattacaaacctacgcgatccttggcctggtcatgatcttgttaaggcaaggggccatggcggcgggcttcttccgcgaaccgacggataccttagccacctgggccatgattcttgccgccatcggatttttcgtgtttcactacgagctgcgtcggggcaagggcatctccgccgacggagaagaagaacttttcggcgggccgaagctacacggcgggctgctcgtcgccctttctctcttctttttctcttggaccttggcgaaggggatcattatactcattatgtttggaggcgtgctcctgcttttcaccaagctcattcgaaatgtgaaccaaaaataaatgttggcgacgggatctcgtagggggtcctgtttttttgctgatttttttaatttcaaacagagagaagtaataatagagccgaagcttgtgtatttgcaaatggtgggggtaaaaatgataaatcagaacgaatcccacgggcgcggaccgtggatcaatcgttaacggaaaagagtctctatggaaaaagtcaaaaaaattttacagcgggatttaaagcggcttcgctccaacggtgcggcgctactggttttaatgggcatttgtcttttgccctctttttacgcgtggtttaatattgccgcgaacatggatccctacggaaatttgaatcaagtgaaaattgccgtagccaacgaagacagggccgtcccctttcagggcaaggacctaaatgccggcgacgaaattatcaagcaattaaaaacgaacgatcagcttgggtggactttcgtggacaaagcccgcgccattgaaggcgtgaaggcggggaagtattacgccgccatcgtcattccctcggatttttcctcgtcctttctctcgattttagatgaaggcgccattcgctttccggcgctggattactacgtcaacgaaaaattaaacgccattgccccgaagattacctccacgggcatgggcaccttggaagctgaaatcgacagccgctttgtggccatgagctcggagattttaggaaagaaattggcggcgtccaccggagaacttcgcgccgaggcggaggagaagaaagcgcaggccattcacagcctggaaaaagtgggcaaaaatctggcggaatacgagacggttttaaaaaatatggatgaagagatgaaccgcctgtcggatttaagccaccgtgctcgcggggacgtggcgtcgctgaaagaggcggtaaaaaaaggcgaactaacgctggacgaagcggcggggctcttggaagagacccgaaaagaaagtgaaaaaatgatcggcgcctacgaaaatctcatggaagagatgaaccgcatggtgcaggtggccgatgcctattcggaaaagaagcatcagtctctggacggcgactttacttatgaaagaagcggcaaccgccgggccctcgtggacatggaattgattaacggattaaacggcgaggtgctaaaggatttagaagacctttcgccaatcccaaaggcggcaaaaccactggatatcttggggcgcagtcgccaaatcaatcgcagaaacggcgagataatcgccgcggtgaaggaacaacaggcgatcctcgattcggcggaggcgtcattgaaaaaaagccacctacgcattcagcagcgcctcaaggaatcctccgatcaacggaaggcctttgagcaagcttaccgcagcagcattccgcctgccgtgaatcaaagcttcgacctgttcaatcaagtggaaggccatctttccggtaccttggccaccctgcccacccttttagacgaattcgatcaactcctggggagcacggaagccatgaccgaagaggcgcacaaaaccgtggcgaacagcttggatagcttgaagcgggcccaagacagcatttccggcttgcaaaaggatttggggcagttggctcgagggcccctctacgaaaaaattcgcgaggccacccgtgtggacgaaaagacatttaccacctttatggaaagcccggtgacggtgcattcccacgtcgtttacgaaagcgaaaactacggtagcgccatgacgcccttttttaccaatctggctctgtgggtcggcggcatgatcctcatatcaattttaaaaatcgacgtggaccgagaagacgatcttgagccgttgacatttaaagaaggctacttcgctcgcttgggcctatttgttctcgtcggcctcgcccaggcgttcatcgtcggtgccggcgatttgtacctcttgaaggtgcagtgcgcccaccccttcctctttattctcacggccctttttgcctccctggcctatgtgtccatcatctattccttggctgccaccttcagaaacatcggcaaggccattgcagtcatcgtgctcatcctgcagattcccggcgcttccggcacctaccccatcgaaatgatggcgccgttttttaggtccatttatccggccctgccctttcactacggcatcgacgccatgcgggaagccatgctcggcatctatggctaccatttggcgaaagactggctcctgcttatggcctatgtgcccgtctccctcgttatcggcctggtggggccccacatcttcggcaagctcaatcatattttcgacttaaaactggctcaaagcgaattgattcacggcgatcttccgaagagacaacgccttataggtgcggatctgattcccatgattctcgcttcagacgtggcgggccttgcgcggaaaagagaaaagcatcgacgattttttgccgcctacgaaaaaaagaagatctacgcctttggagccctggccgtggtgcctgccgtcttcctttgcttgctcctgggcatggacagcaagatccgctacctggtgatttgggtcgcatccatcatcgcctttgccacctacttgatttggttggaatattaccgttatcgttacgaggaggaagaaaagtggatggatctttccgaatcagaagtcttggaccgtttgaaaggcaaggatgcccatgaaaaagattaagcagcatattaaggaagacttttccagaataaaaaacaacagcatcgtcttcgtggtctttttaggtatcagcctgatcccttcgctctacgcctggttcaacatcgccgcctcctgggatccctacaaacacacggagcacattcccatggccgtggtcaacgaagacaagggctatgaaccgaccctcattccgaaaaccttcgccatcggcgagaaggtaaagatgaatctcgccgtggaagatacggtggattgggtgtttacggatcgcaaagatgccgtggaaggcgtgaaaagcggtcgttattacgccgccatcattattcccgaggatttcagcgaaaagatgttttccttcctttccccggcgggggaggcgccggaattggaatactatgtaaacgaaaagaaaaacgccatcgctccgaaagtcgttggaaaagaagcggggaatctgacggattgggtgaaagaaaccttcacaaaaaccctctacgacacggccttcgactcccttttaacctttaaagaagacggggagaatgcccgcgtcgacgggctgtggaatcggctgcagcagcagctgacacaaagcggcgagacattggacgcccaggccgccaccctcagatcctttaaacaattggcggaggcctctcaagtggtgatgaaaagcggcgacagccttatggacacatcgaggaataccctggaagaaaacatggcccacatgaaaagcgatcgaaaggatttgaaggcattaaaatccacactaaacgaatttcggaaaaacatggaaacggcactggataaaaacctccgctacatggaaacgatcagcggcgatgtggacgatctcttcgcagaaggagagaagcatcgagaccgccttgtggccaatcgccgggccgtgatccgcaccttggaacaagacatcgcggacaaagaggacatggagaaaaaggtcacggatttaaacaatgggctccccgtgccccttgggggcctcgagggggcggcggagaagattcgccggagcaaaggctatgaggcggccatgttgcgggccctggaagcggtagacgacaaaggggtcacgacacacgacgatgtcgccgccctgcgccgggaatttctcgagagcaaaaagaaaaacgaagacaatttgaaatcccttcggcgagaaatgaacgacaccctcctcgggcccatggaatcccttcaaaaaaaattggacggggtaggcgcagacacggaaaaactttgggccgacgccgatcaatcggcgagggaagtggcacgcctgtcggagaaactgcagggaaatctttccgccctttcccgccacatggacacatccatccaactaatcgacggggcaaaacatgccgtcgacgatctctatagccgcaccgtggtgttggaaaatgccgagggcgtggataaaatcaagctctttttgtcggaagatacgaagcagttaagccaatttctgtctaaacccattgagacgcgggtgcaccccatctttgccgtggaaaactacggctcggccatggcggctttttacaccaccttggcattgtgggtgggcgccgtgattcaggtcgctttaatcgacgtaaagacgccggcgtcctacgagaaaaaatacggcccctttaagccccacgaacaatacttcggcaggctgggcctgtttcttttcatcgccaccatccagagcctgctcatggccctgggggatctgtactttttgggaattcagtgcttgcatccggcccatttcctcttcgccgcctgggcggcgtcgatggtctttaccgtgcttatctacaccttgaccatctccttcggcgacatcggaaaagccatttgcgtggtcctaatggtcattcaggtggcgggcagcggcggcacctttcccatcgacgtggcgccgcggtttttcaaggccctgtatcccttcctgccctttgtccacagcatgaacgccatgaaagaaaccatcggcggattttacggcaccatgtaccttcaatccctgttgaaccttacgctctatctcgccttcgccctcatcctcggtctcgtcctcagaaaacccattatggaaataaacgatcgcttcacggagcgtttggaagagacgaaactcatgtaaacaaaagctacaaagaatcttctctgaaccgagaaatcaggggagattttttattgcgcccaggctttagaagaaaataggaacagaattttatattatcttgactttcggactttagtggattaaaatattataaacttaagagagagcttaagtgaaaaatacatagggatttaggagagatgactatgaaactaagaaacagacgctttttgtcgatggcgctcgtagccatgatgctgttagtctttacggcagcctgtaccaaagtcgatactggaaattccggtaacaaaggcggcgatgcaccgaaagaagcgacgcgcgcaaaatttgaaaccttaaaagacggcgacccgattcacatcggtattgtaaccggtaccgtatctcaagcggaagacgaattccgtgcggctcaagaagccattaagaaatacggcaacgccgacgaaggcggcatgattcgccacgacacttaccccgaccgtttcgaagcggaacaagaaaccaccatttccaaaattgtcgccatggcagacgacccggatatgcgtgctgttatcgtgaaccaagccgttcccggaacctccgccgcattccaacaaatccgcgccaaacgcccggacatcatcttaatcaacttaaccgcacaagaagatacggtaatggctgaaaacagctcggacttagtattagatgccgacaacgtcagccgcggctaccgcatcatcaaggcagcaaaagacatgggcgcaacgaagtttgctcacattaccttcccccgccacatgtccatcgagcttttggctctgcgtcgtgccattatggaagaagcctgcaaggatttaggtcttgaatttatttccttaaacgcacctgaccccaccactgacatcggtgttcccggcgcacaacaatacatcgcagaaaacattcaaccctggatcgacaaatacggtaaggacacggcgttcttctgtaccaatgacgcccacacggaacccttgttaagaggggttgcagccggcggcgccatcttcgtagaacaagacttaccttccccgattatgggttatccgaaagcattctccgtcgacattcaagacaaggccggtgactggaaagccatcaatgcagaagttgaaaaagccgttgtcgcagccggcggttccggtcgcatgggtacctgggcatactccttaggttactccctcaccttaggtgccgttgacttagtacaacaagtactccacggcaaaatggaactgaccaatatcgacaacatcatcgactgcatcgacaactacaccgaaggtgccaagtggatggctgttaactacgtggatcgcgcaagcggcgaaaagaaagacaaccacatcttgctcgcacaagacacctatgtctacggcaagggttacctgggcatggataaggttgaagtacctgaaaaatacatgaccatgaatatcgacttggatgccattaaagcttcgcaagaacaagctgaaggcgaaacaggtgaataatcgttcaacacacgatcatatgcattggagataaaccagcgatcttcgttggtttatttctcattaggaggtaaattttggctgagaacatgatggaggtccgacatgtcgaaaagcgctttggcgaaaacgtcgtattaaaagacgtaagcttctccttaaagcccggtgaaatcctcgggctggtcggcgaaaacggcgcaggcaaatcgaccttaatgaatatcatcttcggaatggaagtcattcgggaaaccggaggcttcgacggagaaatcctactgaacggcgaacccattgattttaaatcacctatcgacgccttggatgcgggcatcggcatggttcaccaggaatttaacttaattcccgggttcaccgccgccgaaaacattacgtttaatatggagcgcaccaagcaatcggtgatctcctccatcttcggaaaaaagtatgccaccattgacacggaggcaaacatcgccctctccggcgaatccctcgatacattaggcgtgagcatcgacccgaaagggatggtctccgaaatgcctgtaggacataaacagtttatcgaaatcgcgcgggaaattactcgcgaagacgtgaagctcattattatggacgagcccaccgccgtcttaaccgaatcggaagccgatcaactgatgaaggcccttcaacggttgtcggacatgggcatcgccattatcttcattacccaccgcttgcgtgaaattctgagcatttgcgattccatcgtcgtgcttcgcgacggagaaatcgtggaaagccgaaagaacgaaggcttgagcatcgatcaaatcgccgcgtggatggtgggccgtgaaaacggcattcgccccgaaggaaaagaccccaatcggaaagtgtccgaagaagtggccctgagcatacgaaatttggcggtggatatgcccggcgaacaggtttacgacgtgaatctcgacgtgcgggaaggggagattttaggcatcgccggtctcgccggccaaggcaaactcggcatcgccaacggcatcttgggcacctatcccgtatccggttccgtggaatttcacggaaagcccctggccctcggccacaccaataaaattttaaaaagcaagatcgcctttgtctccgaagaccgacgaggcgtgggtcttttactggacgaacccatttactggaacatctcctttaacgccatgcaggtgcaaaacaagttcatcaaacgggttttgggcatgcgttttagagatgaagcggaaatgaaacgggtttccgacgaatacattcagtccctggccattaaaaccacaggtggccaccaaaaggcggggaacctctccggaggcaatcaacaaaaagtctgcttggccaaggccctgtgcatggatccggagcttttgtttgtatcggaaccgacgcggggcatcgatatcggcgccaaggaattggtgttaaacgcccttgaaaagattaatcgagaagaagagacgaccatcgtcatgatttcttcagaattagaagaattgcgcagcatttgcgaccgcatcgccgtcatttgcgaagggcgcattgcgggcatcttgcctgccacggcagatcccggccaattcggcttgttaatgagtggtgagaaagtagaggtggatacacgtgaataaaacatggattcaacgaatcgggctgcctcgactgatcatcggtctattcctattggccctgtttgccgcggcaccggccgccggcgtgtctttggcggattccattcaaaacgtcttggcccgcttcggcatgttttctattttggtactgagcttgattcccatggtgcaatcgggctgcgggctgaacttcggtttgcccatcggcatcgtcgccggtattttaggcggcgtgaccagcattgaattcggtctgaccggattcgccggcatcttcttggggatgcttttaggtgccttggttgccgtcgtcttcggctggggctatggcgtcttactcaataaaatcaaaggcgacgaaatgttgatcgccacctatgtgggctattcctttacggcctttatgtgcatgatctatttgatcctgccctacaaaaatccggtctccgtattgagctacgccggtaaaggcctttcccaacaaattcccgtcgccgcctactggatgcacaacaccgtcgatgccgcaggcaccagaagctccaccggcgtcttgacggacttcttgagcttccacattttcggcgtgcgcattcccgtagggatgtatttgatcttcgccgtcttggccctggccgtgtgggccttcttccgcacgaaaaccggtacggccatgaccgccgtaggatccaatcccgaatacgccagagccggtggtatcaacattaatcgtatgcgtctgttctcggttattctttccaccgtcatcgctgccgtgggcattatcgtctatcaacaatcctacggatttattcagctttatcaatcgcccttgtcctttaccttccaaaccgtggcggcccttttaatcggcggcgccagtattaacaaggcaaatattcccaatgtcatcatcgggaccttcttgttccaagggattattaccttgacgccgacggtcattaacggggccattaacatcgacgtgtcggaagtactcagattgatcgtcaccaacggtatgatcgtctacgcattgaccaggaggaacaataatgaataagtcctttacatcaaagctgtcgcgatacgcggtgccgattctgtttattatcatcatcgccatcggcttatggatcgccaggccgcctttgagctatgttacttcggaaatcggaaagcgcatggtgcgcaacaccttcctcgtcctttctttgattatccccattgtcgccggcatgggcattaacttcggtatccccttgggcgccatgagcggccaaatcggtctgatctttgcccaagactggggcattacagggccggcgggcattttagtcgccgtgttaatcggtacgcccatcgccattttgctgggtaaattctccggccacgtattaaatcgtgccagaggacgagaaatgatcacctccatgatgctcgccttctttatgctgggcgtgtacatgctctttttgctctatctgtgtgggtctttggtgcccatgcacaatcaggccatgattttgtcgaaaggctacgggatcaaaaactccatcacccttacttcgggtcacgccatcgacaacatcttgctttacaacatcaatttccccgtgtcggccacccaaagggtaaacatcgacattcccgtggttaccattttaatcatcgccctgctctgcgcctttatcgtatggtttaaaaagaccaagctgggacacgacatgaaggccgtggggatggatcaagtgatttccggaaacgccgggatctactccgacaaagtgcgggtacaatccatcgtgatctccaccgtactcgcttgctacgggcaaattatctatttgcaaaacatcggtaccctggccacttacgccgggcaagaccaagcggccctttatgcggcagcgtcgattctcgtcggcggcgccagcgttatgcgggccaccattcccaatgccgtcatcgggaccatgttgttccacttaatgtttattattctgcctcaagccggacgtatcttaaccggcgatgccatgatgggcgagtacttccgtacctttatctcctacggtgttgttaccgtagccttgattatgcacgcctacaatcgcatcaaacaagcggaagaagcacgtcaggaaaacaaacgacaggcattaggtgaaggagaggattcctccccgacgcctgcatcttaaataaagttgcttcgcctaagaggcgagaaaagggcgcccggtgcgctcttttttcttaaccgcgtatctgcaaaaacgcggcgataggatgtatttgcgggaggtgttttatgtttcgaaaagaagtagaaagcgtcgctcaggcggcggcggacaaggttcgttttttaaatgaaaaccccacaggttatttcgcctcgtctctcctggcggggatgtttatcggcttcggcatcttgctttcttttaccatcggcgccatgggctccatgcctcttatgaaacttttcatgggcatgtcctttgcctgcgccttaagcttggtcattatggcgggggcggagctgtttacgggaaataacctggtcatggccgcgggctttctggaaaacacggtctcggccaaagatgtgttgaaactttgggtgatctgttacgtgggcaattggatcgggagcattctcctcgcctggatctttgcccacacgggccttatgaccgaggccttttgtgccgccgtggcaccggtggcggcggcgaaggtgagcattcccttcggcgctttgcttttgcgggccacattatgcaatatgctggtctgcctcgccgtgtggtgctccataaaaatgacctcggagtcggggaagcttatcatggttttctggatcatcgtcatcttttttacggcgggcttcgaacactccgttgccaatatggtgcttttatccctggattttatggcgccggggacggccatgaccatgggaagttatttttacaacattttaacggcaaccttgggcaatatgatcggcggcattttcttcgtcgccgtgccctacacccttatggcaaagaaataattttacgccatgaaatagagaagcgatcggcattcggtcgctttttccttgttttcatgctttccacggcctttcatggtatagttaagtagacaacagtcaagttcagaagcagaaaggaagattttatgcactacacaggacaaacatttcgcccgccgagagaggcctatagcccgcttttggaagtgacggtgggttgttcccacaatgaatgcacctactgtgccatgtataaggacgtaagtttcagaaaggcgccgaaggaacaggtcatcgcagatctccaagagctttcgccctatgccgatcggctggatcgcatctttcttttaaacggcgacccctttattttagatacggcctatcttttggaaatcgccgattggatttacgagtacttgcccaatatcgagaccattacctgctatgcgtcgattttcgatataaaaaataaaagtatggaggatttgaagcggctgagaaaggccggctacaatcaattgtacatcggcatcgaaaccgcccacgatcccaccttaaagcgcattaaaaaaggttgcacccaagaagacgagtaccgcgagctggccaagcttgaagaagccggcatcgactggatctgcatggtgatgtccggcatcgccgggaaagaagacagctttgcccatgccgaggaaacggcggcgcttttaaacaagcatcagcccttgagcgtctcgcccctgaccacctcggtgcacgcgggcacggagcttgcggcagaagtggcgcgaggggatttcgtgcccttgacggagggggacattcttctcgaggaaatccaccttctggagcacttggatctcaacccacgggcactgtttttcggcgtccacgcctacaacacggcgccggtcatcggccgcttctctgaaaaagaagagatgctcagaaagcttcgggcggtctacgacagcatgacggaagagcagaaaaacgcgcggctgcaacgctacggttattaatgaaaaggccgttatatcaagccgtaaaaggccttcgcggcggggtgaatttcgccatgcccgggcataggggccgagtggctttcgattttgacttcaaggacgactggacagaggtcatcggggcggacaatcttttagatcccacggaggccattaccgaggcccaagctgaaatcgccgcggcttacggcgtgaaaaaaagcgtcatcgtcccggcgggatccaccacagggatcaagctggccctttaccttgccgcgaagcccggggagacgattttgattcagcgtaattcccaccagtccctctttcacggggcggtggcgctggatctccgtctatcttatttgccggcaccggtggatgaggccacggggcttttttccggcgtggatcccgaggacgtggctagggccttggacgcggatccgtcgatttccgccgtatttttgacgagtcccgattatttcggcggcggtttgaagctgaaagaaatcgccgacatcgtccacgcccgaaacaaaatcctcatcgtggatgaggcccacggcgcccattgggcctttacgcccctcgcggatatgagcgccgttcgccatggtgattacacggtgcagtcgttgcacaagaccatggcggcccttaccggagcggcgcttttgcacataaatagccatgtggaggaggagacgcttttaaagggcatgggcctttttctctccacctcgccgtcctatttgctcatgctttcctcggaatacgccgtggcggcggggaaagacatagattggcagaagcttctctgccatcgtgcgcggatcgaaagccgcctgccgcaaatcactgtcgtcaaggcgcgggggccctttgtggcctgcacggatcctatgaaatttctcttccacctgcccggctaccgcggcgatgaagtggtgtcccttttggcggagaagggcgtttatcttgaaatgggcgacgactattacgccctggccattttgtcgccctatcacacagacgaggatgtggatcgattgattcgtgccatcgcatccttgccgaagaaagaagagaggacaggcgtcgagaagggtatatatccgaaaacggaagcggtttttccgccgcgggcggctttcttcatggagacggaatctgtggctgtcggcgaatccgaaggccgagtggcggcacaaaacatcacgccctatccgccgggcattcccatcgtcacctacggagaacgaatcactgaagaggttatggcggccatttcagaaagagaagacagcatcggctttgaagacggaaaaatcacggtcattaaggaggcattatgaagtattatctcgtcgaaggcaagttcaagacctttaacttttcactttacgatgacgaaaacaaggcgctgaagaaagaattccatgactttttacaagcgggcatggatcggggggattttctcatgttcggcgataaggcccacggctttctcggcttggttagaggcaatcacttagatgaagtgttgtcggaattcgaaaacgacccgctgacactggccgatgtggtggaataccgcatcgtcgaaatcgaagatgccatcctcagcaaccatccggagaaatttttagaaaaataaacaagcaaaaagcgagcacactaggctcgctttggacacaagacaagcgatcaacaccattaggggtttatcttcttatgtgcgttcctgtatgaaaaatgccgaagtccaaaggggcttcggcattttttgcgattaaaaggctcatgatcgttaatgtgatttattctatattttcaaggacgcaattttacggaaaaagtgcgattcatttgcttgcagacaaattaaaggtaaattcgtcgcctatggcttcctcctcattggattcttttccgccatggtttggaagttccgctttatataattgacatttcaatgttgagatgtcgtttaacaattcatcggcagtgacttcgctggtaaccggcgagaagtagagggtcgacgtgttcttgtctgcttcgatcgtttcgaaataaactaagcgacctttggaatctctcgccttcaccgaaaaaatagtgtccttcgccgatgacggataggtgagtatcattttttgtgaagccgggctcatagtgaattctttaatcataattccgtttgtattcggtacggcaaaatcttttgcgatgatccttttctccattttcatcttcgccatatccacatgagtagtaatagaaatttttttgctgttgcccaaaagcgtgtcaaagataaactccagctgtgccgtgccttccttcggtaggggactttccaaggaatatattaaagatgtggcggttacattgggcttgcccggcaaatttccttcctggccgcttgagccgaggacgttgactcttttaccgtttactttaagctccgttaagttggcaccctccgacagcttttcacctggaccattgaagctcaaaagcacggcgtagagattattgtcctctgtcgtaatggtatccaaaacatattttttgccgtctatttcgaagggttcatgtaatttgacgctgtacttgtctacatcgggtgataggcccattgcgctcgacaaactaagtgtgatgttgtccgtgatctctctcgtctttgctaaaacatagccgccggatgcatagttcgtaacgccaaaggccaaaagcaatatggccgcgatcgctcctgtttttctgacgaaaagtcgtctcttgttgttgcgtttcaatttcttcaccacctttttgagattttctctttcaaaatctttgagaggaacctcttcgtattctatttttatatcgttcaatcgatcgtaaagattatccttcatacattttcacctctccatcttcttaaaagcttcctcgccctgctaaccttttgataggcattttccgtggaaatatgttgctccgatgccgcctcgccataggaaagcccgcgaataaaaatattttcaaagagttttttatcctcatcgcccaaggtggatagagcttcttctatttctaaattggaatggacgtcggaatcttttgacgcggaattttcgtcgagaagaatagcctcaaatttgctttctcttcggagcaaatcgatggctttgtattttgaaaccgcagcacaccaatttttaaaagaagaccgcttcggatcaaaatagtcgatattttgccagatacttagaagagaatcattcatcgcttcatcccaaaggctcgggtatttccaaagtgtttttgagatcacgccttttaacactttcccatataattcgatgacgacgtacaacgcgtcttcatctctgttcttcagcctttttatcaactctttagtctccatatttcctcctttcactagtatattcgtgccggggttcatggttctgacaattttttaaggggcttcttattaaaataagacgagcttcacttattcccggttgcagacaaataccatctttagtcgaatttatctcttttttatggcgcggaatcagccgacagtttttaatagttgacgatttagcgtttaagtagatttgagtctataaaaaaggaaaggtgaatcatgtgattctcctttccttatccatcgcttcgaagcgagcacaggctcgctttttctatgtcgaaatttacttgtcttcaaaaaatgtttccgcaaagcgcacggaagccatggcgtctttgcaataaacgtgggcaccgatctcttgggcatagtcttccgttaagacggcgccgccgaccataacctttgtgtcgggggcttgttttttcagaaggtcgatggtctcttccataaagggcaccgtggtggtcatgagggcggagaggcccacgaggggaatgtgctcttcttttaccgacgccacgattttttccggcgagacatcttttcccaagtccaagatatcgaagccgtagttttccaaaagggccttcacgatgttttttccgatgtcgtgaatgtcgcctttcaccgtggccacgagaatgcgacctttgttttcggccacattgccttcttcgtccattttggcgcggatcaccgtaaaggccgcggcggcggcatcggcggcgcgaaggagctggggcaggaagagggtcttttcctcaaagcctcggcccactttgtccagagagggaaccaagtagccgttaataatgtcgatggggctgtgatcggaaagaagggctacagtcatgtccttggcatctttgctcaggcccttttcgatggcgtaggaaagatcccggtcgccggcgtgggccgcggttttttcttcttccgtaaaggcggcgatgaaatcgctgaaatccggatcgcagcctaaaagggccatggaggatttgtaggccttttgcatgagggccgaggagggattcacgatccctgcactgagcccggcggcaaggcacatggcgtagaaattgctgttaatgagctcccgattgggcaggccgaaggaaatgttggacacgcccaaggtggagtgaaggccacgggccttcaaacggcgcaaggtttcgaggaccacgacggcgccgtctttttggctggagatggtcatggccaaggggtcgaaaagaaacgcttcgggccccaggccgtagcgggcgccttcttcgaggatggcatccacgatggccatgcgcttttccacggttttcggtatgccctcgtcgtctaagagaagggccacgcaaagtccgccgtattttttcgccacgggaaagacggcgtccatggtggattttttgccgctcacggaattaagtaagggtcggccgttgtagatgcgggcggcagcttccatggcatcggggttgctggtgtcgatggccagtggcagatcacacaccccttgcagggcgcggataatttccggcagcaccgccacttcgtcaaggccgggcacgcccacattgacgtccaagacgtgggcgccgtcatcttcctcttccaaggcgatggccagcaccgccgaggtgtggcgatccttcagggcctgctgcaggtatttttttcccgtgggattgagccgctcgccgatcatcaccggcttttcgtcgaagtccacgacatgggtgtaggagcttacggcggatcgggggcgccccttcggcggggtgacgtcaatggcacgggttttctccacagttttttcgatgtaggcgggaagggtgccgcagcagccgccgagtacgcccacgcccatctccgcaaactgaatcatgtaatcggaaaaggcctcggcgtcgatgtcgtaggtggtttttccgtcttttatgctcggcagaccggcattgggactcacgatgacggggatggtggcgagggacgtcattttttccataaggggcagggtttgcaccgggccgaaggagcagttcatgccgatggcatcggcacctaaggctgtggtcatttccacaaaggcgtccatgtcgcagcccgttaagaggcgtccgtcttcctgaaaggcggcggtgacgaagacgggaagatccgaattttctttggcggcgagtagggccgctttaatctcgtaggtatcggacatggtctcgatggtaattaaatccgatccggccgcggcaccggccgtgacgatttccttaaaacaatcgtaggcatcttcaaagggcacatcccctaaaggtgccaggatttttcccaagggtccgatatccagagacacgtagccggcaccttccgcctccacggcggcttttccgttggctacggcggcggccaccaccgtttcgaccgacacgtcagaatccgcaaacttaaagcggttggcgccgaatgtattggtgaggataatgtccgcgccgctttttaaataggctcggtgcatatcaacgatgacttcgggtgcgtcgatgtttaaaatctccggcagggccccggcctccaagccctgtgcctgtaagtaggtgccgcaggcgccgtcgtagtagaggcggccgttttttaatgaatccaatagcgatgtcatagattcctccgatccaaacccataagggcggtaatggtttttgtcgggacgagcatattgccttctgtcagggcgatatgcatttttttatccgcctgcaaactgcgaatcaagggccactgaaattccaaaccgaaatcggcgaagccgggggagaagcggggatggccaaaaaagccctgttgcgccgcttcatcccgcacttgggcgcagtagtgattggcgtaactttctaagtactcggcgcagcaggcgtcggtaataaaagcgtcggccttcgatgtaataagcaggcggctgatcagccggtccacggcggggcccaaggtcatggcaaagagaagggcgtattcgctggtcttcatattcttttgaagcatttcactttcagtagaaaagtcgccgaagacgatggcgccgtcttgtttcgttatgggtcgaagggaagccacggcgcgtacatccaccgtgtctttgaggcgcaacaaattccgctccacatcggcggaggtggcatcgtcgggggcatttccctccaggcgcaggtagcggtatatttctctgcgccgtaaatcctcgagatcgagggcgggcacgtcgtgaatggacgccagatcaagcatggaaaaggcggcctaaatcgcggacaatccgctccggaatggccggcttattcatggtgtagacgtgaataccgctgacgcctgcagccacgagatccgccatttgactttcggaataggttagccccgcatcgaacatggcgtcgggattgtctttaaagcgatcaaccatgcgcaagaggggatcgggcagggcggcatcgcttaaatccttgatgcggcgcacttgcccggcgcttgtaatgggcataatgccggctaaaataggcacgtcgatgcctatggcgcgggccttttccaaaaagcggtaaaagacctcgttgtcgaagaacatttgcgtggttaagaagtccacgcccatgtccaccttttcctttaactgacgcagttcttcgtccatggaaagagcggggttgttgccctcggggaagcaggcggcgccgatggtaaaatcgccgcgctcgcggaagtattccaccatgtctttggcatagggcaagtaagcgtcctcgcccagctcccgggcggagtcgccgcctaagacgagaatgttctttactttgtttgccgtgagctcgtcgtaaatggcgggaagttccgttttcggaatgcccgagcaggtcaggtgtgcgatggagggaattcccatcacttcactgactgcatttgaaatttgaatggtttgatcgccgccgctgccgtcggccttaaaggtgacggacataaagtcgggctcgtaggccgccatgcgcgcagctgaggccataacggccttcaaagacattcgttgattcgggggaaagatttcaaatgagagtcgtgtgtgattgggtgaaaaaaattctttaatgtgcataaattacctccaaaagtaattttcacattataacacagaaagcacgtcgcgcaatagcgtttcgtgaatggtgggacatatttcacgcgaaaggccggcgacgtgctttattttttctttgcgaagatataaaaatgttggacaagataactgatgacgaatacggtaatttccacgcagagtttcgctgccgtggcttgaaggcctaagacatggccgtagaaacttaagagcaggctgttggccgtaagtaggagggcgacgagggcggcgtactgcaagaaatcttcgattaagggatcgttggattcaaagacgtaattgcggtttaagtagaaatttaaattggcgctgatgagccgtgctgccacattgggaatggtcagagcataggggatattgaaagggcgggcaaggtaataaaataaattaaaaagcagaaagtccagggtgaagctaatgatgccgcttaatgtaaagagcacggcttcgccgttatccaagaggctgcgaaagatccgcgccgaatctttcacggcatcgtagtgggatgtggagttttccttgtccctgtaaatggtttcgatgggcacctgcaccaggggataggggcttttcgcccagtccatgagctggcgcatttcgtattcgtagcgctcgcccttcgtggcaaggagcagatccaaatgctcggtgctgaaggctcgaaggcccgtttgggtgtcgtccaaatccttgatgccggaaaggtagccgaaaaattttgccgtgaggcgattgccgacgcgggagcgcaggggcgtgttctcgggaaaatcccgcacgcccaatacgagggcgttcggattttcgtgcaccgccttgagaatgcgcagggtatcttcggggctgtgctggccgtcggcatcggcggtaacgataaattccacatcgggcatggaagaggcgatcttttccatggcatacttcatggcgtagcccttgcctcgattggtttcgtaagacagcagcgtgacctcgtcgggtagttgatcgaagagaggcttaaaggcctcgccgcttccgtcgtcgacaacgagcacttgaagctttttggcgagaagggccttcgcgaaagaaagaaggctttcgtcgggctcgtaggcgggaattaaaaccagatcccgattggattcaaagacgcgatcagtcattgtatccgcccggggaaatgaattcgattttcatgggcaccgtgcggcgcaaaaatgccgccgtgtcctctgttagtttgcctgtaaaagccatttgcaatttcccctctccttcctttttaatgtttccgcccagttttcgcatgagctggcgcaccgtggcgccgttgccatctaaaatttccatgtgggcgggtagcagttcgcggaaaagatcccgataccaaataaaatgggtgcagcccaagaccaaagcgccgtattcttccaatggataggaggcgagaatggtttccatgtcgtagcgcacggcgtcggtgttaaattccagccgctcggcgaaatccaccaaattcggcagaggcagaatgtctaccaggcggtcatcgtcgaatttttccacgagtcggcgcaggcgggcgctctttcccgtgccctccgtggaaagcaccaggatccgctttcgatccacatcgtgttcgatggcgggcttaacggcaggctccatgcctacaatgggcagggtgtatttctccctcaggtaatcggcggatgtgaccgtggccgtattgcaggcgaggagcacggctttcggcgaataggggcgtgtggcctccatcatgcgatccaaatagccgcgaatttcttcggcatccttcgggccgtagggcacgtgggccgtgtccccgtaataaataaagtgctccgagggcatggcgcgaatcgcttctaaaagcgccgtgacgccgccgaggccggagtcgaaaataacaattgaatcccccataagtcacatcctttctgaaaatattataacagatgaacgagcgcagttcgcgaaagggccctttcatatgtcaaagtttcgttaaaagggcataaaaaaagccgccctataggcgactgtggtggagatgaggagaatcgaactccttacctcttgaatgccattcaagcgctctcccaagtgagctacacccccgcaattgagttcttgattagtatacggggatgtaagaaaaatgtcaagccctttttaaagaagaatcgaaaataaagcattgctcccgaaattcggcgcgtcccggcgaaacgaatggtagcgggaatcggtgagggtatcggcgggatcgatgtcgatgttttctgccaagacgccgacttcacaaagcatgcgggcgttggtttgcttcatgtcgataaagtcgtgggttgcatcgtcaggagaaatgacatcacttgcaaaagcaaatgccgctcgccaaagggcgcttacttccttgcctacctgaaagctttcggggccgatgcagggcccgataaaggccaagacgtccttcgggtccgtgccgtaatgctccatcatggcagagagggccttcgccggcaatttctgtaccgtggagcgccagcccgcgtgaatggaggccatggcggccttcgccgggtcgtaaaggagcaccggcgtgcagtcggaaatgcgcgtaacgagagccacgtgcttttgattcgtaatcatggcgtcggtattggccacaatgcggtagccgaagtaatcgtcgccgcggcgggcgccgtcgatgagggccacgtgatcggagtgggtttggttcatataatacacgtcctttgcttcgacgccgaggtcgtgaagaaaacaggcggtgtcttttttgaagtgatctttgcctaatgcggcgcgaaaatcgtagggctttttcgatacggcaaagcgtatccctttagaatctctgagtaacacagtttatccgcctttccatctttctttccattggttataatggtgctggaggattttatgagcaaatttaaaaagaggattggcctctttctttttattatagtcgcggcgagcttgggaatcaaaggaaagagcctgcttccctgcaaagccgacgccttgtttcaggtaaagaccgatcaggaaattttaaatatgagcattttaaaaggcggcgtgctggccaccttcgacggcgaccgcctggccttttacgacagacagggcaggaaaaagacggtggaccgcttaggcgaagggcaaaaggcctttttcggcgaatccgacgccatgctctacgacgaagacgtggacaaagtggcggtattcggcgaagacggaaaggaaaagcaatcctaccgcattgacggcaccttgtttaatgcccgggtgcaagaaggcacgcggattttccattgccgctacgacgacggggagaaacttttcgtcgccaccgacggcggggggctcacggaagtttttcagacgaaaaattacattttggactaccgcttcgattcatctaagtcctttgtggtgacggagctttccaacgcggccaacggctacaagaccacggtgtatcgcgaagagggaaagggcgatcgcggcgccatggcctcgacggaatttcccatggaagtggccatgcgcatggtcatggggaagtaccctgtggtggtgacggaaaagcatttgtacggcttagataaggagttgattacacaaaagacgccgattttatccgacgtcaccatgtacaagggccgtctctattctcttcacagcggtttgctcagcgtctacgacggcaagcttagggaaaagaaacactacctgatggaagccaatgtggaccgactggcggtaatgaatgaagggcttttcgcctacggcaatcgggagattctctcgcggcccatgtcttcggcccctgtgcacattcgcttcgacgacaatcaggaaaagctcctcttaaaagacggctacctggccgcctacgaacacaaacacgtggccttttatcgtctgaagccccttttttctttcgggaagaataagattcaggaattaaaacatagagaataaacagatgggagatgttatggctgaaattaaagcctttttatttacggcgccggggaaattaagtattcccggcatgatccttgccggaatctttctcttttttgtctcgcgaattgccgtgagccttatcggaaaagtcttgagcaaatacatcgccgatcgcgagaaaaaagcggtgcgaaacaagcgccgagtcattaccttaacccatttggcggggaatgcgtcgaaatacggcatctacggcctggccctgttgatcttcttaaacctttgccgggtcaacacatccaccttaattgccacggcggggatcggctccttggccattgccatgggggcgcaggaaatcattaaagactttatcaacggctttttcattatcttcgacgatcaatttgccgtcggcgaatacgtggaatgcgccgacaaaaaaggctatgtggtgtctttgggctttcgcgccacggtgattcgcgatttcgacggcaccctccacaccatccccaattccgccatccgcatcgtcaccaatcgggggcgaggaaaaaagcgggccaaggtggtggtgcccatcgatcgcagcgaagatccggaccgggtcatccatgtggtggaagctgctgcaaattcgttaaaagaaaaatacccgaagtccaccacggaagtgtggggcgtgacgggttttatcgccaacggctacgaaattaccgtggtggcctgggacgaagcgcgcaatcaatttgacatcgaatacgatctgagaaaagccatcgctaaggccatgaacgcggaaaacatcaacatacccatcgcccgctacgagggcccctttaaaggagaggtgaaatgaaccgactgtattacgaagaaggcgacgtggtcaccttaaaaaaaggccacccatgcggcgaaaatctgtggaagattttacggaccggtgtggacataaaactggcctgcatgggctgcgagcgcaccatttggatggcccgcatggattttgaaaagcgcgtcaggaaaattaaagaaggcgaaaaaatggtggccatcgtccaccatcggccgaaagacgacgccgaaagtgtataaatgatgaaatattcccctttcgttgcgggatcggacgagatttgttaaaataaaaagttagtgaaaggaacgtgtataaatgtctctattagataaaatattcggcacctactccaatcgggagattaaaaaaatccgcccgaccatggaaaaagtcctcgctttggacagtgccatgcaagaattaaccgacgaagaattaagagaaaagaccaccgaatttaaaggccgcgtcgccggcggcgagtcccttgatgacatccttcccgaagcctttgccgtggttcgcgaagccgccgaccgcgtgctggggatgaaacacttccccgtgcaaattctcggtgggattattctccaccaaggccgtatcgccgaaatgaaaaccggtgaagggaagaccttggtcgcaaccctgcccgcctacttaaatgccttggccggcaagggcgcccacgtggttacggtcaacgactacttggccgaacgggataagcaatggatgggcaaagtctattccttcttaggcatgaccgtaggctgtattctccacgacatgacgccggaagagcggcaagtggcctacggcgccgacattacctacgggaccaacaatgaattcggcttcgactacctccgtgacaacatggtggtctatcaggaaaatcaagtacaacgggaactgtactactgtatcgtcgacgaagtggactccatcttaatcgacgaagcccgtacccccttaatcatttccggtcaaggggatgaatccacagagctctacacccaagcgaaaaacttcgtagacaccttgaccagcagagtcaaggatcaggcggaagaagcggaagaccgctttaaccgcgaattccgcgaagaaaccgtagactacgtcatcgacgaaaagcaaaagaccgccaccttgaccgaaatcggccaaggaagggctgaaaaatatttcggcatcgacaatttaacggatcccgacaacacggagcttctccaccacatccaccaagccttaaaggctcagggcaccatgcataaagacatcgactacgtggtggacgacggcgaaatcattatcgtcgacgaatttaccggtcgtctcatgtacggccgtcgctactccgaaggcttgcaccaagccatcgaagctaaggaaggcatcgaagtgcgggccgaatcgaaaaccctggccacggttaccttccaaaacttcttccgtatgtacaaaaagctcgccggtatgaccggtacggccatgacggaagaatcggaatttagagaaatctacaatatcgacgtcgtggaaatccccacgaacaaagaagtgatccgtgtggaccaagacgacgccatttatcgctcggaagatgcgaaattccgcgccgtggccgatgaaatcgcccgtcgccacgccacgggtcagccgattcttgtgggtaccgtatccatcgaaaaatcggaaaaactttcttcctatcttaaaaagcgcggcattccccacaaggtattaaacgccaagcgccacaaacaagaatctgaaatcgtcgcccaagccggtcgctacggcgccgtgaccatcgccaccaacatggccggtcgtggtaccgacatcgtcctcggcggcaatcccgagtacatggccaaggaaaaaatggccagagagggctttgaaccggaaatgatcgatgcggctgatagctactttgatacagacgatgaagaaatcctggcagccagaaagcgcttcagcgatcttcgggacgaaattaaagtggaaaccgacgccgaaaaagaaaaggtcatcgccgacggcggcctgcacattatcggtaccgaacgccacgaatcccgtcgtatcgacaatcaattgcggggccgttcaggtcgtcaaggggacaagggtagcacgaagttctacatttccgccgaagacgacgttatccgcctctttgccggcgaccgcttcaaaaaggtcatggacggcatcgatgcgccggaagatgagcccatcgaagcaaaaatgctcacccgtctcatcgaatccgcccaacggaaagttgaaggcaacaacttcagcatccgtaaaaacgtcttgcaatatgacgacgtcatgaacaagcaacgggaagttatctatacggaacgtgaaaaagtattaaaaggagacgatctttccggcgacatcgcctccatgacggaagatttaatcgacgacaccatcgacttcaatgtaaaagtcaacgacaaacacgaaaaatacatcgactacgaaagtatttaccgcttcggccgcgccgccttcgatttcgacgaaaactttatggacggccacgaaaaggcaagcgccgatgaacttaaacgcttcatgaaggaagaagccaaagaagcttacgcccaaaaggtggaagaattcggcgaagaagccttccgcgaagtggaacgcgtcgttcttctgcgcgtcgtagaccaacgctggatggatcacatcgatgccatggatcaattgcgtcaagggatcggcttaagggccgtcggccaaatcgatccggtgcgcgcctatgccgaagaaggcttcgatatgtttgaagccatgaacgaaagcattcgcgaagaaaccgtgcgcattatgttccacgtgcaaaatcccgaaaagatggaacgcaagcaagtggccaaggaagtgaaaaccgtcaatcccgacagcggcgtacaagaacccattcgtcgcacggagaaaaaggtcggtcgtaacgatccctgcccctgcggcagcggcaaaaagtataaacactgctgcggcaaaaacgcctaaatcaggaaaggatccctatggagcaaaatatatttctggatcggggacgcctggaagcggttgaagagctggtggagcgactggccaagagcatcgacatcgagggtctgaagcagacgaatcaggcgcttacggaaaaaaccatggcgcccggcttttgggacgactccgaagcggcgcaaaaggtgatccgcgagcaaaatgccattaaatcccgcaccgatgtgtacgacgaactcgtggaagccatggaagagtcggccgtgatgttggagcttatggaagaggaagatgacttcagtttctacgatcagctcaagaaaaatctcgatgccattgaagaaaaggcccacgattttaaaatccaaacccttctaaacggcgagtacgacatgaacaatgccattctcgccattcacgccggcgccggcgggacggaggcccaggactgggcgaatatgctcttaaggatgtatacgcgctatgccgaaggcaagggctattccgtggaagtgttggatatactggaagaagacgaggcgggcattaaatcggccacgcttctgatttccggaccccacgcttacggctacttgaagtcggaaaaaggcgtgcatcgcctggtgcgcatctcgccctttgatgcggcgaaaaagcgccacacctcctttacttccgtggacgtctatccggaactggacgacaacatggatgtggagatcaatcaggacgatttaaaaatcgacacctatcgctcatctggtgccggtggtcaacacgtcaacaccaccgactccgccgtgcgcattacccacattcccacggggattgtggtgcaatgccaaaacgagcgcagccaaattcaaaaccgcgagcaggccatgaaaatgcttcaggctaaactcgtggcattaaaagaagaggaacaaaaggaaaagatcgaggacctggcggggaattacgcccaaatcgcctggggctctcagatccgctcctatgttttccaaccctataccatggtgaaagaccatcgcaccggcgctgaagtgggcgatgtgaatcgggtcatggacggggatttggatccctttattaatgcctatctggaagataaagcggaagcttaacaatagaaagaatgaatgagaagagaggctcgccctctctttttaaatggaggaaccatgattatcggaaggattttagccgaggaatttcatatcgcctcggagaaaatggacgccacgttaaaacttttagacgagggaaataccgtgccctttatcgcccgctaccgaaaggatgttaccggcggcatcgaagacgaggtgcttcgtaaaatcgaaggcagaaaaaatgaactggagaaggtggcggatcgccgggaaacggtgctgaataccatcgaaggccagggcaagctcacggaagaattaaaggcgaccattgaaggcatttgggatatgcagaccttggaggatttgtatcgcccctacaagcccaagcggcgaacgcgagccaccgatgctctggaaaaaggcttggggcctctggcggaaaactttttgtccgacgggtctttaaaggattttgaagatgaggtagaggtctttgaaggcttggagaaagaagagattctaaaaggcgtgagcgacattgtggctgaggccgtctcaaacgatgcgaaggtacgccgcctgcttaagagctatttgtggcgccgcggcgtgctcacgacagaagcggggaaggaagcggatcccgcctacagtatgtacgatgatttcaccgcgcccctaaaagaggtgaagaaccacaacatcctcgccatgaatcgcggggaaggggaaggcgccgtaaaggtaaagattcagtgcagcgaagagacgttgatctccatgattcttcaggtggcaggccctaacgacgacaagcgggcggcctttcttcccatggcggaagatgcttttaagcggcttctttttccctctctggagcgggaaattcgccgggatttaaaggagcgggcggaggctgatgccatcgaggtctttgcgcaaaatttaaaacccctccttctcatgccgccactgggccattacgtggtcttgggcctcgacccgggctaccgcacgggctgcaaggttgccgtagtcgatgaaaacggaaagtttttagacaacgccgtaatctttcccgcgccgccaaagcccagggtggaagaggcgaaaaaaatcatcgagggtctcgtcgaaaagcacggcgtgaaatttatttccatcggcagcggcacggccagctatgaaacggagcaattcgtctcgggtctcattgaagagaagcaatgggacgtggcctatgccgtggtaagtgaagacggcgccagtatctattccgcatcggaactgggcatcgaagaatttcccgatctggacgttactgtccgtggcgccatttccatcgcaaggcggcttcaggatcccttggcggagctggtgaaaatcgagccgcggcacattggcgtgggccaataccaacacgatctggacaaaaaagccctggacgatcgcctgcagggcgtggtggaaggcgccgtcaacgaagtgggcgtagacattaattccgcatcgccctccctattaagcttcgttgcgggcatcggtccgaatctcgcgaaaaacatcgtggcctatcgggaaagcgaaggggcctttaaaaatcgccgggagatcaaaaaggtgaagggcctgggcgagaaggcctttgaacaatcggcgggctttttgcgcatacaaaacggagaaaatattctggaccgcaccggcgtgcacctggaatcctacgacttggcggaattgatcctgagggaagaaagcctcaccgacgaggaaagagaaatcctcgcccatgccggcgcctttaccgtggaagacatacgcagggagctggaaaaaccgggccgcgacccccgcggcgacacggaagatgtgggcctgcgccgctcggcactcaccatggaagaattggtgcccgggctggaactggaaggcgtggtgaaaaacgtcgtggacttcggcgcctttatcgacatcggcgtcaaaaaagaagggctattgcacattacaaaattaaaaggaaagagaaatcgcgccatctacaatctgttaaaagtcggcgaccgcatgaaggtggtcatcgaaaaagtggataaagaacggggcaggatttctctggatgtaaaagaataattgaagcggggcggcgtccccgctttttccctatcgcgggagaaaaggattgaatagaaatagtgtatgtggtatactatccgagatagtactgttttattacggtggttgccgatttaatcggtagtttttatctgatgcagggtatgcgatgagtgtttgaaaagtgcctgatgtgggatttttcgagccgttaagcctatccgttggctcagagtttttacaagaaaaaatcagcaaaacaaaaagcatcgacaccatccgaagattgcgatttaggagaacctaagacggcagtctttttttggttccctaatccttgaattaggagtgacaattatgctcagttctttgctgagaaaccttgaacttacgaagaaagattttttcaaaattctgctgggttgcgccattatggctttcggcgtggtcaatgtccacgaaccctctcaaatcaccgagggcggcgttttgggcttgggcctgtttttaaagaaagtcgtggggctgaatttggcctatgtctcgccgatactggacggcatttgttacggcctgggcttttccatgttgggcagatgcttcttaaagaagtcggccgttgccacattgggcttttccgtcttttactggatttttaactttatgggcccggtccttcccagtttgtatcacctgcctcttctcgctgctatagccggcgggatctttatcggctgcggctgtggcattgccgtctcggccgggggctgcgccggcggcgacgacgccctggccatggtgatctcgaaaaaattgaagtggcccatttctcgcgcctacttctttaccgatgcagttgtacttacactgtctcttacctacattgcaccgacgcggttgatattctcttttctcacgacgattatctcctcttacttagttggtcaatttgaattaaagatgaaggcaccggcttggcaagtgagccaaggcggcatcgagaaaaacgcataattgagtatgaaaatagaggcagagacgattgtatccatgtctctatttttatatgaaggtataaaagatatttataagataaacgattatgactaaaagggcggaacggaaaaagaataaacaacgggacaatgcagagttgtgtcgaagggagatttaaatgatgatggcaaagaggaacctaggtaatacctatctatttcgaatgattccttgggcattgtttccaaatgctgtcggatttcttttcagcgttatgtttggggatgatcttgtggtctgtcgaatgagtcagcttctcactatctttctgtggcttttgctcttgcgtggactcagaaaaagatcgcaaattacggggcgggattttatcaggtcgcagattgtatctcttgttatcgcattgctcgttaatgaaatcttggttcttttgccattagaaatcatcgacgccgggcggagcgtttcgtgggattttccttttgtggatctggcaacattcgcgggttcgaagttcccgctcattgccctatggcttgccacgctcatcgtcgatctgttctttgttgattttcgtgtgaagtcattgcaataggtatgcgtacaggttgagtgcggcgttaagaggtaagattacattcaggaaagtcataatcatgaaatgacaaagaagaggcatatgccattgatcggcaaagcctcttcttttttcaattaaaagcgtatgtcgcctgaagtctgaaccggcaagtcacggcttttatggattttctattttctttgttatttttgcagcttctttaaaaagtatagcatgacgcgggtttattgcgcagaacttgccttgatagtataattgttacaagaaatttttttcggccatcctctatggtcgagcatatcatctatatgcaaggaggcatacatgtcaaagaacttttacgttacaacgcccatttattacccaagcgacaatttacacatcggccacacttactgcaccgtggctgccgatgcggtgaagcgttttaagaccctgcaaggctacaatgtcctgttcactaccggcaccgacgaacacggccaaaagattcaggaaaaggccaaggaagccggcaaggaacccttggaatacatcgacgccattgtcgacgataccaaggctctctggaagaccatggacatccactacgattcctttgtgcgctccacggatccccaacacgaaaaaaacgtgcaggcgttgttccaaaagctctacgacaagggcgaaatctataaaggtgaatacgaaggctactactgcacgccctgcgaatccttctgggccgaatcccaattgctggaaggccatttgtgcccggactgcggccgcgaaacccacttgcaacacgaagaaagctatttcttccgcctttctgaataccgggacaagctacttcaatactacgaagatcatccggaatttattcaaccggcttacagaaagagcgaaatgatcaactctttcttaaaagacggattggatgacttgtccgtcacccgctccaccttcgactggggcgtgcccgttcccttcgacgacaaacacgtcatctacgtttggatcgacgccctgtcctgctacttaaccggcgcgggcttcggcaccgacgacgagcaatttaaaaacttctggccggcggacgtccatttggtaggcaaggaaatcatgcgtttccataccattatctggcctgccatgctcatggcactggatctgcccctgccgaaacaaatcttcggccacggctggattctcttcgacgacgacaaaatgagtaagtctaagggcaatattatttatcccgaacccattatcgacctttacggcgtcgatgccctgaaatatttccttctgcgggaattttccttcggccacgacggcagcttcaatgtacaaagctttatgaagcggctgaattccgacttggccaacgacttagggaacctggtctcccgcaccgtctccatgatcgaaaaatacaacgacggcatcgtccccgcgcctcacggcgaaacggccattgacaaggaattgaaggatctggccgtcagcatttggggcgagctggaaaaagaaatggagacctatcaattctccacggcactggaagccatttggaaattggttcgccgcagcaacaaatatgtagacgaaaacgaaccctgggtcttggccaaaggcggcgaagacgaaaagaaacgcttagatacggttctctataatttggcggaatctctgcgcatcgtctccatccttctgtctttctttatgaacaacacggccatttccatcgccgaacaaattacggcgacgaaggatttcgaagcgaaagacgccacgcgctggggccttttggaaccgggcaaacacgtgggcgaaaagaagatcatcttcccgcgcctcgatatcgaagaagaaacgaagcgcctctgggatgccaaccacgccctcattgaaaagcggaaagcggaaaaactcgccaagggcgaagcggtggaagaggaaggggaagccttggatctgaagccggaaatcaccatcgacgacttcgataaactggacattcgcgtcgccaccgtggattccgtggaagatcaccccaatgccgatcgcctctacgttttaaatctcagcgtcggcgacgaaaagcgggtcatctgctcaagcattaaggaatattacacgaaagaagagctcacgggcaaacaaatcctgctcttggccaacttaaagcccacgaaattgcgtggcgttctgtctcaaggcatgctccttgcggcggaagacaaagacggaaaattgtccctggccaccaccatggaacaattaaaatccggtgcaagaatcagttaggaggatctatgatagacgcccattcccatttggaaaatgaggcatttgacgacgatcgagaagcaattatcgcctgcatggaagaagacggcctggatgccgtggtgaatgtgggaagcgatattgaaacctcccgcgccgtggcggacttggcgaaaaaacacgaccgcctttacgccgtggtgggggttcatccccaagaggcgaagtactacgacgatgccgtgcgggcggaattggtggagctggcaaaggacgaaaaagtgctggccatcggcgaatgcggcttggactactactatgaaaattcgccacgagacgtgcagcggactgtctttcgcgccatgtgtgatttggcggtggaagtggatctgcctctggtgatccactccagggatgcggcggaggagacctacgacatcgtgaaggattttctcgaggcccatcccggtcaccacgtgctcattcactgctacagctattctgtggaaatgatggcgcgttttatggccctgggctgctacatttccctgggcggcgtgaccacctttaaaaacgccaaagtgccgaagaaagtggcggcggccgtgcccttggatcgcctgctcttggaaacggactgcccctacatgactccggagcccaatcgaggcaagcgcaacgagcccaagtatgtggcttatgtggcgaaaaatatcgccgccctcagggacatggacgtggcggatcttgtggcgcacacagatgaaaatacgaaacggttttacaaatggaagaaataatacaagaagtgatcgtggtcgagggaaaagatgacatcgcccgggtgaagagcgccctgaaatgcgatgtcatggccacgggaggctacgccttcggcgaaaaatttttgcgcgagctgaaaaaagtggagcgtcgccgcggcgtcattattctcacggatcctgattacatgggcaagcaaattcgccggcggcttacagaggcattggcctcgccgaagcaggcctatttgccgcaggacaaggccctttataaagacgatatcggcatcgaaaacgcacgggccgaggatattcgggaagcgatttatcgtgccaagcccatgaaaaaagtctacgaagaaacatttaccaaggcggatatgattcgctacggcatgacgggggcatcggatgcggcagggcgccgcgaaaaaatggccgaggcattaggcatcggtcacggcaacggcaagcaatttttgcagagactcaacagcttcggcatttccgtcgaagaatttgagcgcatctatgaggaggtgttcggtggataaacgactatacagcccggccaggatccgagagattcaagagaaatggggctttcgctttcaaaaatccctgggccaaaactttctcatggacggaaacatcgtccgcgccattgccgacaatgccgacgtcggcgaaggggacgtcgtcttagaaatcggcgccggcatcggcaccttaacggaagaattggccctacgtggcgcgaaagtattttgcgtggaaatcgacgagcacttaaagcccattcttgatgaaaccctgggcgcatacgaagacgtggagattttctacaaagatgtattaaagacggacctaaaaaaagaactggcggcccgcttcggcgatcacaagattaaagtggtagccaatctgccctattacgtgaccacgccgattttgttgcatctttttaattcggacctgcccttggaatcggttcacgtcatggtgcaaaaagaaatggcaaatcgcatggcagccaaggccggaacgaaggcctacggctccatctccgtttatttacaaatgcgctccgatgtggccgtggccctcaccgtgccccgcacctgctttatgccccagcccaatgtagacagcgccgtcttggcccttacgaattttaaaaccgatcaccgggaaaatctgaagcgggccgaggccgtggtgcgggcggcattttccaagcgaagaaaaaccgtgttaaacgccctgtccacctacggcttcgaaatcgaaaaagatcagatccttcaagccttggtcgacacgggcattgaccccggtcgtcgggccgaggccattaccgtggaagagtatcggattttggcgaaaaactttccgaaagtagaaaaggagggcgactaatggcggaatacagcgacgagacatttcacgcctttgtggaaaacgaacctttaatcgaaagcttgagcggcatttttaaagtcatggccgaccccacgcgattaaagattttgtacgccctcatgttgggcacctgcaatgtatcgaaactggtggaacttttaggcatgagccaatcctccatttcccatcagctcattcttctgaaagaagaagggcttattcgctcgagaaaagaagggcgcaaagtctactactccctggatgacgaccatgtggcgaccctctttaccatgggctacacccacgctatgcataaaatcggcgaaggtgattaagcccatacctcgcgggtataaattgagtaagcgaaatcatgaattattttggaggaatgacaatgtcagaagtaaaagtttatacaagcaacacctgtccttattgcaccatggcaaaggattatctgaaggaaaaaggcatcgaatttgatgaaaaaaacgtgcaaaccgacgcagctgcaagagatgaattgatctccatgggctacaccggcgtacctgttttggtcatcggcgaagaagaaatcgtcggcttcgaccgcgcacgcatcgacgccgccttggcaaaataacgaaactgaaaaaggggcttcggcctctttttttcgtgccgaaaagcaaaagttttctaaaaaatagcgaagacatttctttttcggcggcggttcgcggcccctgtgttataatggcatacgaaaaaagaagtggaggagattatgaagtttctaaaaaaatacatggcagcggctctggcccttctcatgctcgttacgattcaggcgccggtattcgccgatgccgtggaaggcgacgtgattctgtgtttcggtcaggaccttacgcccgaacaacgagatgccttgatgaagcgctttaacggatcggacaaggatcaaatcatcgaggtcaccaacaaggaagagcacaaatacctgggcgatttcgtgcccgaatcgaagatcggtcgcaaggccatttccagcgccagagtggaatacaccgccgaaggcagcggcatccaagtagaaacgtcgaagcggattcgctacattacccacgatatgtatcgccaagccctggagaccgcagggattaaagatgcgaagatcaccgtggatgcgccgatgaatgtcagcggcacggcggcgctcaccgggatcatgaaggcctacgaaacttcgaccggcaaaaaaatcagcgacaaagtaaaaaaagcggccaacgaagaaatggtcgtcacctcggatttagcacaacaggtgggtgcggacaaggccacgggtctggtgaaagacattaaggaaaaaatcgccacggaagcgccgaagagccgggaagaagtgcaaaacatcatcatcaatatttccaacgagtacaatcttaatctcaccgccgagcaaacggataagttgacgaactttttcgacaatttacgaaagacggacatcgactggcacggcttggctgataaagcaaaaggcgccgccgatcaggcaaaggaatacattaacagcgaagagggccaaagtttgattcaaaagatcaaagcttttttcgccgatctgttcgatagcattttcaacaaataaaaaacccggccagccgggtttctcaatgaaaaaggcctccccatgggggaggcttttttgttttgttattttgcttcaacgattctgtttaaagccttcatcagttcgtcggcatcaaaaccgtgaacataagcagcttcttctaaggattccatttgactggaggggcaacctacacagcccatgccaaattgcatgaggacacgaatggcttccgggtattggcgaaccaaatcgccgattaaagtatcttttgtaatcatcctagcctccttaagctttattttctcattcattttatcctatgggaaaaagaatggcaagttagatcaaattttccttcatgtaggcgatgatgtcgtcggattccagcatccatgtatcgccgtagtggaggcagggaacttgtttgccgccgctgccttccaataatgcctttttcgcttcgtcatctttgtctacgaagacgacgtccaccttttctacgccctctttttccataaagtcgatgacttttttgcaaaaggggcaataggtagccgcgtataatttataatccatggtattcctccttcttcttgttatttgttttatacccaagtgatggctattcacacatgaagggatgaattgaaaaaaagtctaatccttctctaagtcgtaaaaatgaccgcggccatgtggtatgctttatttgaggtgaaggtatggatatttttaacagcatcggcaaaggttttgaagacctttccaatcaggtaaaagatttaagcataaagggcctttacagtgcgaaggaggcctccaatgtggcgaagttgcgcatgcaaattcgcgagctggaggcgaaaattctggaggaatacacccacttaggggaagtttattatatggaaatgcgggagcagtcccatttggcggacacgacgagctccgagctgctttttgccatcgacgaattgcaaaaagaaaaggcgagtctggaaaatcgcatggcgtcaaaggagctcgcgggagaggtgttccgctacgaatgcccggattgccacacggaaattaacaaagatacgaatttctgtccccactgcggcagaaaaatcgagaccatcgaattaattgccgatgatccggattttgtagaatgtaagaactgccatttccaggcggaggccggggccacgtattgcccgcgctgcggcacgcctttggcataggaggtattgatggataaaaaagaattggacgaagcgcaactcagggaatccttaggcgatgtggcctatcacgtgacccgagaaaaaggcacggagcttcctttttcccatccctacgatcacttattcgacgaaggcatctatgtggatgtcattacgaaagaggtcttgtttctctcgaaagataaattcgactccggttgcggctggcccgctttttccaagacggcccccgacgcaccgattaaagagaccaccgacgggcgctacggcatgattcgcacggaagtggagacggaaaccacccacttgggccacgtctttaacgacgggccggcggaagcggggggtttgcgctactgcattaacggcgccagcatcgaatttattcccaaggaagaaatggagaaaagagggtacggttcttggctggattgtctctaaattgaaaagactagaaacctccgacgggggtataatagatatatacgttagtgaactaaaggaggtatcatgaaacggaaatttttatccctggcactggcattggccatggtcctcggcgtcatcgccggccccatgagcgtatttgccgcgccggcagaagaaaccaagaccattaccttgcttcacaccaacgatgtccacggacacatggtagcggagtacggcaaagacaagaaactcaccaatatcggttatgcacgggtgaaaacttatgcggacagcattaaaaatgcggtgcttttagatgccggggacgtgacccacggtacggcactggccggtattgaaaacggcaagggcgtcatcgacgtgatgaaggccatgggttacaaggccatggtgcccggcaaccacgatttcaactatggttatcaagccctggtggattttaaaaaccaagctgcacccgcaaaaggttcctccgaaggcttcgatatcctggctgccaacatcattaaaaacaccggcaccaacgactttaaaggccaaaccatcctcgatgtagacggcgttaaagtcggtatcttcggcattgctacggaagaaaccaaagtaaaatccaatccgaagaacaccgaaagcattaccttcttaaatcccgtcgaagtggcgcgcgcccaagtgaaatccttgaaggatcaaggcgttgatgtcatcgtcatgttggcccacgtaggcatcgacgatgctacggttgtaaaaacatccgacatcgccaaagctgttgacggcatcgacgtcattatcgacggccactcccacaccaccttgcccgaaggcaaagtcgtgaacaataccctgatcgcgcaaacgggctactacctgaaaaacttaggcgaagtaaacatcaccttaagaggcaaagatgttatttccaagaccgccgttcttcgcgacgccaaattcttcgaaaacattgaagaaaacaaagacatcgcaaagaaactcgacgccatgtacgaaaacaacaagagcaaactggaacgcgtcgtcggcaccaccgctgttgatttagatggcgcgagagaacatgtgcgcgcgcaagaaaccaacttcggcaacatggtggcagacgccatgcgcgaagcggcaaaatccgacgtggcgtttacaaacggcggcggcatccgcgaaacgattcccgcagggaagatcaacatgacccaaatctggaccgccttccccttcggaaacaccattatgaagatcgaagtctccggcgccgatttactggccgctttggaattcggcgtagccgatgcaccggcacctcaagggaaattccctcaagtttccggcgtcagctttaaatacgatccgaaacaagaagccggcaagcgcgtctacgacgtgaaggtaggagacaaggaacttgatctcgaaaaaacctacaccttagcaaccaatgactttatggcatccggcggcgacggctacaccatgttcgccaaaggcaaaaagctcggcgactacggtatgtacacggaagttctggaaaaatacctggctgaacacaaaaatgtggacccgaaggtcgaaggccgtatcgtggccgaagcgaagggcgatgtaaaacccgtcgaaccgaccaacgccttcaccgacatcaagggccactgggcagaaaaggtcatcctttccgcaacgcaaaaaggcctctttaaaggcgtaagcgacaccctgtttgcaccgaatgaacccattaccagaggcatgctcgtgtccgtcttggcccgcctggaaggacaagatgttaaacaaacggcagccaatccctttaccgacgtcaaagccggcgaatggtacgaaaacggcgtcgtttgggcagccaagaacaaatacgtcctcggttatgaagacaatacctttaaaccgaaccaaaaggttacccgcgaagaaatggccaccattttaggtcgctacgtcgaaggcaagaaagttccctacaccctggacttgaaagaacccttctccgatcaaaaaatgatttccaaatgggccctcgaacccatcgacatcgttcgccacaccaacttaatgcaaggtcgcgaaaacaatcaattcgtacccaaggcatcggctacccgtgcggaactggccaaagtcatggatgcgctggatgaaatcgtccgcgctacgaaaaaagtcgatgaaaaggtaaaagcggaagaaaaaggtaagaaacccgaagaaaagaaagttgcacctgaaaagaaggcaacggaagataaaaaagcagtcgaaactgaaaagaaggcagcttaaatgaaaatgaaaagagagccggcgacggctcttttttcatgggaagaaaagggattgtaaacagaaggtgaaaagaaggttaaaaaatacttggattcacgaatatttctcttgacccaccctcttttttgcggtattatatagcgttatttgccttgacaaacagcggggattattgtatacttgtatcacatataattgtgtggatagaagggcggtcccaatgacacaaatggatatgataaaaaacgaattgtcagagcatattggcaaagaggtaattgtgaaggcaaatcgagggcgcaagcgcattgtcacccgtaaaggcgtgctcacggcggtctacccctccctgtttgtcattagcatctcttccgacgatcgcagcgatcgaaacatttcatttacctatgccgacgtactcacgtccacggtaaaaattatgatcctggaagaagatgcggattcggctaaattaaaaatatcgtagtgaaaggctcccttggcggagctttttttatgggaggataccttgcgcgcctacggaaaaatcaatgtcggcttgtggatttcaggcaaacgagccgacggctaccacgaaataaaaacactttttctgcccatcgggctatatgacgagattgaaatagtaaaaaccgccgccttttccattgaagggcccaattacggggagaaggatctcatggcgaaggcccatggctttttagaaaaccgcttcggccccttgcccgtgaagatagtgattcaaaaaaacattccggcgggggcgggccttgccgggggcacagccgacggcgccctggttttaaaggccgtgagagacatttacagcctgcctgttgccgatgaggaactgatccatgactgtgctgtgctgggggcggatttcccatattgtctttacggcaaggccgccgtaggcgaggggatcggcgatgtgctccggcctgtaaacatcccgccctatccggtgcttttgctcaatccgggctttgccgtgtccacgaaagcggcctacgaaaaggtgaaggcctttcacgaaacagccgctgtagacgatgcggtgaatcttctgaaagaaggacgactcgaagggctcagggatgtggtggtcaacgacctttatcccggcgtcagcggtatgcatccggtcatcgacgggatgattcgcgatctttacgaggcgggggcggccttttcccacatgtccggctccgggcccacggtatacgctttgtttaaaaaaatagaggatcgggacgccgcctatgctatactaagaaagaagtataaaatcgtaatcaaaacggaaacggcgggagaggaacatggaacgattgggaatagccatcaatgacaaagcgggcatgtatgcggcggccgcgctgattcggcgccgcccggatctttcttttacgatcctctacgatcccgccacgggcgaagatttttacaaaaaaaataaagcccgcttccgctccatgaagatggatgctgccttctgcttaacccaagacgcagatggtgattttgccgagcttctaaaggaggcttccgcaaaaggccgcaccatgggctatcgaaaccacgatgtgaacacggaatttttggcccacaccgtggcagacggcctttttcaccacagctatgtattaaacatgatcgattcctacgaggcgcgctttgaaaaaggcggcacgttggtgttggcccttttgggctacagctaccggcgagacgatttttcccgcgcgtttaaagaaaaggaaatcgccgtggcagatcccctggacctatggcttgaaaccttccccgaaacagaggaggagggtgagtgccgctttttttggacagtatgggacttttccgtggagcggttcatgggcgagctcttaggcgaagcggtgcgcttcagaaaatattatccccacccctggctacggggcgaggtgtcgaaaaaaagataaaacaaaatgaccctctctgcatgatgcactgacccccaaaagttggatcgagacatccactcttgggggtcttttcatggaaaaaacaatgacgaatagaagaaagagaagattaaaatcatttaaagcagatagagaaaagataattgccgcgacaacacgcccattaaaaattcttcagttcactgaaaagagaagttacgtctatcgaagccggcaaggatgcgcggaacaatcaaacacttaaatgcgtcaactctaacgatcgattcaaagaaaagtaaaaaggcgagattccgaagtaaaatcgtgaacaaatgaatacaacctagatcaaatgcaatataaacaacatactgcaagcgaaacgttgagaattatgaccgaattaacaggagtactctatatataaattgtttaggcttcgctcttgacaaaataaaatgagaatgatagcctatattaaaagaacgagtgtcggtcgattggtggtgaggttttgacaaaaagaaatataaaggatccggaagaaagaaaacaggagcttataaatatagcatccaggctttttgagaagaatggatatgagaaagtttctgtgcgagatattctcgcagaagttaatggtgcacctggaatgttttattactacttcaaatcaaaagaagatattttcttggcgtgtatggaaacatattttgatgaaaaactaaaaaataagttggatatactccaaaacaaggaaatagattacgaagaaagaataaaaactttaagggaacttatagtaaaagatatcggtcagtttacgacaagatataatttttcaaaagagaattcaattacagataattcttacaggctatgggaattgattcattacattggaaaatttatatatgtctattcagagtttataattgaagggattgaagacaaaaaaataggaaataatatgggaataaacagagaaaatgtgagaagttttgcagcttttattttatacggagctgttggaacaatatataatgactatattattaagggagaaaacaaaacaaattcaagcgaggcctttggaataataggtgaactatttcaaagacctcagtagagaaaaataaaatataagtattttacaagggaaacatcaaggatgttttccttgtattagttttaaggcaaatgaacgaactcgttcggtaaggaggtatgttttagatgaaaaagaagaaatcaatcaaagatattattttctacagtgaaataaaaaaaggacaacttgtaggaggaatattatttgttactcttgggatgctgttaagtatttgtccaattttggtgatatacaaagtcataaaatctctatttttatatggaaaattagaacaaagtacaatacagttctgtatctatggacttgcagcagtggtattgtcatattgcttaacttacattggcggtattttatgccataagttttcatatgttttaatagccaacttaaaaaagaagatattatttcatattgggaatcttcctttaggattttttaccggagacaacaagtcaaaaataaggcaagtattaggatcggacatgaatcaaattgagggatatttttctcatcaattaccaaatttaatttcaactttagcactaattttagcaatgataattgttatgttgaagataaatttaatattaggtcttacgactttgttaattatatttgtcggtttaggaattcagattgcaatcatggcaaagattataaaatcaggtggacttgagaagaactttgcaatattggatcaaattaattcagctaccagtgaatatgttaaaggtatgccggaagtaaaaatatttggaacaggagcaaaatcatttaaaactttttcaaagtcagtaggagaatatagagcctttacaagttcgatgacatcaatgataagaccgggatttgtttcatttagaatgtttattttatctgttgctacattcatagttccagtaggaatacttttaatgtcacgaaataataacttggattttgctacagtttttattttctatttgattcttgcacctgccattagcgtacctgcattaaaacttagagattttgcagaaggaatgaatttactaaatgaagttgttttgagaatctacgaaatcatagatcaaaaagaattggcaattgaaaatagcgaggaagagataaaaggtcatgatcttgaattcgagaatgtaagcttttcttatggaaatgaagaggttttaaagaatataagcttctgtgctaaacaaggagaagttacagcattggttggctattcgggagcaggcaaatctaccattggaacgctaatacccagattttacgatccttcagaaggctccattaaaattggtggggttaatataaaaaatattccgatgaacgacttaatggagaggatagcattcgtttttcaagacagtgatttaatcacagatacagtcttcaataatgttgctatggcaaagacaggctccacaaaagaggatgttataaaagcatgtaaaaaagcaagatgtcatgattttattgtaaaacttcctgatgggtatgacactgttttgggtaaaggaactcatttatccggaggagagaaacaacgtattgccgtggcaagagcaattttaaaggacgcaccggtattagtattagacgaggcaacaagttttgcagactctgaaaatgaatatcttatgcaggaagctttatctgaattggttaaagataagacagttatcatgattgcgcatcggttaaataccatagagcaagcaaatcaaattttagtaatatctgatggaaaaattgcagaaagagggaagcatgaagatttaatccttgcagatggaatatataagcgactttatgaaatttataagaaaacgaatatttggcaaatggatatagaagggagtgagaatgaatgataagtaatattactttaggaaagatgaataatataagaaaatccattgccttaaatgttttggcttctatttccaaccttataccatttattgctttggcgaaaattgtagaaacactatttttaaatagaggtgcagatagtatagatacgagccttttatgtaagtattttgggataatggcaatatttttctttgtaacattcttattggaaaatttagccacaaaatatacctatgaacttggatacaagtctagtgcagatggaagaatagagcttgcagaccacataagaaaactgccaataggttatatttcagggaaaagctcagcagagatcttagatacattaatgaatgattttttcaaagttgaaacggcagtaacgcaccaactacctcaattcttcagtggtatatgtgtagcagttctttgctcaatattatttttgatcattaatctaaaaatgggaatagcaacacttattggattgccgatttctgttctacttctcacactcatgcaaaactttcagaaaaaaatctatttgaaaacaaagaaaatgaggataaaagaggaagaagatacaaacgaatatttggatgccattaagactctaaaagcttataacagcatagatgatacattaataaaacttgaagaagatatagataactcaaaagacgcaaatattaagagtgagaaaggggttggttcattaactactatagcaagtatgattttaagaataggacttcctttgatgagtttagccggttcctgtttatttataaatggatctttggaaattgatacatttttaatgttcttatttgtaggcacaagaatttttgatcccttggagcttgcacttgtaaattatacgggtctacaaatggcatcagtttcaggagagagaatcatcaacctacttaacgctgaacccatgtcaggaaattgcgatgtaatcgaaagcaacaaaattgaaatctgtgatgtttcattttcttataaggaaactaaggttatcgacaatgtttcattagacattaatgaaaatgaattaactgcttttgttggttactctggctctggaaaatctacactgattaaattaatttccagattttatgatcctaatgaagggacaattaaaattggtggagtagatttgctaacagccgaccctgataaattaatggataaattttctgttgtgtttcaagatgtgtatctttttaaagacacaatttataacaacattaagtttggaaatgaagatgcgagtaaagatgaaatcatgaatgctgcaaaaatggcaggagcttatgactttatagtcaataaagatgatggatttgacactatgattggacaaggaggagcgactctgtctggaggtgagaaacaaagaatatcaatagcgagagcaatattaaaaaatgccccaataatactacttgatgaagcaacatcttcgcttgatcctgaaaatgaacttattatacaagaagctctatcaaatttaattaagaataaaacagttgtggttgtagcccataaattaagaagcgtaatgggagctgataaaattgttgttttaaacaacggaaaggtagaggaagttgggaagcatgaagaacttattaaaaatgaaggactatataaagacttatggaattatcaagaaaagtctaaagaatggaagattgtacagtaacaatcaattttaaaggaggaaacttatgaaaacacaaaagaaatcatcaaaaaacgcagttacagccggtgttttaattgcactttactttgtaacatatttagtaattggggcaatatctatgcctgtccctgttttatttttactaatgcctatgcttgtagcactacttgctgcaccaacctatcatatgcttcttgcaaagacaaagtcagctactgctattgtaatcgcagctattttaccaagtattttattagttgcaacagggcatattccaattgcaccattagtggcagtgcctgccggaataattgccatgttcatagcaaaaagtggaaaatatacagactttaagaaaaatacaattagtcatatgtttttttctctaaacttatttggaggattcttaccaatttgggttatgagagaagcattttttgaaagtgtaataaaaggtggcttagatcaaagcttttgtaacacagtaagagcatggacaccaatatggatgttaccggttatgatcataggaacatttatattctctttgatcggttcttattttacaaagaaaatactaaataaaaagttggaatccgcaggagttttataatggaaaattcaaagtttgttctggggtcaaaatatgacctcagaacaaaacttatcttacttataggtgcgaatattttaatttttatgggattcagtttggtctatcaaagccttattacattatttttccttgccattattattagtgaaggttatagaaaatctgcgataaggtatattttattttttgtaataagtgtagtattggaaaaatctttagcctattttagtatgaattttcttttgaatttaattttatttatcttggcaattggaagaaaatttctgccatgtattatcgtgggtaaatggattttaaattccacatctgtttccggtgcagtggcaacattacaaaaattaaaactttcaaaagactcgctcataatgatttctgtaatatttcgatgtttgcctaccattaaagacgaatggagtcatataaatatggcgatgaaaacgcgaggaattaatttcaacttaataaatttaataagaaaaccaacattaattatggagtatttttttgtacccttattcgtaagtgtgatagaaattggggatgagctctctcaatcagccattataaggggacttgatgcgcctgttaacaaaacaagtagatatcttattaagttgaggataaaggatcgttgtgttttactttctatgactttaattatattaatcgtcgtagttatgaaaatttcggggtgggacttatgattgaaattagagaattaagttttaaatacaagggaggagcgaattactcattaaaagacattaatttaattgtaaaaaaaggagaatgcattcttctatgtggtagaagtggttgtggaaagtcgactctcttaaagcttatgaatggcataatacccgagttttatgatggggacatttccggcagtgttatggtcaattgtatgaatgcatttaccacaccaatttataaattatctaagagtgtaggtacggttttccaaaatcccaaaacacaattttatacaaccaatacaaccgatgaaattgcttttggtttagaaaattacggcatagaaagggaagtaattaacaaaagaattgaagaagtcgaaaaagagcttcatcttgaaaacttgatgaataaaaatatattcagtctttccggaggagaaaagcagaagattgctatagcaagcatttacgcattaaaccctgagatatttattcttgatgaaccctcttcaagcttagacataaagtcaatgaaagaactatcgcttacaataaaaaagcttaaatctttaggaaaaactattattattgcagaacacaggctgtggtatttaatagacattgttgatagagcaatatacttagaggatggaaaaatcatcagagaatatagtatggacgaaattgaaaatctaagtgaagatgaacgaatgagaacgggacttaggcattctgattataaagccattgaaagatttgatgattttgaaacttcaaataaagggactttattagagttaaaaaatctgatgttcaaaagaagtaccagaacaattttgtccatcaaggatcttaaatttagctatgggaatattattgggattgttggagaaaatggaattgggaagtctacattagcaaaaatcatatgtggcttatacaaagaaaataaagggaaaattttaagagatggtgagaatttaaatataaaaagtaggctaaatgagagcctgcttattatgcaggaagtgaactatcagttattcacagacagcgttaaagatgaaatagtattaacatcaaatattaaagatgattatgttttagatacttggctaaaagacatggagttaaaaaacattggtgatagaaatcctcacaccttgtcaggaggacaaaaacagagagtgattattttatccgctttactatccgacaagaaaatcctatttttcgatgagccaaccagtggattggactatagaaatatgaaaatagtagctaaaaacataaagaaagttaaggaaaaagacaagctgattttaataatatcccatgatgttgagtttttagagtcagtctgcgatagggttgtaaagttttagaacaataatgtaacttttccgtgagaaggatcacgtgtttttatcgcatcgggcatcttgaagcaattgcactccttgagcgtggaaggaactacaatggggacatagccgctcgtgaatggcacacattattattgttataaaacgtttttttgaagcaccggttaactcgacatcttggattcctaaaagaattgttgtaatattgttttgcgcttgtttgatcccctttattaatttgtggtgatttaattttaggtaattgggaaaacaagtgctatctttttgcacaaaaatatccattgaggaggttactccccaacggatattatagagccaaaaatatctactgaggaggttactccccaacggatattatagagccaacaaaaacggccccttctgcgtgaaagcggaaggggctttttgtgtgggaattttttgcaaagaaaaagcggttccgaagaaccgcaattttatatgtagccatgcacccgactttgcacaagtcttccacgcgttaccgagagagttaactcagcgtaggcgaatctacgtcacataagcggacttccttagtgctgcttccgtcaagacctgacacggttcgaaagggcttattgcgtaggacccacacatcaacatcacttttctcgggcaggccgcaaaagaaatgcgctggatcgggaattcaatcttgttgtagcggattacaagttacagggtgccgctaattccccatctagcatggcaaacttttcctggcggagagagggggattcgaacccccgatacgctattaacgtatacccgctttccaggcgagcgccttaaaccaactcaaccatctctccattggattacagtatatgattatacggtggaatcggtttgttgtcaagggaaagttcaaaatttgtaagcttaccaatcacctttgatggaaatggccccggcagtcaggcgaagggtgcggccttcaacggcgacgagaagggcgccgtcgtcgtcgatggcttcggccacgccggtgtattcaatgtcgcctttggcgaagcgaatggtttttccgatggtgaggttgtacttgcggtaggcgcctaagatgtcatcggcaggctgttgaagtcgggcgtagaggttgtttaagatatccgccgccaattgatttctggaaatggcagaagaaagggagcctgcggcgggaagggattgtttttcgaataggccttccggcgtggtaatgttaatgcccaggccgatgacgtagcgggctttgccgccggaaaaattcgcctctgtcaggatgccggcaatttttttgtgattgcagtacaggtcgttgacccatttaatctttatatcttcgtcggtttgcgccattaaggcttcttttagggctacggcggcggttatggtaagcagtgcgggatcggatacgtcgccctcgtgaataattgtcgagaggtaaaggcccatgccgtagggggagaggaaggatttgcctacgcggcccttgcccgccgtctgctcttccgccgccataaaggaaaaagagggaaggggtgcgtgtgcgtcttctctgaagatcgcgtcgttggtggagtccacccggttttttaccaaaacggccacgtcttttaactcgcttttcaagtgatttttaatgatcgctgcatccagtgcttcgtggttttcgaataagcggtagccacgattggtgacggcgtcgatgcggtagccgtcttgcctcagggcttttatggcctgccacacggcggcgcggctgatgtttaattttccggccatgtcttcgccggagagataatcgtcggcctctttcagggcttgcagaatgtaatctttatttttcatcaggccatccccgggtaatccaattggcgcaaagcttcaaagagaataatgttcacggacacggatagatttaagctacggccgaaatcctttaacatgggaatgcgaatggccgtctcgtcgtgggcctttaataacggctcgggcaggcccttggtttctttgccgaagaccaaaaaatcgccgtcttgaaattcaatgtcgctgtagcgcttatgggctttggtggaggcaaagaagaagcggtggtctttgtattcttccatgacctcttcgatgctgtcgtggtagcggatgtccacgagatcccaatagtccaggccgcagcgttttaaatgcttgtcgtcgacggaaaagcccaggggccgaaccaaatgcagcacgcttttcgtcaggccgcagcttctggcgatggcgccggtgttgtggggaatttcaggttcaactaaacagatgtgcaatgtcatatttacctccaaaatgcgtttatcttttctatcatatcatccactgaatcgacggtttcaatccgccaatgggcgggaagcaggttgcgaatgtcggggtgcaggtagcggtcgtctaaaagaagaagttggcctcgatcgctatgggagcgaatgatgcgcccggcggcctgcaccactttcgtgagcccgggataggtgtaggcataggcgtagccgtcttttcctagctgattgaagcgatttttgatgagctcccgctctcgagagaggccgggcagggacaaggtgaggatgctcacgcccatgagggcttcgccggagaggtccaccccttcggaaaaagcgccgcccatgacgctgtagccgtgaaccgggcgttcgtttctgaaccttgcgatgtaatcggcccgcgccttttccgtcatggcccgtgcctgatcgtgggcgctttcctcccaagtttggcaggcggaatagacctgatctttgtaggcgtaggagggaaagaagtggatgaaattgccttctcgcgtcgtggaaaaggcctgtaagtagcggctgatctccgaaagggtgcgttcgcgatccttgtacctggtggataaatggggcggatgcaaaatcaagagatgggcgggatcgaaggggctgtccaagaccatggtttttcgtgcctctcccgcgcctaagcagtggccgtggtagtccatgggggagagagtggcggaaaaatacaccgccgactgaaacagttcccgccgggcggagagcacctgcgacggatccaagcacaaaagatgcagcttgtttttctccggcacgaagaaagtgaagcgggtttcatcgtaataaaggtttaaattctgccaatccaagaggcggaagtagagttcgagaaaatcctcatccggctccttcttcagtcgggcaaggtagctcgccgcctcatcaatgaaatcctccacggcttctgaaaagtcgtcgtctaagccatcgtaggtcctgtcttccgcggaagctgtggcgcggatcttgtccgccaaatcgtcggcaagggcttcgatttttttcgtcgggtagtctacggattccagctctgcgacggagaggctgccggagtacatatctcggccccgatcgattaaattgtgggcctcgtccacgaggaggcaggtggctttcaagcggtcccgatcttccatgaggcgctccaaatagcttttcggatgaaagacgtaattgtagtcgccgattaaaatcgaagagagattgctgagatccaaggcgaattcaaaggcacagagtcggtgcttctctgcgtagcgggccacggtgggcccgtcaaataaatcggcgtgatcgtaaatatcgatcatgccgtcgagaaggcggtcgtagtggcctttggcgtaaggacagtcctgtggcgtgcagctgagcacgtcgtttaaacaggccttctccttggccacaagctccgtacttttgatgcgcagccccttttcgcgtagaagggccaatgtttccgtggccacggttttttgcgtggagcggccggtggcgtagaaaacaccctctaatagcccttcgcctacggcttttacggcggaaaacaaggtggcaatggtcttgccgatgcccgtcggtgcctgggcgaggagggtgccttctgtttgaatcatattgaaaaccgccacggccatgtcccgctggcccgggcgaaaaccgtcgtaaggaaaattgagtgcctttgccgaggcgagagacagggcctcgaaatcggtgaggcgcttttgaatccgctgaaaccgcgccataacctcgtccataaaggtgtttagctcgtcgaaggaaaggcatttttcgtagcgaaacacatcctcgtcttcgatgcgaatgtaggtgaggcgcagatgcacttcatcgaggcccttggccctggcgtagaggtagccataacactttagctgggcccagtgaagctcgtcgggcctatcgtcgatggcatctttcgtgtagaccgtcgacttaatttcatccaaaagatgggcgtcttcgtcgacgccgtcgatgcggccttccaaatggatttcgccgccgtcgtaggccacggtgcctgaaatctccacctccgaatcaaaagaaggcggataggccctttgcaatttttggtggaggcgaatgccttcctgtgcccgcttgtgagacaaaaagccgctgtcgatgtcgccgcttcggagggtaaaggccaccagctttcgtacggaccaatggtttttcataatatcaccatcatcattatacacgctttttgccttgcgagtgaatcgccgcccgcgtataatgtggcaaggaggacttaaataattatggaaacaaaggacagaaatgacctcattcaatacggcctggccttggtaaaagagggactcaccttcggcagcggcggaaacttatccgtcagaagcgacgacagcatgagcttttttattacgccgtcgggcatggcctacgacagccttaaaaaaagcgaccttgtacgcatggatttagagggcaatattttaggcggcgagcgcaagccctcctcggaatggcatatgcacgcggcgatttaccgcgcccgccccgatattcgcgccctcattcactgccacagcaactatatcagcgccttttccactctgggtgaagatttggggcccatcagctatttaatcgcatcgtcgggggctgcaactgtgcctcttgcgccatacgaaaccttcggcaccgaagccttggcccggtcggcggtaaaggctatgggtgatacgtctaaagcggtgatcctcgccaatcacggactcattgccggcgggaaaaatttaaaagaagccatgggcctgactcgtgacttggaattttgtgcctttatgtatatgaccgccttggcgacgcaaaagcccattcaattcattcccgaagagaaaatcgatgaagttctcgaaaaactgaagagctacggccaataaagcatcgacgagaaatcgtcgattttttaattgataagatgagtataattatcgtttaaaaaatttcataagatgaaattttacaaccgagaaagggaaaagaagcgacggtgcggaaaaacgtacagaagcaaaaagggctaaacgatcgcatttatcttttaatataaattttacgaccctttggacgagcgtgcaccggatacggattcgaatgaaataaaggtacaaagccgaaaatcatataggatgacgcctatcaatatcagttagcaattcattaagggcaaatattcctaaaaacgcaaaacaattgtatataagaaaacgttggaaataagtagattaccgatagttgtacatagcaggcaaaaattattttaagaaattgtaaaaatagtattgataaatgataataaaggtgatatgatacggaacaaagaggtgattattatgaaaaagaagttaatcagtttaggcgccggcgttgtgcttggcgtagtcggagacaaaattctcaaatccaatgcagtaaagaacttagcagtttccaccgttagtggaggcctcaaggtcaaagaaggcatcgacaagaccatcgaaaaggcgaaagaaaacgccgaagatgtcgttgctgaagcaaaggtcaaaaaagcagaagacgaacgagcaaaaagagaagctgaagaagcaaaagaaacggctgaagatttagcaaaagcggcagaagaatctgactgtgtcgcctgcgacgtagtggaataagatgaaggtcgccattgcccatcgtatcccgggtcgtacgcgtttttctacgacgtaccaactgtcttatgaaagggccaacaagatcaagtatcttttggagcaagtgcccggggtatcttatgcgaaagtatctcccgtatccggcagcatcatcgtcaatcacgacgatgacgccggattaaaaagagcttgtcgcaccctgttagatttgaagctcgcgtccttagatgatttcgaaatcgaggacacgagctacattccccttgaagaaaaagaattgttccacatcgtgcgcgacgccttcgaagtgcgtttcgtcatgaaaaactttttgccctaccccttgggaaccatcgtgaccttggtgcgggcatccaggtttattaaacgtggcttggtcgcactttacgaacgcaagctcaatgtggaagtcttagatgctgcggccatcggtgtatccctggccacaaacgacttcggcgcggcttcttccattatgttcctgttgaatttaggcgaaaaattggaagattggaccttgaagaaatcccaaagcgatttggttcgcaccttggaattaaacatcgacaaggtctttgtcgtagacggagaagaaaaatacgtcaaaaaccttcgcgacatcaccatcggcgatgttgtagaagttaccatgggtaccaccattcccgtagacggcaccatcgtcaagggtgtgggtacggtaaaccaatcctccttcaccggcgaaagcgtgccggttaaaaaggaagaaggcaaaaccgtctttgcgggcacggtcctcgaagaaggcatgttgcacgtaaagaccgaaaaactttacaatgaaagccgcatcaacaacatcattaagatgatcggcgaaagcgaaaagaataaatccatggcacagaaaaaagcggaaaacatggcggattctctggtgaagtattccttcctcggagcgattatttcctatgccctgacccgctctgtgcataaggccaaggccttcttaatggtagacttttcctgcgcactgaagctgacgatccccattgccgttatgaaagccatgagccagtccggacaaatggacgttttggtaaaaggcggcaagtatttggaaaacttagctcaagcggataccattgtctttgacaagaccgggacgttgaccaagtctacgccgacggttgaaaaagtcattgccttcgacggccgttcggaagatgaatgccttcgaattgccgcctgcctggaagaacacttcccccattccatcgccaatgccgttgtagatgcagccattaaacggaatttgcgtcacgacgaaatgcattccgagacggaatacattgtggcacacggcatttcttcgaagatcgacggaaaaaccgccctcatcggctcggcgcactttattttcgatgacgaaaatgtgcacctgcccccggcgaaagaatccgttatcgaagagctcaaggaaaattattcccttctgtacctggcgtatgacggcgagttaattgccgtgctgtgcattgccgatcccattcgcgatgatgcgaaagaaacggtggatgccctgcgtcaattaggatttaccaacattgccatgctgaccggcgatgcggaaaactccgcacgcttcgtggccaatgagttgggtctggattactaccgctcacaagtccttcccgaggacaaggcggagtacattcaatcgcaaaaagccatgggcagaaaagttgtcatgatcggcgacgggatcaacgattccgtggccctgtccggcgccgatgtaggcattgccatgcataaaggcgcagatatcgcccgagaaatctcagatatcgccatcggcagcgacgacttggcctccattgtagaagtggtgaagatcgccaaggaattgcaagcacgaattcaacgggattaccgcaagatcatctcgtttaattctcttttaatcgcactgggctacttcgaggtcattaccaatacgacctcgtccttcctgcacaattcgtctactgtggccatcgccatggaaaacatgcgggattacgccgtgtcttaaaagaaagtacgaccgactttgaaataaaagaaacttcaaccgacgaatcatcgattcggttgaagttttttaatgccatgaaacggtcccgttacgcaaaaagcacagtggctttgtgattcaaagatgccccaaacgctttatctcagaaaaaaggccataaaatagagaatacagtattcaaaagggtataaataatgatataaagaaagttcagagaagaacgggagggcaacacatgattgaatttgtcgacgtggcaaagatttataaaacccaaacggccgttgaaaatataagctttaaaataaatgacggggagtttatctgcgtcatcggcacctcgggatcggggaagacgacgattatgcgtatgattaatcgcatgaccgagccgtcgaagggaaaaatcttcatcgacggtgaagacattatgacgaaaaatccggtgaagctgagaagagaaatcggctatgtcattcagcagatcggtcttttgccccacatgacgatctatgaaaacatcaccctggtcccgtcccttttaaagtgggatgaagagaaaaagcgagacatcgccgaggccttgattcaaaaagtcgatctgccggtggcgtatttggataagtacccgagccagctgagcggcggccaacaacagcgcatcggcgtcgtgcgggccctggctgcagatcaaaacattattttaatggacgaacccttcggggctctggatcccattaccagggaggcactgcaaaatttaattaaaaacatacagaaagaaatggggaagatcgtggtcttcgtaacccacgatatgaatgaagccttaaacctggcggatcgcattttaattatggacatgggccacatggtgcagtacgatacgccggaaaatattttaaaaaacccggccaatgactacgttcgcggcttgttgggggaagacaatttaaataaggcgaagacctcttacaattccgtcgagaccattatgattcgcgaccctgcttacattaatgagggggaaagtacgcgggaggccctgaaattaatgcggaaaaaacgagtagacaccctctttgtcaccgacaggaaaaatacgctgaaaggtgtcgtgggtattttcgaattagggaggctgggccgcatcgatacccgtgtttcggaaattatgaacgatgccgtctccataaaaaacacgacgaaaatcatcgaagccattcacctcatcgtggagttgggctatcgaaacctgcccgtcgtcgatgaaaagggaaaattggtaggcatcgtcacccgcgcctccgtcgtcgatacaatttacaacaatattatcggcggtgatgcagatgattaatttctttgcggaaaattatcgcctcatcggcgaaaaattgctggagcatttgtctatttcggcgatttccctggccttgggcattctcgtcgccgtgccattgggcattttgctttcaaagtatgaaaagatttcaaagggcgtcatgggcgtggcgtcggtgcttcagacgattccctcctttgcccttctcgccatgatgattcccatatttggtgtgggaaagaagacggccgtctccgccctgtttatctactccctgctgcccatcttgcgaaacacctttttaggcctcacctccgtcaccccgtcggccgtggatgcggccaaaggcatgggcatggaagaaaggcaaattttgacgaaagtaaaaattcccttggccctgccggtgatcatggcggggatccgcctgtcggcggtctatgttctggcatggaccaccctggccgcctatgtgggtgccgggggattaggagacttcatctttaacggactcaacaattacgtgccgccgatgattctttggggcacgattcccattaccgtgctcgcccttttaacggactacctgttcgggaaattggaaaagcggttgtcgccatacaagggaggtgaatgagatgaagaacatgaaaaagcttcttctaatttgttttacattccttttgacggcctgttctctgccgggcatctcatcttccgtagacaatgacgtcatcgttgcatcgggcacctacacggaaaggcaggtattggcggagatcgtcacccaaatggtggagcacaacacggatttaaaggtgagtcaggttaaaaatctgggctccaccaccatgacacacatcgccatggagaaaaaagcactgaatgtggtcggcggcatgtataccggcacgtcccttacgggagaatgcggtatggtgccggaaagagatccggaaaaggccatggaatcggtgcgggaaagctatttaaaaaagtttaaccgaatttggtttccgtcctacggcttcgacaatacctacgcctttatggtgacgaaagactttgcccgcgcccacaacttaacgaaagtgtctcaactgaaaggcatcgccgacgaggtgaaagtgggcgtggattcctcctgggtggaacggcccggcgacggctacgaagcctttaaggccacctacggctttgagtttccgcatttttacgccatggatatcggtctcgtttattccgccttatccggtgggaacatggatgtggtattgggctattccaccgacgggcgaatcaattcctatgatctcgtgcttttggaagacgacttaaagcttttccctgcctacgattgttctcccgtggcttcggtggagatactgaagaagcatccggagctcattgaaattttactgaaattaaagggaaccatctcttccgaaaaaatgcaggaattaaacaaactggcatcggaagaccgtatggagccccaagtcgtagccgaggaatttttaaaagcgaacaattacttcgacgatgtgaaggtcgatcaaaaggaactggaacgaatccgaggtgaagtcaatggttaatgaactcataaattattacgccacgaacttcaactacattgcggaacaattttcccgccacttcctcattgccatttacggcgtgctctttgcctgcatcgtgggcattcccttgggatttttcatttcagggagagaaaaaatcagaaacatcgtcatggccgtcgtgaatgtcattcaaaccataccggggcttgccatgttggccattttaatgatgctcatcggcatcggcgcaaacaccgtggtcttgtccgtgtttttgtacgccctcttgcccattattaaaaacacgatcaccggcatcgacgccatcgatcccggcatcatcgatgcggcacggggcatgggcatgacccaagtgcaacaggtgatgaaagtggaatttccactgagcatttccgtcatcatgggcggcatacgcaacgccctggtggtaggcatcggcgtcgccgccatcggcacctttatcggcgccgggggcctgggcgatattattacccgaggcacgacggtggccaacggctccgccattattttagccggcgccattcccacggccctgatggccatcctatccgatgtgtttctcgggtggatcgagaagaaattaaagcaatagctaaggcacgcttccgccaatttcataaaagagaaaacccgaggctcggaaattccgaatctcgggttttttaatggaaacattttgagtcgatgcaggcaacaaaaaacgcccccgaaaggaggcgtcggatcagatcactgatcgtcaattaaagttcaacgacattttcccagaggccgtggatgttgcacatgctcagtgcgtaaacggtgcccttcttttcgctcttgaagcaggtgttgacttcgggaacagtaaagacgtcgctttcgccgtgtgcgttgaattcatagctgccgacttctacaggtgctgcagcgccttcagccttgaagaagactttgatccaggaaatgtggtgttccaatgtgttcgggtgttcgatttccttgccgacggcaacggaaactttaacgaagccgccttcgaaagaagcttcgatttcgggaacgtgtttttcgttcttaaagtcgccggatttgacggtttcggttaattttgtcatgaattattacctcccagtaattctaagttttattttacgatgtttatatacccattatttcaaaaaaaccacagtgatttcatcttttatctccgccttttcggggaatcatgttcaaatggggtgtaatttagtataatagtgtggaggtgttctatgatttatttggaagcaacggcaaacatcggcatggaagccgtattgaaacgggaagctcaggctctgggcatgaaaaacattcgcgtgcaagacggcctcgtgtccatggaaggaaagacggaagacatcagtcgattaaatttacatttgcgcacggcggagcgggtgcactgggtgcttgcccgctttgaggcgagaagttttacggagcttttcgacggcgtatacgatttgccttggccggacattatgcccaagacggcgaatttcattaccgaggccaagagtaaaaaatcacaactcttttctctgtcggatattcaaagaatcacggaaaaagccgtggtcaacaaattgcagacccgctacaaaaccgaatggtttgaaaaaaacggggcccgctaccgcatcggcgtgcgaattgtcgacgacttggccacgatttatatcgacacatccggcgacggacttcacgaccggggctacagaaagcgctcggtgaaggcgccattaacggaaacattggcatcggggctggtgcagctcagtttttggaacaaaaaccgtatgctcgtggatcctttttgcggcagcggcaccattttaatcgaggcgattcttttaggcagaaacatcgccccggggttgaatcgtcgtttcgactttgagtattggaacctggaggggaccaatgaaaaggccatgcgaaaagaagcctttgaaatgatcgactacgacagcaaattggagctttacggcttcgacatagatcctaaggccctggaagcggcgcgaatcaatttggattccctgggctttttagacgacgtgactttaagggaaaaagacattgcccagctggacctggccggagactacggcgtcatcattaccaatcccccttacggcgtcaggatcgaagacaaagagtcggtcatggcactaaatcgtgagctgggtcaattggcgaaagcattgcccacatggagccactacattattacggcggacgaaggctttgaatacggcttcggcaagaaggcggacagaaagcgcaagctttacaacggaaagatcaagacagactactaccaatactacggtcccaggccctaacaggggaaagaggcaggcatgagaaagagcgagattccaagcaacataatcgagaccaagcttttggacaccatgaccgatttaattcgcgtcgtggacaaggacaatcgcgtagtctactataatcatgccatggaaaaagtattggagaaaaacgaaagagacggaaagcacgacgatgaccgcatgacggcccgcgcccttggaagtggcgaaaacattcagcgggagacctacatcggcgaaacctactattccgtaaaaaccaatcccattcgatcggaagccggagatattatcggcgccatcgaagtgtttcgcgacaagagcgtggaaaagcggcttcaggtggagttgatcgaaaagaatcgcgccctaatcgaggagcaaatgagtgccgcctccattcagcgggcccttttgccccagcggggttacgatcggtttttttatacagactatttctatcgaccggcggaaattttaagcggcgacttcttcgacattattgaaatcgacgaagaccacacagccatttacatggccgatgccgtgggccacggcttcgcttcctccatggcgactttatttatttcccaaacgatgcgaaacatggatccggagattttggtggatcccaccgtggccatgatggagctggtgcatcgcttccgggagctgaatccgccggacaccatgtacttcaccatgttcctcggcgtgtattcgaaaaagaacaggaaattcacctatgccaatgccggccacgattgcccgcccctgttaaagcgaaacggccacgtgcggctcttgatgaacgcgggctttcccgtgacgcaattggtggaggcgacgttttatgagtgccgcagcgcctatttgcaaaaaggcgacgaattattattttacaccgacgggattacggaatgccgcagtcggggcagaaagcagtacggcgtagatgccttgcgggatctgttcagccgaatcggcgacgatcccctggcggaaattcaacaggcacttagcgattttatttacgaagacatcgtagacgacatgacctgcctttatgtgaagatgatttaggcgaggcggtggattcaaaatcccttgaacctctccgtgagttggtgtaagaacccgtaaagaccgtggaaatgtctataattgaagaaaagggcttcgtttaagtccttacacgccaacggcataaaggcatggatctttgtgccgttttttatttgttttattgtattggcgggagcctgtgaaaggcaagcttgcctgaatggcgaaccgcggaaaaatcaggaagggataaataaaaggagaaggcattttgcggaaaaacccgtccctcgaagagaaactttttacaaaatcacttgaaaccctatcccgtatgtgatagtatgttaaatttttctgattatggtataattaaatagaatataggcaggagaggaggaagctatgtttaaaataggtgataagatcgtctatcccgtacacggtgccggcatcatcgtcgatatcgagaccaaagtcattttgggagagaaaaaagaatactacgtcatgaaaattcccgtaaacgaaatgaaagtgttggtccccctgggcagcatgggcgatgtagggattcgcgatataaaaacaccggaagaaatggacaaagtcttggaggtattgaaggatcccgggaaggaaaaaatgccgaccaactggaatcggcgctatcgcttccatcaagacaagattaaaaccggcgacctggaagaaattgccaaggtcattaaaaatctggaaagcttagacagagaaaaagccctctctacgggggaacgtaaaattcttaacacggcccggcaaattatattgtccgaaatggtcctcgtttacgacaagtctttcgacgaagtggtggagctggtggatcaaaccatggcggacggatgtttgaaggacattgaagaaagaaagtagggtgcccatgggaattcgatccaatcgcatcttccactgggcgttccgactgctctttacccttttgggattggccgtcgcacgcctggtcttaagactgttgcgcgatttgaatgccatgaaaatactgggccgtctgattccccctgcagcgattcccgtggttatttttattttatttgccattttattttttattctcgggaaatacgcttacggggcgctttggcggtttgtaggttttgtcgaatcagaaatgaaagacgtgcctgcatcggatattttttggggcatcttcggtctgattatcggaatcatcattgcctttctcgtctccctgcccatctaccgactgaacatcgattacatcagcagctttttatctctgattatctatgtcgtactaggggtgctgggcatacggattatgctctttaaaagggaagaaatcgccacatccattcggaatctttttctccagggaagcggcgccgtgaaattgaaaaacgtcgataaaaaacagggcgtaccgaagcttttggacacctcggtgattatcgacgggcgcatcgtcgatataatcgagctgggcttcattgaagggcccatcgtcgtgccgaacttcgttttgcgggagcttcagggcatcgccgattcttcaaacggcatgagtcgggcgaagggccgaaagggcttggatgctttgaaaaagctccaagaagacagtcgctataaaattaaaattctggaaaaaagctacggcgatataaccgaagtggacaccatgcttctgcgcttggccaaagaagtgaagggcgtggtggtgaccaacgactataatttaaacaaggtggcggacgtgcagggcatacgggtgttgaacatcaatgccttggccaatgccatgaagcccgtcttcgtcgccggcgagaagatcaatgtcttcgtcgtcaagcccggcagtcaggacaaacagggcctgggctatttagacgacggcaccatgatcgtcgtggaaaacggcatcgactacatcggccacaatgtggactgcaaagtgaccagtatgcttcaaacctcggcgggaaaaatgattttcgccaaaccattggattaaaaagcgacccggttcgtggggatccacgttcctcgggtcgcttttcattgtatgggcttattttaatttgaacaggtggtgaaccttcttgcctttgcggacgtggacaccttttttaagggcatctaaagtgatgatggcatcgtgggaagcgactttttcgtcgtcgacggacacgccgccttgttgaatgagtcggcgtccttcactggtggaggcgatgagatcgcctttttgcatcagttccacaatggtgatgccgtctttcacatcttcttctgcaagctccgtggtgggcatgtgttccgtatcgccgctgccgccgaagagaacgcgggaagcttccagagccttgtccgcttcttccttgccgtgaacttcattggtgatttcccaagccaaacgttccttggctgcattcagttcttggccttccagtttttcgtaatcgccgatttcttcgtcgctgacgtcggttaagagtttcaggaacttaatgacatcgcggtcgtcgcaattacgcaggtattggaacatttcgtggggcggcgtcttgttgggatccaagaaaatggcgcccttcatggatttgcccatcttttggccgtcggcggtggagagcagcttgaaggtcatggagtagaccttgccgtcgtcgagcttccgaaccaagtcgtagccgccgagcatattgctccattggtcggagccgcctaattgcaattggcaattgtattttctgtagaggagcaggaagtcgtaggactgcatgagcatgtagcccatttcgaagaaagtcagcccttgttccaaacgattggcataagcgtccagcttcagcatatggtttacggagaaatgcacgccgatgttgcgcatgaattccaggtagcccagatccaagagccaatccgcattgttggcgacgatggccttgccgtcggaataatcgataaaatgagataattgccgtttgaagcattcgatgttgtggtcgatgtcttcgcgggtcagcattttgcgcatgtcgctgcgtccggaggggtcgccgattaaggtggtgccgccaccgaaaagggtaatgggcacgtgaccggcccgttggaaatgttgaagaacttttacttgaagatagtggcctaaagtaagggaatccgccgttgcgtcaaagccgatataaaaagtaatcggtccttctgccaagcgttcacgcaattcttcggggaaagttacttggtcgatgtaacctcttctttcaagtagatcaaatacgttttcagtcataatgcctccttttttaagcacaaaaaaagctcctgcgaaagggcgtcttccaacgcggtaccacctttcttcgcaaaaagcctcaagcaaattatcatactccggcgctgtaattttggggacgccatcatcgtatctatgaatttgatatccattatatggagggacaaaaactttgtcaagcaaaaaagcgtttttttctgaaaattgtgttatgatgaaaaagaggtggcatatgattggcgtggatctggtttacataccgcgaataaaagaaatactgaacaggcgaggcgaggcttttctgcaaaaagtgttttcgcctgaggaacgggcaaatctgcgcctgcaccccaataccgtggccgcacactttgccgcaaaagaggccatggccaaggcattgggcgcgggtctgtttaaggcgggctttaaaaacctgcttgttttctacgacgaaagcggcgcaccctacggacgctttgagcagcatttctttgatttatccatctctcacgaaaaagactacgccgtcgccgtggcgcggcttaggacaggcgaggggccttcggtgtcgaaggaggcggcgaaaatgctccccgtcgtgaatctgagtgaccacaaaggcgctcggggaaaggcggccgtcgtcggcggatgcgccgggatgttcggctccgtagacctcgccgcctcggcggcattaagggccggttgcggcctgagttacgcctacgttcccgacgatagtttccgcgacttttctttgcgtatgcgcgaagtcatcgtaaaaaaacaaagtgcggcggaggatttaaaggacgtggacgccttggggctcggtcctggcatgggccgcgacgacagggcgcgggatgtgtttttgaaagtatacggcctcgcccttcccatggccgtcgacgccgacgggctctaccatttggcggaagcgaaggtgccatcggcgggaccgaaaattttcacgccccacgccggggaaatggcccgcctcattgatcgcgatgtggcctgggtgaacgcccaccgagacgaagctgtggatgcttgccttcgtcgctacggcggcgtggtggtattgaagggacacgacaccatcgtggcttcgaaagacgaccgcgtagtcaacgaaacgggcaatgccggcatggcgacggcgggctccggcgatgttttaaccggcgttatcgcatcgtttttggcccagggcatggattgttttcaagcggcccgcctgggggtatacatacacggactggcaggagatctcgccgctttacataaaagcaagcggggaatgatcgcttcggatcttatcgagtatttgcctgaagccttcctccgcctcgaggccgcgagagagatctgtcagaaatagaaaggttgtgatctatggttattaagagaggcgatgtgttttatgccgatctgagcccggttatcggttcggaacaaggcggcgtaaggcccgtggtcatcattcaaaatgatgtgggcaacaagtattcgcctacgacgattgttgcggcgattacatcgcaaatgaacaagacaaaactgccgactcacgtcaaggtgaaggcggcgaacaatgatttgccgaaaaactccgtgattcttttggaacaggtgcgtaccatcgataaaaagcggttgcgggaaaaaatcggcaagttcggcacaaaaattatggacgacgtcgacgaagcattaaaaatcagcatcggtctgtaatacatagacgagcgcgggcaagccccgcgcttttgtcgttttcattggtctaagccttggattgttgtataatagataagatgaattaagacacagaaaggatgagattgtgaaacgcaattggaaaaaaataagcgcggcctgtgccctcggattgatgtttatgggcgcggccattcccgcttttgccaaagacgacgatcctttggtttccttgagttatttaaaccaaaggcttgaagccattgaaaaaaaacaaaaccaacaaccggcgtccgttgcaacttccggtaccatggaagtggtggagctgaaggcgggcgataaaattatcgcggcccaaggggcggagatgatcccgagaagcgggcgggtggacaccatcgcccaagaattaggcggcctcagcgacattaccgtcggcgtggatttaaaacaaggggagaaagcgcccttaaaccatatgctcattgcaccgagaagtgacggccgtggccttgtggccgccaccgacgccattgtactcgcgcggggcaattaccgcgtggtacgaggactttaacggggatgacgatgaaagttcttcatcttatcagcggcggcgacaccggcggggcgaagacccacatctatactttgctgaagggcttggaaggctatggcaaagtaagcatggtgtgtttctgtcccggtccttttctcgacggcgccttggaattgggcatcgatgcccgcctcgtagagcagaaaaatcgcttcgacatgggggcattaaaagaagtggcccgcatgatcgaggacgaaggattcgacttaatccactgccacggcgcgcgggctaattttaacgccctgtacctgcgaaagcgcgtggatgtgcccatggtcaccaccttgcacagcgattacctactggacttcaaagataattttattaaggacaaggtctttacgcctttaaacaaatacgccttaaagcgatttgacaactacatcgccattacggaacgcttcaagaccatgctggtaagtcgtggttttccggaagatgccattttcgtcacctacaacggcatcgacatgaaaaagacggagctcgccgtagataaagaccgttttttggatcgctacggattaaaaaaatacgcccatcgcatgctctttgtcattgccgcccgcctggatttggtcaaagaccacatgacccttttgcgcgcggtggccttaaacaaggaagccttcacaggcacacacgtactcatcgccgggcaagggccggagcgggaaaagctcatggcctatgtgaaagatgagggtctggaagatttggtttcattcttgggccaggtctccgatccctttagcctttacggggcaggggatgtgaatctcctcacctccgtatcggaaagcttcccctacgcccttctcgaaggggctaaggcgaaaattccctttattgccacggacgtcggcggcatcggagaaatggcgggggactatggcatggtctttcaaccgaaagatgccgaagccatgagtcggaaaatgctttatgccctgaatcatcccgatgaaatgaaggcgcggggcgaaggcctttatgaatacgtaaacgaacacttcagtcaggaagccatggccgaaagccatgcagaaatctatcagaaaattcttcaaaggagccaacatgatcgataaaaaaggaaaactcttcggcaaaatcaatattattgactgcctcttcttactcatccttatcgtcgccgtcgtgggtggtgcatcccgttttaaggaatcccccatttccgtggaaagcacgtcgaaaggaacgatgacttttctcgtggacaatgtgcgtatgccaacggcggagaatattaccgaaggacaagatatctacagctccgacaagggaacttacctgggtaaaatcctacgcaagacggtaaagccgtataaagacgcggtggaatacgagggccaatgggtcaaggcgccggtgccggataagtactccatttacttggatgtggaagtggacattaaggattcggacaagtcctacgcggtgggcagcgaagagattcgcgtcggcaacgattaccgcgtcaagacaaaaacctccgcgtttacgggcatttgcgtcggcattaaaaaagacggagagtaatttatgattcaatccagtgtactgattcaaattttacttttcatcataagggcattggagaattggtataaacaaagtttgctccacggctttttcgctgccgtcggcggcgctgtgagcagacagtggaaggcatcgaaggtccatagagcgctcgacggggcggagggcgtcttcactcaaagcctggtttttcgcatccttcgttttttctatcggttgattaacaccgtttgtcattgggtgcgcctaagaattgcgggagccgtagaaggctccgtgggtttcgacattgtggacagctatgcatccttggattccgccctgaaagtaacgggcatggcatctatgggattcggcttgagcgtcattattttaggcctgtttcatcgcagcctttacggcatcttcggcttggtctttcttttcggcggccttttcgccaacttcctgggaaccgatacgcaggagaagctcgacagttccctcgtcgtgtccgcggtgaaatgcctgtggcgcctgcttctacacgataaggaggccgagtcatggaaacgcgcgtaaaaatcaatcccctccttttatttgccctgggctttgtcattggcggtgtgggtctagcgattaagattcccttcgtcatcctgctgtttttaggactcatcggggtcatggtctttttcgaaaatcccatgatcagcctcatcgccaccaccttcggctacattttcttgcccgatgtgctggttctcgcgcttttgtacggaaccttcggattgtttatcattagaaaatttttaaaaaaagacgatcccctcgtcgtggccggccacgaaatcgtaccctatatctattttctcttaatggtgatccaaacggccacctcgatctatcccatgggttcggtccgggatttggtcatccacaccggcggcttcatgtatttgatctttatgattaacgaaatcaagacagaagaacagtttcacggcatgatcgtcgccgtcagtgtcgccgctaccattctcgctctttacggcgtttaccaatacttcggcggggtggacgtgaaggatggctgggtggatatatactctaacagccccattcgtgccagagcctattcacttttcggcaatccgaatattttcgccgagtatttggttatggccatccccctcactgtgggcatcttttggtccacgaagcgagacggcgtgcgtctgttgtttttagccatgtttgttttacaaatggcatcacttattatgactatgtcacggggtggttggctgggtattggcgtagcggcctttgtctttatctgtctcgtgcgaaaagaactcttgcttttggctattcccttgatgggagccaccgtgtatgtggtgcccacaagcatcgtcaatcgctttatgacgattttcgatttcgccgactcgtccacttcttaccggtttaaaatttgggagacgacggaaaccatcatccacaaccatcttctcgtaggacttggccttgggtaccggccctttaaaatggttttcgagcagtatttgcgaggcatgggtatttttcacgcccacaatgctttcctgcagatctttgcggaaatgggcattatcggcttcgtgctctttctgatttttatggtcagcatcttcgttaatttggcgcgctaccccttaaagagtgaaaactgttatttgaaaattatgggcgcagcattggcttcatcatttgcaggcatgctctgtcacggtatgttcgaaaacattttttacatgaccaagatcacgaccaccttctggctgctcttggctttgacctttgcactggtacgtatttgcaaaaaagacctcgcaaacccccttgcggagaaaaggatggattcttatgggaaagaaagttttatttagtggctattacggcttcgacaacagcggcgatgacgcgattttacacgccatcgtagcggacatcagggcctgtgatcccaccgtacaattaaatgtcctctcctacgatccaccgcgaacccgtaggctatacggcgtcaatgccacccagcgctttcactacaaatccgtgaagaaggccctcatgggaacggatctcttaattagcggcggcggctcgctcctccaagacgagacctcctccaggagcttgtattactacttgggggttatggccctggcgaagcgtttgggaaaaaagatctacgtctatgccaacggcgtcggccccattcacaaggccctgaaccgaaaactgacggcgcgcattctaaacaaggtggactacattaccctgagggatgcggacagcgccaaggtccttcaagacattggcgtaaacgtgccgccggtggaagtcaccgccgatcccgtgtacggcatcgaaggcatcagcccggaggcggcgaaagctattttgcggcaagaacgcattgatgcagatcaacgcttcctcgccatcgccgtgcgccagtggaaaaaagcccctgcgttggcgacgaaaatcgcctacgtcgccgatcgggcccacgaagaattaggccttgaaattttatttacgcccctgcattatccggaagacaagcatttcgccgagagcatcaaggcgaaaatggtacacaaggatcattgctacgtcttaagcggcaattacggcgtggaagagatggaagggatcatcggcctgtgcgatcttttaatcggcatgcgcctccacgccttgatctacgccgttacatcgaaaacgccggcggtgggcgtggtctacgacccgaaggtcaaggcccaattggaagccctgtccatcgacgcggacatacaagccgaaggcatggacgagaaaaagctcttaaatgccgtggtggctatgtacggcaagcgggatgcggagcgggcgcgcctcgaggcccagcaccgggtgctcttggaaaaaagcaggaggaatgtgaaacatgtcttcgaccttttacaatcctaaggacaagatcaaaatctttaataccgtggtggatcccgtgagcgaggaagagagccgcagaattctttccgattttttagatgaaggcggcttccatcgaatcttcacgcccaatacggaaattgtcatggcgctgaaagacgacgccgaacaagcggcggtgatgaacgcggccgatctcgtggtgcccgatggcatcggtttggtcatcggttcgaaaatggggggccatcccttggaagagcgggttaccggctacgatttgtccgtctatcttctggaattggccaaagaaaagaacaagcaggttttctttttaggcggcgagccccatgtggcggcggaagcgaaaaaaagggtagaagagaagtacgggcccattgtagcaggagagcaccacgggtattttaaaggtgcccaccgcggctatgaaaattccgaggaagaggcggcggtgatccgcgccatcaacgaaagcggcgcgtcgattctctttgtgggattgggctttccgaagcaggaacagtttattttaaacaacaaagacaagctcgagcacatcgtcgtggccattggaaacggcggcgtcttagacgtgttggcgggaaaagccaagcgggcgccggaggttttcatccgactccacctggaatggttttatcgcctgttaaaaaacccgtcgagaatcgggcggcaaatggccattccgaaattcttatggaccatcgcaacaaacaaaaaggcggtctccgtcgtgaaagaaaacagaggaggatctcatgaatcataacgaacagttcgcggtcaacaccttgcgggcactatccatcgaccaaattgatgcagccaactccggtcacccgggcctgcccttaggcgcggcgcccatggcgtgggcactgtgggccaatacattaaatttcgatcctaaggaccatttgtggcccaatcgcgaccgttttattttaagcgccggccacggaagcgccctcttgtattctttgttccacctcttcggcttgggccttaaagcggaagatttaaagaacttccgtcaactggattcgaagacccccggccacccggaatacggccacaccgccggcgtggaaaccaccaccggccccttaggcgcagggatctccaccgccgtcggctttgccatggcggaaacccgccttgccgccatctacaatgaaccgggctacgactttatcgaccactatacttacgtcctctgcggcgacggcgacttaatggaaggcgtgagcaacgaagcctcctccatcgccggtaccttggaactgggcaaactcatcgtcctctacgattccaataacatcaccatcgaaggcaatacggaactatcctttaaagaagacatcgccgcccgctaccgcgccctgggctggcaagtgctcaccgtggaagacggcacggacattgatgccatttcccgggccgtggaatcggcgaaacaggaaaaggtcaagcccacattaatcgaaattaaaaccgccatcggctacggttcgcctttggaaggctccgccggcgtccacggctcgccccttggcgaagaaaagaatcaagccacccgcgacaaattaggctacgacgtggcgccttttgaagtggccgacgaagtgaaggccttagtcgacgaaaagctggaagaaaagcgcaaggtctacgacgaatggaaggcattggaagaaaaatacaaagaagccttcccgcaaaaatacgacgcctttctggcaagctacgatacgaaaaagcaagacctctcctttatggacgaagacgcttactgggcgcctgttgaaaaagacatggccacccgggccagctcccacgaaatgctgcagcgcgtcgccgccggcatggacaatctttttggcggaagtgccgacttgggcccctccaacaagagcgatatgaaaggcgagggtcaatacagcgtggacaaccgcttaggcggaaacattaacttcggcgtcagggagcacgccatgggcgccatcgtgaacggcatctatctccacggcggcttccgctcctacggtgccaccttcctggtcttcagcgactacctgaagccccagcttcgtctcgccgccctcatgggcattcccacggcctacatcttcacccacgacagcatcggcgtcggcgaagacggcccgacccaccaacccattgagcacttggctatgcttcgctccattcccaatatgattaccttccgcccggcggattccacggaagtggccgccgcttggtacgtggccatgcacagcgagtccacacctgtgagcatgatctacacccgtcaaaccctgccggagcttgaaggctcttccaaggacgcattaaaaggcggctatgtggtgaaaaaagaagccaatgcactggatctcatctttatcgccacgggcagtgaagtgcacctggccatcgaaagcgccgaagcccttgaaaaagacggccacggcgtccgcgtggtaagtatgccctctcaagaactcttcgacgaacaatcggaggaatacaaagaagccgtgcttccctcgaccatgcgcaaccgaatttctgtcgaagcggccaccaccatgggttggtacaagtacgtgggcctggacggcttggccatcggcatgcattccttcggcgcatcgggcaaggcttcggaagtatttaaacgcttcggcctcaccgcagaagccgtaacggaacaagccaaggcctatttatcgagccgcaagtaatgacgtctcgaagaaaaacagcggcgttgctcttagtgctcgccttgtctttaggtggctgcactgagaaaagcacctacaaagacggcacctacgaagggcggggaaagggctataacgaaaaggagcccatcgtccttcgcgtggtcatcgacgacggccgcattgcagacattgccgtaaaaagccacggagaatcgacggagcaagtacctcaggtggaaagcgccctggagaaactccccggcgccatggtgcgaaaaaacacccctagcgtcgatggcattgccggcgccacggaaacttcggcgggattaagcgccgccgtaatcgatgcgcttcacaaggccgggaaataaaagaggacctctgtaaaaacaggggtccttttcaatagaaaaatttttgaaaatcgggaatggccgcgtgaggcatttccgattttttatttataaaccattattcgctgcgaatggcgtcgagagccgagaggttcatggcgcgcttggcggggaagtagccggcggcgatgcccaccaaggtggaaaagacgagggccaccaagatgagccacaggggaatgtgggagatctttaccgcctcttccgcaccctgagccatggcaaagcggttgccgatgagattaaagcccgcgctcatcattaaactcagcgccacaccaatgacgccgccgataaagccgataagggcggcttcggtgagaaagagcttctgaatgtcctgaatcgacgcgccgatgaccttcatgacgccgatttctcgggtgcgctcgtaaatggacataatcatggtgttggcgatgccgatggcggcgacgacaaaggagatggagccgatgccggcgaagatggcgttgacgatggtcatagccttgttcatgctcttgatcatttccagcatgcccatggcgtcgtagtccagggccttaatgccgtcggatacctcttcggcatttttcatgtcatccacccgcacctgaatgcggtcgtagttgtgggtgttgggccgatccatttttaagcggtccattaaatccatatagccgtccacggtcataaagacattgttgtcgtagtccatttttttcgtcttggcgataagccccgtgacttttaattccgtcgatagaccggtgccggtcccggtgcctcccatcatggagacgtcggaggaggtaatcgtcatggctttgcctgcggcgttaaaaagcggcggcggatccttgtcctcgtccatggcgggcatggtcgtggagcccgtggggtcgtaaaacatatccactaccttgctgccgaagagcatttggcccttgccgtcgccgtggaagaaactgcccttgtccatttcccagccaagggaatcataggtatgtttttccatggccgtaatgcccacgaaatccgattgaaactttctatgcttcatgctcacgctggtgttgtaaaccggcgtcacgtccacgacgtgaggaagctcttttaattccgaaatagtttttctcgtgagggccttgccctttccgccttcttctttctgcgtcacattgatgtttttcacatcgccgaagtcttcgatcatgcgcttgttgttttccgtcatgccgtagccgaagctgagcataatgatgatggagacacagccgatgaccacgccgagaagggtgaggcccgtgcgaagttttctggcgaggagattcttcttcgccatgtcgaataggtcgcggtaactcatcagatcgtcaaatcctcgtcgttcgtgtcgccgccgtttttgcgcttcttatagacgtagaagccgatggcgccgacaatggcggcgataagagagacgcctaagggaacagcccatgcggggcgggacgtttcttcgccttcatcttcaggggcgggcatatcgccttccacctgaaccacaaaaggcttcaccaattcctgttttctgcccgtggcatcgtcgtaggtaatgacgatttcgcccttttgctcgccctttgcccgaggcgtaatgttcacgtcgtaagtttgggcactgcccggcgccacattgccggcgaaataggtgttggtatccgcatcgaaattgccccgcattttcaccatcacattggagagcacagatttgcccgtgttgaaaaattccagggacagaggcatttcgccgccgacaaagccttctttgtcaaccttcaaatcccccaattcgatttccgcactttggatcacggggatgccgatgatttccgaagaagtgtaggaattgcctgcgctgtcttcgtattcgaaattcgccgtaatggtgtaggtacggggggctgtgtccggtgccgtcgtcaaagtaatttctttttccgcgtgtttctttggctttatcttgtcgatgaaaaaagtgttgctgctgccgatggggataaaggcactgccgccgccaccgccgcccgaagccgaagctgcggcttccatggcacctggggcgctctggccggaagaggtaggcacgtccacggcatccgctgcatcggcggaaagggcgactcgcagattttgcacggttttcttgctattggtatttagaattctgaagtacaaagtaaagggaaccccggctttgacgtccacgggatcgtaggagtagtggtcgatgacaagcttcggcgtattgttgcccgtaggggcctggccgccgcctgaggaagcaccttcagagcccgtaacgggaaggggcgcgcccatgtctgcgccggagaaatcgcccatggatccaccggagaaatcgccggaagaggcggaagccggggagggagccgaggcggagtttgagcgaacggtgacgatttgtttgctttcgtggacttcgttggtgtttacatcaacataggcgacagaaagcttcacgggatagtttttgctttcagcgccgggggtcatttgaaaagtaaaggtgtagctttctttttgattcggcgcgaagtatttggcattgaccgtggtcaccgatttcggcaccaagccgtttaaatcctgagattccgcttgaatgcgtatgttttttgccccgcccttgccgttatttttaatggaaaagcgaatgggaatgtcggcgccgctgccgtcgtcgtggggccagcttatgtcggtgaagtccagaatggatatgggggcgtggctcgtggattccacctttaccgggggaatggaatcggcgttgtttgcagccgttgccacttggggggcgacgcttgtaagtatcagacaaccggctaaaagccatgcttgttttttcatagggtctcctcgttgttgttttgggggagaagttcgagctcccgtgctttttcgataatctgttgcgtttcgtcacgcacaatttttccgtccctgagctcgacgatgcgattggcgtaaacggcggtttccaaatcgtgggtgacgatgatgagggtttgcttatgttctttggcgaggtcgcacatcatttccatgatttccacggaggtgttcgtgtccaaattccccgtgggctcgtcggcaaagagaatgggcggcgcgtccacaaaagctcgggcgatggacacccgctgttgttggccgccactcatttcgctgggcttgtggtccaggcgattgcccaggcccacccgctctaaaatggcgcgggcctttgcttcccgttcctgttttttcacgcccttgaaaataagccccaaactcacgttttccgtggccgtcaaggtggaaattaaattataggattgaaagacaaagcccacgtttaactggcgaaacttcgtgagcttttcctcggaaagtttctccatgtggattttaccgtttataataatttcgcccttgctgggtcgatccaatccggccatcatatttaaaagggtggatttcccgctgccggaggttcccagtaggcagagaatttcttctttctgaatatctaaattgacgccacgaagggcatagactttttcttcgcccatgtggtagactcggtacaaattccttatgcgaatcaatggatccaaagcatcacatccttcctatcattataccatttgtgaaagaatgatgtacatttcaaagaagtgacttattttaagacttgtcaaagatagaaagaagcggcccatgaatagagacggaaaacagttttacaatttggataggaatcgaaaagaaaggcggcttttcgacgaagtggtctacggcgagaacaaggcgccggagcatttaagggcctgcatcgaagggcttttagaagcacagagcgaggtgttcgtcacccgcctttcgccggcggcctacgaaaaattaggcgacttaaaagagaagctggattacgatcccctctctgaaaccgccgtggcgggcacaaaaaaagagcccgtaggctctgtagccgtggtgacggcggggaccgccgacagtaaagtggcggaagagtgcgtgcgtagcctcgcttatttcggcgtaaaggcggagcgttattacgacgtcggcgtggcgggaatccaccgcctcttcgaaaagatcgacgccatcggtagcagcgacgccatcgtcgtctgcgccggcatggacggggccctgccctccgtggtggcggggttggtgacatcgcctgttattgccgtgccgacctccgtgggctacggtgcgtcctttaacggcgtggcggctctgttaagcatgctcaattcctgtgccgagggcgtggccgtggtgaacatcgacaacggttacggcgcagcttacatggcggcggaaatcgtctacgccattcatcaaaagacgaggtaatcctcctcggacaaaaaggcgtgaacgggcagatcgtattcgtcacggggcacgttctcgaccagttgttcgtgaaagcctacgcccaatcgaaaacccgcgtggctcgagaagaagcggtcgtaaaaaccgccgccgtagcccatgcgatagccggaatggtcgaaggcgaggcccggtgtaatgattaaatcgcaggtcgtttcttcccgttcccgagccaattcctccggaagttccaaaatgccccaataattttcaacgagctcgtctttcgacaaaaggcgggccattttcatttccggatcgccttttttcgtggcgggaatcaagacctctttttccttcagtaaatcgtcgagccagcgaatggtttccacttcgcttcccacggagacgaaaatgaaaaatcgacgtgcctttttgtattcatccagggacttaaggcgagaaaaaatcgcccgggacttttcttttcgcgtcgattcgggaatttcgtcgcgaattttcctgtaattgttacgtaaacatttctttttcatggcaaatggcctcccgcctttcatatttttgtaacttatactataataaatgagataaattgtgtggaatgaggtgtgttgttgattacgtttcaaaatgtctataaagagtacaaaaacggcgtacaagctttaatggacattaatctggaaatcccatacggtcaattcgtttttatcgtcggcgcatcgggcgcaggcaaaagttccttaattaaattgttgatctgcgaggaaaaagtgactcgcggccacatttatgtgaacaataaagacattaccgaattgtcttcttggtatatacccaaattgcggcgtcaagtcggcgtcgtgtttcaagacttccgcctgcttcaaaaaaagaccgcttacgaaaacgtggcctatgccttggaaatcgtcggcgaaagcggccgcaccattaaaaagcgcgtgccggaagtgttggagcttgtcggattaagcgataaattaaacagttatccgggcgaattgtccggtggggaagggcagcgcctcgccattgcccgtgccatcgtaaacaaaccgcccgttttagtgtgcgacgagcccacgggaaatttagacttcgagacggccatgaccgtcatgcaaaccttaaagcgcattaacgatgatggcgccacggtgattatggccacccacgccagaaaaattgtcaaccatatgcaacgccgggtccttaccctcgacaacggtcgaatcatcagcgatgtgaacgtgggaggttacgatgcggtggattagacagttcggcaataacataaaagaagcctttcaaggcatcgcgagaaacaagggcatgagccttttgtccgtcatttccattatggccgttttggtcctcttcggcgtggtggtgctgttggtcttaaatatgaccggcatcgtcaacgaaacggaaaagaaagtggacaaagtggtggtttacttaaatgacgatgccaacgaagacagcatacgggccattattaaaaaggccgaggctacaggctatgtgaaagaggtcagctacacgtcaaaagaacaagcttggcaggatttttccaagaacatggagcttaccaacgacgcctatttcttggaaggcatggaaaaaaatcccctgccggcctcccttactttgcagctgtccaacataaaacaggcgaaaaccgtggccaataccttacagggcatgccagggatctatcaagtggattacctcaatgaattaatcggcaaaatcgtgcaagtcaacgattgggtacgcattttaggtgtggtcatcgtggcgattcttttgattatcgccatcgtgctgattcacaacaccattaaatccaccatcgccaatcgcagtcaggaaattcagatcatgaaatacatcggtgccagcgacggctacatccgtcggccacttttgatcgaaggcatggtcttcggcattgtggccggtgctttggccttggtactggtgtacttaggctacaaaggcatgttcggcctgttcgatgaaaaactcaatgtccttatgggcctgaagctgatccgccccgcggatatgctgaaagacatggccattatgtttctatgtatcggtgtcggcgtcggcttaatcggaagctctctgtcgctgaagcggttcttagatgtatagacggtaaacagaaggaggttcactttgcaagggaatcacaggaagaaactttccgcggctctcgctattttaatgttaagttcacagccggtagcggcgtcgggtttagaagccgcccgttccaaagcggtgcaaaagaaaagctcgatccgatccaatatggccggcacccaatccaagatcagtcaaacgaaaggccaagtggctgcggttcaggcggaaatgagcgccttggatgcacaaatcactcgggtcaatataaagatcgatcaattaaacggcgaaatgcaaaagcttcaagctgagattgcgaaaacgaaagcggagctggaggcggcaaaggcggagcttttagagaaaaaagatctttacgccaagcgccttcgcgccatgtacatcgccaacgaccgcggctacttagatattcttctggattccacggacgccacgtccttaatcggaaatgcccgcatgattcgctccattgccaccagtgaccgcgagcttatcgacgaaattaacgccaaggtgaaggaaatcgaagagaagcaggcccttctcgccgagcaggaaaagcagttggctcaaaagcaacaacaagctcgcatcgaacggagcaatcttgaggcggccaacgcgcaaaaggcaggctacatgaacagcctgatgaataatttaagtgcctatgaagcacaatacgacgccatgcttcgggaatccgatgccattgaatcgcaaatcgcgaatttggatctgtccattcaaaaggcgaaacaagaagaagcggcgcgcctggccaaacaacgggcggcacaacaagtacgtcgccaaaaagcatccgcgccccgtgcaaggactgccgcaagcagtgcccctgccgacgtggttcagtatggcgccaaggcgacaccggaagcgcgaaccggcgaattgtattggcctgtaccgggtcatcaccggatcacttcgcctttcggctatcggatccacccgattttgaaataccgcaaactccacaccggcgtggacatcggcgcaccaaacggcacaccggtggtgagcgctgcatcgggcacggtcattgcttctcgctttatgggcggctacggcaactgcgttatgatcgatcacggcggcaaggttacggtctacggccacttatcttccagagccgtaagcccgggacagtcggtatccgccggcgaaaccatcggctacgtgggcagcacgggcatgagtaccggcgcgcacttgcactttgaagtgcgggtcaacggtgcggtgcaaaacccccttaactatttataatcgaaagcaaaagaacctttcttcgggaaggttctttcttccatttacaaagaggagttcctatgaaaaagaaacacttggcgggcatccttgcccttttgctcgcgaccaatatcatcaccgccttcgcttccgtgcaattggcgacgggcagtgtcaaggaagtggcgcagacgaaagttttggagcacttcttaaaaaaatactacctgcgtagcgacgaaattacggagaaagattttattgaaggcaggaaaaagggtacggtcgccgcactgaaagacccctacagccagtatttcgacgaaaatgagtacaaacagtttatggaatccaccaccggcgaatttttcggcatcggcgtgcaaatcggcgccgtggcagactctaaactgattaccgtcattgcgcccataaaaggctcccccgcggaagcggcgggcttgaaatccggcgataaaattgtctccgtcaatggggtggaatacaccgtcgatgaaatggaagaggcggtgaaacacattaagggcgacaagggcaccgtggtgactctgggcataatgtctgaaggggaaggccgagtgcgggatgtgaagatcacccgcgatgagatccacatggaatcggtaatcacaggctccatcggagacattgcctacatcggcctcacccaatttgaagaggacacggtacaggaatttaccgaggccatgaaggccgcggcgggaaaaaagggattgatactcgacctgcgaggcaatcccggcggcattctcgaagccgccgtcggcgtcagcgatcaattgcttcccaaggcggacatcgtcagcgccaaggacaatcgaaacaaggaagtcttccactacacctccgacgaagcgagctggaagaagcccatcgtggttttggtcaacgggggcagcgcctccgcgtcggaaatcgtggccggtgccttaaaggacaacaaggcggccactttggtcggcgaaaagacctacggcaaaggcgtggtgcaaaccctggtgcctctgcccggaggcggcggcataaagcttactaccagtgaatatttcacgccctccggggtaagtattcaagacaagggcattgagcccgatgtgaaagtcagcctgccggagaatgtgaaggccatcggactggagcatcgagatcaggacacacaattgcaaaaggcaattgccattatagagaagagcggtcgttagatcgctctttttgcaggaggatgtatggattttaaaattcattccaaatataaacccaccggcgatcagccacaggccatcgataaattggccgagggcatcgaaaagggcatgaagcaccaaaccctgttgggggtgacgggaagcggcaagacctttaccatggccaatctcatcgagcgggtgcaaaagcccaccttggtcatcgcccacaacaagaccctggcctaccaattggcatcggagtttcgcgaatttttcccggacaacgctgtggaatacttcgtcagctactacgattactaccagccggaagcctatgtgccggggacggacacctttatcgcaaaagacgccagcattaacgacgaaatcgacaagctgcgccactccgccaccatggctctcttcgagcgcggggacgtcatcattgtggcatcggtgagctgcatctacggcttaggcgaccccatcgattacaagaatttggtggtgagtctgcgcccgggcatggaatgggacagaaacgcccttatgagcaagctggtggacattcaatacgtgagaaacgacgtggatttttcccggggcactttccgcgttcgcggcgatgtgctggaaattttccccgccggcaattcggataagaccattcgcgtggaatttttcggcgacgaaatcgatcaaatcgccgaagtagacgccgtcaccgggcacatcgaaagctatcgaaaccacgtgtccatctttccggcgtcccactttgccacgcggccggaaaaaatcgagcggggcgtgaagaccattcgcaaggaattggaagagcgactcttcaccctcagggatcaggaaaaactcctggaggcccagcgattggaacagcgcaccaattacgatgtggaaatgctcgaggaaatgggcttttgttccggcatcgaaaactacacccgtcacttaagcggcagggaagcggggagccgcccctacaccctcatcgactacttccccgaggattttatgaccattatcgacgagtcccatgccacggtgccccaaattcgcggcatgtttaacggcgaccgggcgagaaaagaaaccttggtggaatacggctttcgcctgccttcggctctggacaatcgccccttgcgcttcgaggaatttgaggctctgcagaatcaggtggtctacgtttccgccacaccggggccttacgaaacggaacacgagatgcagcgggtggaacagatcattcgccccacaggcctcgtggatccgaagatcgacgtggtgcccacgaagaatcaaatcgaccatttaacggaacagatcaacgccatgaccgcaaaaaatatgcggaccttggtcactaccttgacgaaacgcatggcggaagacttgagcaagtattttaaggacatgggcatgaaggtggcctacctccactccgacgtgaagaccattgaacggatggagatcatccgggatcttcgcctcggcgtctacgacgtgctcgtaggcattaaccttttgcgggagggcttggacattccggaagtgggccttgtggccatactggatgcagacaaagaaggctttttgcgttcggaaacctccctcattcaaacggcgggccgcgccgcgagaaatgtggagggccgcgtcattatgtatgccgacaccatcaccggctccatggcccgcaccatcgaagaaacggagcgacgccgcgccattcaaatggcctataataagaaacacggcatcgtgcccaaatccatcgtcaagggtattcgcgacaccatcgaaaacaccattgcggcggaagaagtggaagccttcgacgaagaatttgccaaggaagatattctggccatgctgaaaaacctcgaaacggaaatgtttaaagccgccgagcaattgaatttcgagcgggcggcaagcattcgggatcaaataaaagagataaaagaacgctacggattaaatgaatagagagaaaggaattagatgaacccatccattgaacaggcgatccacattcacggtgcgcgccaacacaatttaaaaaacctcgacgtctatattccgagaaataaaatgaccgtcattacgggcctgtccggctccggaaaaagctccttggccttcgacaccatttacgccgaagggcagcggcgctacgtggaaagcttgtcttcctatgcgcggcaatttttaggccaaatggataagcccgaggtggattacatcgagggcatgagcccggccatcgctatcgatcaaaagaccacgtcgaaaaatccccgctccaccgtgggcacggtgacggaaatttacgactacatccgcctgctctacgcacgggtagcgaagccctattgcccggtgtgcaacaagcccatcgaggcttttgcggaagatcagatcgtggacaagatcatggaaatggaagagggcacccgctttcagcttttggcgccggtggtgcgccagaaaaaagggcagcacaaaaaggtcttaaaccgcattcgtaaagacggctttctgcgcatgattatcgacggggaaatgcaccgcacggaagaagagatcgagctggataaaaacaaggtgcacgacattttcgtcgtcgtggaccgcatcattatcaagggtggcatcgagagccgccttaccgacagcatcgagacggctcttgagatctccggctccacggtcatcgtcgacaccatggacggcaacgaaaagctttactccacgagttattcctgcccggaacacgacattgccatcgagccggccacgcctcgctctttttcctttaacacgcccatgggagcctgccctacctgcaagggcttgggaagcagccgccgggcggatccggagctcatcattcccaataaagagctttccattgacgaaggcgccatcgcctgctacggcaccacggaaggcacctactacaaagaaatcatcgaccaaattgcggcaagatacgatttttccaccaaggcgccgattaaagaggcaccgcaagccatgatcgacgaattaatgtacggcacgaaaaagcccttgcacttcgtctttaattcctacttcagcggagacaaagaatacagtggcccctttgagggcattctgaagaatttaaatcgacgctactcggaaaacgccagcgatcgcaccttagaaaaaatcgagcctttcctctccgatattccctgtcccgattgccacggggctcggctcaaggtggaatctttggtctttaagctgggcggaaaaaacatttacgaatccaccctcctttctgtcgttgacgccatggaatttttcgattcactggaacttagcgacatggatcgaagcattgccgatcagattttaaaggaaatccacgagcgcctctccttcttaaaagaagtgggcctgggctacctcaccctggcgcgcatggcgggcaccttatccggcggcgaagcccagcgcattcgcctcgccacccaaatcggctccgccctcgtcggcgtcacctacgtacttgacgagccctccatcggcctccatcaaaaagacaatgccatgcttttaaagtcccttcggaaccttacggacatcggcaacaccctgattgtggtcgagcacgacgaggacaccatgcgggaagccgacgagatcttggacatcggccccggtgccggcgtccacggcggccatattgtagcacagggtagctacgacgagatcattcaagtggaagaatccctcacggggcaatacctttccggaaagaaaaaaatcgccgtgcccgaggagcggcgtccctacacgggggatgaaatcgtcgtctacggcgcggcgcaaaacaatttaaaaaacatcgacgtgcactttcccctggggcagtttatctgcgtcaccggcgtctccggttcggggaaaagctcccttattaacgaaatcctgaaaaaagccgtggcgcaaaaggtcaacaaaaacaaagtgcgtcccggcaaatacgaaaagatcgagggcttggagcacgtggacaaaatcgtctccatcgatcaaagccccatcggccgcacgcctcgatccaatcccgccacctacaccggcgtcttcgattccattcgcgacgttttcgcccaaaccaacgaggcgaaaatccgcggttacgccaagggccgcttctcctttaatgtgaagggcggccgttgcgaagcctgtaagggcgacgggattttgaaagtggaaatgcactttctccccgacgtctacgtgccctgcgaagtctgcggcggcaagcgctacaatcgggaaacccttcaggtcaaattcaagggcaaaaacatcgccgacgtcttggatatgaccgtggatcaggcggcggaatttttcgaaaaccatccgaggatcctacgaaaaatcactaccttgcaggaagtgggcctgggctacattaaactgggtcagccctccacccaactttccggcggcgaggctcagcgaatcaagctggccacggagctatccaagcggggaacgggcaacaccctctatatcctcgatgagcccaccaccggcctccacgccgaagacattcgaaagctcttaggcgtcctctcgaagctcgtggacatgggcaacaccgtggtggtcatcgaacacaatctggacgtcattaaagtggcggatcacattatcgaccttggccccgacggcggcgacggtggcggcgaagtggtagccacgggcaggcccgaggatgtggcgaaaaacgaaacctcctatacgggcatctatttgaaaccactgctggagaaataaagggatgcgatgcaaggcatttagtgaggggcaccgtttatagaagatttttccaaaagggaatgggtttcgagaaaggcctcggcgagaaacaccgtttctcgttttctttcggattttcttgtagattttaacgtactatagtataatctcacaaaagaaaaaacaaagaaggaggccttaatcttgaatacagaaaaatttttcgagagcgatcggaattgtcgcaagggaagaatccattcgacttgcgcgtccggccctaaaagacaatgccgacaggaatgacagccgatgtatttgagattgaagggagaataaaatgaaaaagacaggtttacttacaattttagccatggtactggcatttgcattggtcggttgcggatccggtgcgaaaaacggagaaaacgcagcgaacaacgcaggcaaaaaagaagctgctcaagtgagccaagaagacatggacgccgccgtaaagaaaattaaggacaacggcaaattggtcttggctaccagcgccgactaccccccttacgaatggcaccttttaaaagacggtaaagacgaaatcgtcggtttcgatattgaaatcgccaaagccattgccgaggaaatgggcgtcgaactcgagatcaaggacttggacttcgacggtattattccgagcattacctccggccaagcggacatcggtatcgccggtctttccgccacgccggaacgtgaagaagcggtgaatttctccgtaccgtacttcaccaacgaacaagtggttctcgttcgcaaagaagatgcagacaaatacaagaagatggaagactttgccggcaaggtcgtcggcgcacaaaccggctccattcaagagtccaccgttcgtgaaaacttcccgaaagatgtcgaattaaagagcctctccaagttaaacaaccttgccatggaagtgaagaacaaaaccgccgatgcactggttatctccaaaagctccggcgaacaatacgccaagcaattccccgaactcgtcgtcatcgacgcaggcgttcctgaagaaccgggcgtatgtgtcgccaataaaaaaggcgacgacgccttgaccgcttacattaaccaagtggtgcaaaaactaatcgatgaaggcaagatcaaaaacttgatcgcagaatacgaaaaactggccgacgaatccaccggcaatgaaggtgctgaggaagccacagcagaaaacaacggcaaataaattgcccgaaccatagagttaaaactgtttcctcgtgaaacagttttttctatcgaggaggaaaaatgaacttaatgaattcatggatggcctttatgggtaagtacggttcatcctatttagagggcaccttaatgaccctaaagctctcctttttaggggtgttcttcggttttttcttgggtattttaatcgtgctgcttcgtcggtcgaagttaaagcccctgcaagccatcgccaaaatttacgtgcagatttttcggggcacgccattattggttcaagtaacgatattctactacggtttttccagcgttctgccggatcaatacgcggccttaaaaaatccctttgctttaagcttgatcgctgtgtgcatgaactcctcggcctatgtgtcggagatcattcgcggcgggatcaacgccgtggatcgcggccaaggggaagcggcagcgtccttggggatgaagaaaagccaaattatgcgctacattatcttgccccaagccattaagaccgtgcttcccgctctggccaacgagtttgttaccttaattaaagaaacggccatcgttgccctcgtcggcgtaagcgacctaatgtatcaggcaaaagtcgctcaaggggccacctacaagccctttatgccttacgtaacggcggcgcttatctacttgattctcgtaaccggcctttccaaggtcatcagtgtgtttgaaaagaggttggctaacagtgattcgcattcataatctgacaaaaagtttcggcgacaaccaagtcttaaaaggcatttccacggaaatcgcagacggggaagtggtggtcgtcatcgggccttcgggctccgggaagtctaccttcctgcgctgcttgaatcgcctggaagaagccgacggcggcgaaattatcttcgaaggcgtggacattaacgacaagaacacggaaatcgaaaaaattcgcgaagacatgggcatggtctttcaatcctttaatctctttccccacaaaaccgtcatggaaaatataaccatggcgccgatgttggtaaagggcgtagatcaaaaggcggctgaggccaaggcggaaaagctcttggatcgcgtcggccttttggacaaaaaagacagctaccccaatcaactctccggcggacaaaaacaacggattgccattgtgcgtgccttggccatggagcccaaggtcatgctttttgacgaacccacgtcggcactggacccggaaatggtcggcgaagtgttggacgttatgcaacagctggccaaagaggggatgaccatggtggtggtcacccacgaaatgggcttcgccagggaagtgggggatcggatccttttcttagacgaaggctatttgctggaagaaggcacgccggaagaagtattcggtcatccgaaagaagcccggacgcaagaattcttaaacaaagtgctgtaaaatcattgcagacacattcctatttatcattccgaagaatcgaggggcataaggccgctcgattttttcttgggaatgtgttttcgaaacgggtatgaatctggggaaaggagacgacgatgaaacatagcctgaaagtgattcttgccggcgtggtcttgggaatcgcccttttggttttaacgaacgtcctccacatcgacgagagggtttttctttccgtctattggaaattaggcttggccttaatccttcttgtggccatcatgaacaccggctattatttttacaagttacgacaattgaagcccgtcatggccctttacgaggggggagactacaaaaaattcgtcgatgaattggagaacttgatttcgggaacgcggaataaataccttcaaaacatcatgaagcttaatttaggcgccggctatctggatttaaatcagcccgccaagttggtggatgtctatgaatccatggacgtgaactacttaaaaaacaagaacctcaagctggtctatcgcctcaatctggccatagcttattttaaactggaggatctgccgtccttcgatcgtattttcaaagcgaacgaggcttttttcgcaagctttgaagagcacgccacctatggagaaagcgtgggtcagctttatctcatggaagagatttcagaagggcattttaaccggccgcgggaaagattaactacccttcgagggaattcaaggaagccgaagatgatgaacacctacaatcaattggaagacatcctcaatgaaaaagcggcccgctttcggaaagacgccaattaggcaccgtcaattcatttttcaaaaacaagacagatcccccggacgaatcgggggatttttcatgggaaaaacaggcaagaaaaggaagaaagcatttaataggaagaaagaagtaaataggattttttatcagtgaaattttcgtgagagccgtttgtgtaaaaataaaaaaaagaaattgaagatttgaaaaataatgcattttgagcatcgtatgaacgagttgtatgttctatgcctattttaaaaaataaaaatattgaaatagaatgaatgtttgaacggggtttacaagggcagggatgaaagaacggttaaaatcgtgaatgacaaacgagggcttggtgaaaaaactgtgaaatggcgaagaggtgacagggcaagtaattctcctataaaataaaaatacaaaaggaggatttatgggaaaatataataaagtaaatcaaactcttgcgttggcattaagccttgcgacgttatctacgtcattttccggcggtgttgtctatgccgaaacgggaacaatgggcaatgaaattgtacaaagccaagggcaagagatggaaatgtatttccacaaacgacctgaaatcggcgacaaaacactgcagatcaatacgaaaaaattgaaagatgacaacaaactggatcttggcgatacgctgcgaatgaagctgatcaccgatggtcaaacgtataaaaagaacttactggatccggtaaaacaagagcacatcaaagaggactacacctcggatcaaatcatgggtgccggcggagtaccgcttatccccttcagagaatttagcggcggcgatgtcgtcgagctttacgttgtaaagggtgctcaagaaacgaaggtcggtcatgtcagcgtcaagggtcaaaaaagcttagcccccatcgtggagcagacgaaagataagatcatgatctcttcgcaaatgacggggtctttgaacatgtacatttacaccaagaaagatggtaaatggaagaatttcttgtttgacaaaaagaatgttccgaacgcgatttcctacgactttcccatggaaaagttgaagagcacctatggagcgaatgcaggcgatgagtacgtcgtcgtccaccaagaaaagggcaagggaaaaaccattagcaaaaaaatggttcttaaagatacctacgatgcgcctagtgtagaatttaaagagagagaaagcaaagataaaatggcgggcttcaccatttctctgcccgataatccgaaactggatccgacgcccattcaaaagaaattgccgaagttgaaggttgtaaaggggagtgaagaaaagacctttacccttgataaggcaaaaatgtctcaagagttgacaccgataaaagacggggtgttctacgccgtctccaaggatacgccgaacaacacggaatttaaattttctcaagagggagacaattttaacccttcgcaggtcgtaacgaagacctttcaggtggatatgtcaaaagcgacgccgctttatgaagaattgaagacctattctgcagacaagctaacggaatttcaagcgcaaatcaagacgataaagaataatttagaaaaagaggatagaactcaaaatgaggtcgacaatgcagctagagccttagaagcgatcattcttccaaaactgcgagattctcttggacccaagcggcaagaagccaataaaaccatcggcgaattgaagaacctggacaaaagcaagaaaacggcttatcaagcgaaagtaaccggtgcttcttccgaacaagagattaacaacattgtaaaggacgcacaagccgaagataagaagatagaagacgaaaagaatcgccctcttaatgagaaaaaagcagctgccattaaaacgattaatgagaaatacaccttccttacaggggaacacgaggcgtataagacggagatcatcaaaaagattcaagctgccacgacgatccccgatgtagaaaccctcttaaaggaagcagaggcaaagaatcaggaagcggaaaatgcggcgaagatcctcgaagcgaaaaaagacgctctcgcgaagattcaaggtctcccgggcttaacggccgatcagctgagtcaagcggataatgacttaaaagctgcggcagataaggaacaaattgatgaggtcgttaaaaagtatgaatccttaagtgaagctgctatgaagaagaaagatctcgacgatgccaagaaagagtatattggcaagttggagactctcgctttattaagcgccgatgacaaagagcggtttacgaaggaaattcaagaagccgatactctcgatctcgtaaaagaagcatatgacggtgcggttcagtttaacttaaacaaagctaagtccgctgcactgtataaaattgaagaattcaaaaatttaagcgagagtgaagtcaactcggcgatacaagaaattatggcgataaaagcgctcgcccagatcgaacctattgtagaaagatacaaaaaactcgatcaagaaaaagccgcggcaaagacggaacttgaaaatgcgcgcaagatggcgattgaagaagtgaaaaagctctctgatttagagccggatgaggtatcgaagtatgtggagcaaatcaatggcgctggcagtgtcgctgaaattcaatccattcaagaagacgccgctcgtaaaaatgcagaaaaggcagctgaaaagaacaaggcgaaaactttggaagcggctaaaaatgagctgagaaagctcgttgaagaagcaaaggcgatcaatctttccccgacatcaaagttgaaggaaaaactcaaaaacaccttaaaggatgctgaaaccgcacttcaagggcaatcgcttgacggtatgaatgcggcaatcaaggatctgaagcaggtcttagaggaagtaaaacaagagcaatcaacgccgcctgcgccgacaccgcaggatccgaagaagccgacgcctgatccgaacaatccgcagaagccgaatccgtcgaagccgacgcctgatccgaacaatccgcagaaaccgaatccgtcgaagccgacgcctgatccgggcaatccgtcgaaaccgaatccgtcgaagccgacacctgatccgaacaatccgcagaaaccgaatccgtcgaagccgacgcctgatccgaacaatccgcagaaaccgaatccgtcgaagccgacgcctgatccgaacaatccgcagaaaccgaatccgtcgaagccgacacctgatccgaacaatccgcagaaaccgaatccgtcgaagccgacgcctcctggtccctcgaaaccgacgcctccaagtccttcgaaaccgaagagaaaggaagaagccgctccgagaagaggatggtacaactttaatttcttcaagtctgcgccgccgaaggaacaggagaaacacaaggaaaaggccaaggagcaatcgccgactttcgtggatgttgaaaaccactgggcaaaagaagccatcaattttagcttgaaggaaaaactctttgaagatattgtaaaaggcgatcgctttgaaccgaataaagccatgacacgggcagaattcattgccatcttaggtagattcgaaaaagtaaacgtgttcaccgcgaatatcagtttccaagacattgatatgggtgcctattacggcaagtatgtaaactgggccaagggaatgggccttgtaaacggaatggacgcgacccatttcgcgccgaataagaacatttcaagagaagaaatggcaaccattctttaccgctacaagcaaatgaagaaaatcaacttcgacggtcaggcaaaacaatttaaagaccaaaacaagatccctaaatgggcgagagaagccgtaaaagaactttctaaatcgaaaattcttaacggaatggaagacggcactttccaaggcaagaaacaactttcgagagcggaaatcgctcaaattgtgtttaacataaataagttaagataaaaaaaactcccggtcctgccgggagtttttcattgggcgaaccccccgacaccgcatgagtgtcgggggtgtgctcagttttgttattaattttatgcttgcactttaaggtcttccaagaagcgttcgccaacgcgatagatatcgccggcacccatggtgaggattacatcgccggggcggcttttgtctttgatatagtccaaaatatcgtcctgttcgccgatgtaaatggctgaatcgtgattggcctttaccgcttccactaaagtcttggagtggatgtcgccgtagtctttttcccgcgccgcataaatatcggcgataatggtcatgtccgattccttaaaactgtggctgaagctatccaacaaaagcttcgtgcgggtgtaggtgtgcggctggaagatacagatcagccgatttttcaccgtgggctttaaagcgtggagggtggatgcgatctccgtagggtggtgggcgtaatcgtcgatgacgcgaatgccgtttacctcgcctttaaattccaagcggcggcccacgccgtggtagcctaggacgcctttgatggcatcttccatgggaatgttgttttccacgcaggcgctaatggcggcaagtgaattggacacattgtgcagccccatgacttgcagctgaatgggcgcgaccttttcgccgtgaatgtataaatcgtaggcggggcgaccggtgtggggatcgatgacgagattacgggcttcgtaatcggcatcgcccttgtagctgaacgtcacgacccggcccttggtggagtctttcatgctgtaggcgtagtcgtcgtccttatttaaaatcaacacatccccttcgccgaggttgccggcgtaggcacggaaggtttccagaatgtggtcgatgttgtcgaagaaatccaggtggtcttcgtcgatgtttaaaataatcgccgtggaagggaagtatttcaatacattggcccgatactcgcaggcttcggtgaggaagaagtccccttcgccgatgcgtacattgccgctgatttcgccgaggttgccgccgaccataatggtcggggagaagggctcgtctttaatggccgtggcgatcatggacgtggtggtggtcttgccgtgggtgccggaaacggcgatggagacgtggaaattcttcatgacggcgccgaggaacgtggcgcgatccaccacgtcgatctttttggcaatggccgcccggtattcgggattgtccatctgaatggcgtcggtgtaaacgacgagatccgcatcttcgatttgagcgggatcgtggtcttcgtataccgtaatgcccaattcttttaagtgctccgtaatgggcgaagcctttcggtcgctgccggagatggtgtaaccttttgaaagcatcagtgccgcgaggccggacatgctgatgccgccgatgccgataaagtggatatggtgataatccgtcgttccaaatcggaattgaaacatacttacctcacttcctggtagttatttataagacgacaaataaaaaaattgcggaaaatccgcaatttcttattttccggagtagaattcgacgatcagttgatcttcgatttcaacagggatatcttcacgagcgggttcggagcttaaggtagctcgattgttcttttccttcgtgatgtagggataggcgttgacgaagttcgtttcgtagttttctttgaacatgtcaactttgcggccgcggtcgcttaaggaaatcacgtcgccgacttggacttggtaagagggaatgttgatcttcttaccgtttacgtgaatgtgaccgtgggtaaccatttgtcttgcttgacgaatggaagatgcaaaacccatacgatacgttaaattatctaagcggacttctaagcgcttaacaagtgcagggccggtttcttcttcagctttttgtgcatcgaggacgtagcggtaaaattgcttttccattacgccatagtaagctctgagtctttgtttttccaacaattgcttgccgtattcggttaacttcttgtcggaacgagccgtgcctctgccggcgcggttcatcgccttcggatgtccacatacattcagacctaatcttctggattgtttgaatctaggtcccatcatttttgccattgtcttcactcctaaattataatttgccgcgataatttagaacctctggtattatacaagaaaattgatgatatgtaaagagaaaaaaggctatattccgcttttttatcccttgtgctatactaaagaaagacttgcgaggaggacttatgcataccatttttcaagacacgcaatacgtcgatgtgttggccggaaaggtttttgaccacaaagacatcgagataaaagacggcaagattgcggccattgcagatgcctgcacactggacggtgcagagatcatcgacggtcgggatcttttgctcgtgccgggctttatcaatgcccacacccatttggggatgagttatttcagaaattacgccgacgacatggatctgaacacgtggcttaccacggccatatggcccctggaagcccatttgactcgcgaagacatttattgggccagtttgctttccatggcggaggggattttatcgggaacgacgacgttctgcgatatgtactaccacttggacatggtggcccaggcggccgtcgccatcggtatgcgggggcttttgacccgcggactcacagacatcgacggcggcggagacgaaaaattagaagaaacccgcatgctctatattaacagccacggcctgggcgacgatttggtggaagtggcaccggcgcctcacgccatttacacctgcagcggcgattacattaaagacatcatccgacttaccggagaaatggacggcatactccacacccatttgtccgaatccttgaaggaaatggacgatgccgcggatctgtacggcacgacgcccattcgttatatgtgggatttggggctggatcaggtacacaccattgctgcccactgcgtgcatatgacggaagaggacatggatttggtggatccggagaaatttttcccggtgcacaacccctccagtaatttaaaactggcaagcggcatcgcccccattcaaaaaatgatggacaaaggccttaccgtggcgttgggtaccgacggcgacagctccaacaacaatcaaaatatgttggaggaaatgcacctagccagtcttctcgccaagggcataagctacgatcccgaggtgctgaaggcggaagatgtgctacgcatggccaccattaacggggcgaaggcgttgggacgcgaagatgaaatcggctccatcgaagtcggaaagctggcggatatttcctgctttaatttaaattcaccgagctttacgccgagaaataatttaatcagcgccctgtgctactcggcgcaggcggaagatgttaaacacgttttaatcggcggcgaatttgtcttaaaggaccggaaactgacccgggtcaatctcgacgatattcgggcagaggtggagagaaaattccaacaacttttagaacgtaaagaattaagcgatgcaataaaaggcgacctttaggccgcggaaagagaggatattatggataagaaagtggtatattcggccattcaaccctccggtagtttgaccatcggcaattacttaggcgcactcagcaatttttccgatttgcagaaagagtaccaatgcatttactgcgtcgccaatatgcacgccattaccgtgccccaaaaccccgccgatttaagaaagcggaccctggatttaatcgcactctatgtggcctgcggcatcgatccgaaggaatcgattctctacatccaatctcaagtgcctgagcacacggaattggcatgggttttaaacaccattacctccgtcggccaattaaatcgcatgacccaatttaaggataaatccaaaaaacaaaaagaagtgcacgccgggcttttaaactaccccgtacttatggtggcggacattctcctctatcaatcctccttcgtgcccgtcggggaagatcaacggcaacacatcgagctcacccgcgacattgccgaacgctttaacacccgttattcgcctacatttaccattccggacattatggcgccgaaggtgggagcgaagatcatgagcttgcaagatcccacatcgaaaatgagcaaatccgatcccgacgaaaatgcctttattttaatcttagacgaacccgatgtcatccgccgaaaaatcaaacgggcggttaccgactccaagggaaccatcgcctataccgacgagcaaccgggggttaaaaaccttctggacatctattcgtcctttaaacacattagcccggaagaagcggaacgtgaatttaaatccgcaggctacggcgaattaaaagaagccgtaggcgaagcggtggtcgaaggccttgctccggtgcaagagcgcttccacgccattcgcggcgacaaagaacaattggaagccatttgcagagaaggcgcggaaaaagcgtcttacctggcacaaaagacgttaagaaaagtctatagaaaagtcggattagtacaattttaaacaagtcttgatttttcacagaagattttctataatgaacctatctttacacaagtgaaggaggagtagattgttcctcgtctaaagagagatcgcgggtggtggaagcggtcggcgaagcaattgaaggtcgccttcatcatttttcgcgagagcgaaacggcgtcccgtcgttatggggaagaagtgccgtagcaatacggaataaaggtggtaccgcggaatctcgtccttttcagggcgagatttttttgtaggaggaattatgaacagtatgcagaaaacctataagcccaaggatttcgaagcgcgcatctatgcccaatggatggaaaaaggcgagtttacgccggatcgggaaaaggataagcaagcgggcaaaaagccctttaccatcgtcatgccgccgccgaatgtgacggggaacttgcacatgggacacgccatgaacaacaccctgcaagacattttgatccgcttcaagcgcatgcggggctacagcgccctgtggattccggggacagaccatgcgtccatttccacggaagtaaaagtcgtggaaaaacttcgcaacgaaggcaagtcgaaagatagtttgggccgggaaaaattcctggaagccgcttgggcctggacggaagaatacggcggcaacattaaaaaccaattaaagaaactgggcgtttcctgcgactggtccagagagcgcttcacattagacgaaggcttgtccgccgccgtcgaagaaatgtttattcgcctctacaacaaaggtctggtttatcagggcgaccgcatcattaactggtgcccccacgacaaaaccgccctttccgatgcggaagtggaacacgaagagcaagaaggcaaaatgtggaccttccgctatcccatcgacggcgaagacgacgccattatgatctccaccacccgaccggaaaccattcccggggacttggccatcgccgtgaaccccgacgacgaacgctttacaaactatgtgggcaagcatgccgtcatccccgtcatcgggcggaagattcccattatcgccgacagctacgtggaatcggaattcggcaccggcgccgtaaaaatcaccccgtcccacgaccccaacgacttcgaggtcggcgctcgccacgacttgggacaattgctgattatggatgaagaagcccgactcaacgaaaacgccggaaaatatgcaggtctgagccgcgaagaggcacgcaaagccatcatcaaagatttcgacgaaggcggctacttggtgaaaatcgacgatcaccacaacgccgtgggccactgcgagcgctgcaaaaccgtcatcgaacccatgctttccaagcaatggttcgtcgccatggaagaattggccaagcccgcactggacgcctacgaaaaaggcgagctccacttcgttccggaacgcttcggaaagatctacacccactggctggaaaatattcgcgactggtgtatttcccgtcaattgtggtggggccatcgcctgcccgtttactattgcgacgactgcggcgaggtgatggtatcgaaagaagccgtccacacttgcagtgcctgcggaggcaaaaacattcgccaagacgaagacacattggacacctggttcagctccgctttgtggcccttctccaccatgggttggcccgattccacgcctgatttggactattactatcccaccgatgtgttaatcacaggctacgacattatcttcttctgggttatccgcatggtcttctccgccctggaaatcaccgaggaattgcccttcaccgacgtttacctcaccgggctcattcgtgatgaacagggacgcaaaatgtccaagagcttgggcaacggcatcgatcccttggatgtcatcgaccaatacggcgccgacgcccttcgctttacattgattaccggatccactccgggcaacgacatgcgcttcagctacaagcgggtagagaacaaccgcaacttctgcaataaattgtggaacgcatcgcgtttcgtgctgatgaatctgccggaggatttctacgacgccaaggttatgaaggacaaactccattcggaagaccgctggattttaacccgcgtcgacgaaaccatcgtggaagttcaggaaaaaatcgaaaaatacgacatcggcatggccgccgaagccgtacacgactttatttgggacgaatactgcgactggtacatcgaaatggtgaaaccccgcctctacggcgacgacatcgaagaccgagaagtagtctacggcgtcctgttggatgtattagaaaagattttgaagatgctccatccctttatgccctacattacggaagaaatttacgccttcctgccgtccaccgagggcgatctcatcgtcagtgactggccgaaaagcggcatctacagctaccacgacgatgtggaaaaaatctccattctcagagaagccattcgcggcattcgcaatgccaaagcggaaatggatatcgagccctttagaaagagcaagctctacctcttaaccgacgacgacgcccgggcggcagtctacgacgaattaaaagatcatttcgccaatttggccaactgcaccgccattgagcgaattcccgatcgcgacgccgtctccgacgatgttatctccgtggtcgtggaaaaagcggaacttttccttccaatgaaagacttggtcgattacgacaaagaagcccaacggctgaaaaaagacatggaaaaaaccgaggcggaaatcgagcgtgcggaaaagaagctggccaacgaaaacttcgtcagcaaagcgaaacccgaagtcgtacaaaaagagcgggaaaaattggaaatgtataaagaaaacctcaaaaacttaaaagagcgggctgctttcgtcgaaaaacaattggcggattaggttttaggaaagtattttgagtttgaccgcctgcgattaattgaattcatagcgaaaaacggatgctgaaggagaaggcatccgtttttccatgctccggtttttcttttgcgatataatagaaaagagaatgagtatcaaagggcgaaaataaaaaattagggaggaattatgggatcggatcgcgcgaatatgcctgcctttggcgtgggccctatgtatgtgttgagctgtctttttttgacggccatgggcattctttgtcggaacaagagctttatggccgtggggcgcatggaaaagggaaggtatttattcatcgcggcagggattttctttgttctcgccgggctttacctttggatacaggcagtaatcattcaaaaaatcaatgctaaggcccgtgcctcggaattaattaccacgggcgtctacggcgtggttcgcaatccggtgtataccgcctttatgttcatctttaccggcgccttgctcttcgccgccaatgtgatcttgttgattctgccttttttttttgggcgatacttacgctgctaatgaaacagacggaggagaagtggctccttcgtcaattcggcgaggaatatgcggcttattgtaaagaagtgaaccgcgtgattccgtggtttccgaaaaggaagtcgtgagaatgaaaaaataactcccgctcgaaccagaggctcaataaggaaaaaagaaaagatttaatggatcgttaatcgcgtaagcaaatgccatggtaaggtctattaaagatagattaatacggataaacggagtaagaaaaacggatgctgaaaattcggtatccgtttttatattggctctataatatccattggggagtaatctcctcaatggatatttttgtgcaaaaagatagcacttgttttccctatcacctaaaattaaatcaccacaacataataaaggggggcaaacaagtgca

SEQ ID NO: 33 - DNA, 102427 bp, Peptoniphilus rachelemmaiella
  source 1..102427: mol_type = genomic DNA
ttgcaatcaatggtaatcaggcgtctttcttctgaaacaccggtgacctcgacatcttggattcctaaaagtaatgtggtaatattgttttgcacttgtttgcccccctttattattttgtggtgatataattttaggtgatagggaaaacaagtgctatctttttgcataaaaatatccattgaggaggttactccccaacggatattatagagccttttttaaattacgagaccctgtctgtctctaagtgaatgattcgatccgccacggttaaagaggaggggcgatggctcaccatgagcaccgtcttcttccccgccgtctctttcagagaccgcaaaatcatggcttcatttaagctgtccagatttgaggtcggttcatccaagagcaaaaagggtgcgtcgtgcaagaaagccctggccaggcccaagcgttgccgttcccccgatgagaggcggctgcccatttcaccgattttcgtgtcgtagcccttcgggagggaaaggacaaaatcgtggacggcggcgcggcgacaggccgcttccatttcctcgtcagtcgcatccaatcgggccagacgcagattcgtggcaatggtgtcgttaaacaaataggtttcctgggtcataaaaccttcctgcgctcttaaggcggctgtttcgatgtggcgaatgtcttcgccgccaatcttcacgcaaccttcatccacgtcccaaaagcgcatgagcaagcgaagaatcgtggattttccggaaccggattttccctgcagggcgaggatttcccctttcttcacatccagattcatgccacgtagtatgggagcgcggtcgtaggagaaattcacgtcatccagcgcggcgccggtgaagtctacggaacgccctttctttacttcctttactttcggttgctcgtctaaaatatccaagacgcgattgccggcggcaaaggtaggctgcagggtgttgcccaatgcggccagagcgagcacggggccgtaagaggaaagaatgtatgccaccgacgcaagaagcatgacgggatcttccgtgcccctcagataaatcatgcctgccaccaccatcaggcccaggtgcaagagacttaataccaagcccgttgtggccatgccgaaagccgtttcgtctttcaatcgaccgttggcctcgatgctttctcgacttatggtttttaatttctttaaatagatatcttcgaagcggtactgcaaaatttctctcagactacgcaggccgtctaagacaaagccgcttaattgaccgctggcatttcgcgcatcgagaccaaggtttttatttcgcttggaaagatacaaaggcagtgccacgccgacgacggtgtagccaaaggcggcatagagcgccaagagcggctccgccttcgcgagaaagaccacggagagaagggagaaaataagtgcaatggctgccggagaaatggtgtgggcgtaaaagacttccagcaattcaatatcggaggtaatcaatgtaatgagattgcctttatctctcccctccagtttcgccggcgccaattctcgcaaggatgcaaacaccttgctccgcaaaatggcgagaagtttaaaggcgatgtgatgattacacaactgctcaccatagcgcaaaggaccccgaagaaagccgcaaatcagaatggccgccaccaaagacggggcaatccacccatcgaaataggccgatgccaaaccgtaggccgttaaggcggaaatggccgttgccgagaaaaagcccaacacgcccagggtaatggccagtgtcataaccggggccaggggcttgaccatgcccacgagccgccccatcacttccaatggtttacgcatagacctcacctcctcggtactgctcaagctccgcctgtgtcttccacagatcgccatacatgccgcccttttccagcaattcctcgtggcggccttcttccaccaagtgcccctgattcagaaccaagagccgcccggcatctttcacattggccagacgatggctgataaataaaaccaagcgggtttcggccaaggcgcgaatttcgcccacgattttttcttcgctttccacatcgatattcgaggtcacttcgtcgaagatataaataggcgtgtcgtgtaaaagggccatggcgaggctaagccgctggcgttgaccgcctgagagattgctgccgccactttgaatcatcgtatccaaccccgcttccccggcgaagtactctttcaggttcacccgatccaagctgtcccacatggcttcttccgacgcgcgaggattggccatggccaatagctcccgtacacttgcgcccattatatagctttcggcacctaagtaggtcacgttatccaaaaggcttttttctttcgtttgggaaagctccacatggctaaaggccagagatccggtgtagccctttaactgcttcgacaacacggcggccaaagtggatttccccgagcccgatggcccgacaatgcccacaagctgcggtcccttgatgtcgaaggacaattgatccagggcttttttctcgccgtcgtaagacagactcaagttctccgccgtcaattcatcggcagctgccatggacaatgtgccgtcctcttcctcttccagggccagaaggtcaaacattctgtccgccgccgccatgccgttcatggcgatgtggaaaaaggagcccaattgacgcatgggcaaaaagtaatccgccgataagagcaagataaacagggcgtcaaaaaagtccaaccgcccggccatacaagcctttaagcaaacgaccaaggcgatggctgcgccgccgtaggcaaccaggtccatgacgataatggagttaagctgcatggttaaaacccgcatggtttgcacgcggaaggattcggcggatttttccatttgcctgtggcgataaggatcggtgccgtagatctttaaggtggtaaggccctggaggttttctaaaaactcgtccccgacatcggtgtattccgtccagtatttggcgaaggttttttttgcaaaagtctgaatcaaggcgatagccaagggaatcaggggcacgccgattaaaagcacaatggccacggtccacgacatggaaccgatgacaaaaaacagaaaaatcggcgcgatcatactgtaaaaaaactggggcaaataggcggaaaaataaatttccaattggtcgatgccttcgccgataatctgtaccgcctccgccgagcgcaatcgctctttgtagtacacgccgaagcccatgagcttttgaaagagacgtgtgcgcattttttctttcaccgaagcagaggcgccataagcgaggcgcacttcttttttcgccacgacaaagcgcaggagataaataatcaaactgccggctacggcaaaggacaagggcttttgccaagcactttccgtaaaaaacaggcgcaaggcgtagaccataagtcccgtcgccaaactattgagaaccaagagcaggaatttcagcccaacgaccttggcgatggcttttttcgattcgctgaaatagcggagtaatcgcttatcgatcaattctatcctcctttccttcggaaaataaaagggccggcgaaggtgccggcttccttctatttttgaataatgacttggcgattggctccgttccagtccactttggcaccggaaagttcgccgatggcgcgaatgggcaccatggtgcggccgttttgaatcatggcggctacatcgatggctgttttcttgccgtctgcacggacaatggtcttcgatccgatgaccagcttcatgctgcttgcgccttcgccgacggtaaccgtgcgggtcttttgatcccagcctactttcaggcccagggcttcggagataaagcgtacgggcaccatggtgcgaccgtctttaataaatgccgggctgtctgttttgacttccttgccgttgaccaaaatggtaatggcgtttttgttggctttcggtgcagcgggagcctttttcgattcggcgccttgaatcatttttgcttgagaccaatcgaaaaccaggcgcgccttttgttcgccggcaccgggggtgccaccttgcatttgatccatgacatccacccatacagcgacgtctacgagattatcttttccgcttcgcacaaagctgaagctcttcgtgtattcccctttgcctgcgcctttgaccgcttcttcacggcccggggcggtaacaaagagattggttaaattcccttcttgattcataaaattcaggggcttgacatacactttataggtgaacttgcccccttcttccttcacttccgcaacgggagaaagggctttgttggccatggattctttttcggctgtggcgtgttttaatgccacggggacttcataggttttgctcgattcggcgcgggccacattaggtgccagtaagcatacaagggccagggccagggataagaattttttcatcgtcgttctccttatttcatatctttggtatcaatggtgtacaacacttgtgcggcttgggcgcggctgaaactttccttcggtgcaaaattgccgttgcccatgccgttcaagagaccttggcgggtcatcttctcgacagaatccttcgcccaggaagaaatctttgttccgtcatggaactgtcctttcgctgcggaggcgtacgcttttttctcatggctcaggaatttatctaagatcacggccatttcttcgcgggtgatggtgcggttcggctcaaatttgccgccgcctgtgccctgaatcatgccggcagatgcggcccaagccacatagggggcgtaatacgcatcgccctttacatccttaaaggctgtggatgcgccggaaggcgtgatgcctgcttttcttccgagaatcgtgacaaattctgcgcgggtgatggcgcggttcggtgcgaagcggccttccccttctcctttaaagtagccgcgggccacgctgtgggcgatggcattgagggcccagtgatcggcgccgatatccttgaattgcgtcaaaacagcgttgcgttctgtttcacttttcgccttgagggcttcttttttcttttcttcagcggacttctgctcttcttttttcttgtcttccgttttttgctcttctacctgtttttcaggcgtcttcacttcaccatctatgcggcgcgtttctctggcgctgttccagtcaaattgcagataggcatcttgttcccctttaccggggccaccttgaattttgtccatgacatccacccatagggcgattttttgggattgcactttgtcattgagcgtaaaggaccagaggccgtcgccgtgataggatgcgcggcgtttcccgccgtcgtagtaaaagagattggtcaggcggccttccatattgttcatcttcatgggcttaaattgaacatagtaggtgtagcggccgttgtagacatccacggtggcagaggagctcaaggcggaagatgccatggacttgccgccaccgactttggtcaatgccacagggagttcgtagcgcagggtttgaccctttttcttttcgtccttcttgtcgaggggattttcatccttgggcttgtctttgttttcatccttggggacttccttttgtttgagttcgccgtgccagctgtaaatggccgcttccagttcccgaacgcgccctttcgtcagcttgtcgccttcaatttctttctccgccgtttgcaaaagatcctttaattccttttgcgatttttccgtataggaagagggatcgacttttttcttttgatcgatcagtgccttcaaattgcctatatccatcttatcggcaggcttggagtttcccataaagagggcaaaggcttcgcctgcttttttcagatcttcatcttttttatccgtagcttttaatagagcggcattttcatcgagattctttttcagtgctcctttatcggcaagctttgtatcctttaactccgaggcaacggttaaaaatccttcgtaaacttttttagccgtatcgtccatgccctttgttttttcaccgagggcgaggaggaagttcagttcactaacttttaaagtgaggtcttcttccttggccgatgcatcttgtaaaagggcatctgctgcacttgcggtggcattgagtgccattgctacgtcaccgtcccagccgtttttgtcctcgccattggcttttttaacggcttcgtccaaggcttttttcgccttttcaagggccgtttcttccttgggtttttgtccgggtgtttccggctcctgcgatgcctcgccttttatttccttgtacttcgaaatttcgaggaaagcttccttttcttttccctccatgacagtaatggcaaatgccagcttaatcggattctcaggttttgaatcaagggtaaaggaccagtcatttcccttttgttgagtctcagacttagttccatccttgtagtagtaaaacttaccaatgaattgactggattccggttttatcgaaatggtaaatgtccacttaccatccttttccacagccgttattttctctatatggtcctgagccatggatttattacccgggctgtcagccctctttaatttccagtccaaatcataatgcttttcctttgccgcagcttgttctccgtcggcaaaaggttgtgcgtaaataccttggggcatttccggtgccttggccaatacattaatcggcgccgctaaaaaaccggcactcatcatggccgccatggccaaacttgtcgaacgaattttcatcgaatacctcctttttccaattgttctgtgaaatacattgccgcttccttcagctcctcttccgtcgcctctctggatttttccgatgcctctttcatttgctccctggcatccttcggcacaaagacgagcaaatcgatgcgggcggccaatttttcgtctactttcccgggacacaaataggttcccaagctttctttcttgtgatcggcgaggcatttctcgaggccttccatggcccgcgccccgtgttcggaatcgggcatggcgcccatggttaaaaagagacctgtttttttcggcgcgcgatccaagattttcatcaccgccttatcgggcaaggcgcgatcgcaccatccgccgagaaggccgtagtcgtaggccgacagatccggcttgtccttcagatccaaaagggtcaaatcccgattttctttcagcgcgtcgtaaagatactccgccatgcgctttgtgtttcccgtcttcgacgagtaggctataaatcctttcatctaatcctccttgggttttacaatggacgcgccgccgacctcgatcaattccagctccgtgccgtagagtttgctgatgacgcgactgttcagcacctccttgggatcgccttggtagacgattttaccgtggtacatgccgatgacttcgtgggaataattaatggcctgcataatatcgtggagcaccatgacgatggtggtgttgcgctcttcgttgatttttttcaccaaacgcaatatttccagctgatacttaatgtccaaataagtggtgggctcgtccagcaaaagaatatcggagcattgggccaaagccatggcgataaacacccgctgcttttgcccgccggagagggttctgatttctctctgccccaattccgtgatgccggtcatttccatggcccgttcgatttcttccatgtcctctgcggaatatttctgcaggggttttaagtagggatttctgccgtaggaaacgtagtctttcacctttaaatcgccgatgatgcgattttgttgatggacgatgccaagctcgcgggcatagtctttcggcggataggagaaaatatcttttccgtgcaaaagcacccggccgcggctcggcttcatttggcggctcagtattttcaatagcgtggattttcccgagccgttggcccccattaaggtggtaatggcgccgggtgtcacttttaaattgagcttgtttaaaatcaaatggcccttggtataggcgtagcttaggtttttaatctccatagttttcgcctcccagtttcaacaatgcgataaagaagggcccgccgaagacagccatgatcaccgccgccggtatttcgtagggataggccgcgatgcgccccaccgtgtccgacagaagcaagaccaaactgcccaggagcatattaaagggcaagaggtatttgtgatcgccgccgacgagaacccggccgatgtggggcacgatcaggcccaaaaagccgatgacgcccgctaccgccgtggtgacggaggctaaaataatggcgattaacgccacgataaagcgatcgcgatccacgcgtacgcccagggcgcgagcggttttgtcttccagactcaataaattcaacgagcggatggtaaacagcgccgccactaaaaagataatgacgtaaaggcagagaatgtgcacatcgctccaagttttttgcgccacattgccttcgataatggcctgggtggcgcttaaatttcgccccataacggatttaatgccttcgccgatgccgataaaagtcatgttcaaggccacgcccacgagaattaatcgcgtgggccgcacgccgccgtcccatgccagggtgtagatcaaaaagtaggcgaaaagaccgccggcgatggagaacagaggcgagaagcccaaaagggcaggcgacagggccagcaccatggagtttacgaagtttgccgctgcagaaatgccgatgatcccgggatccgttaagggatttttcatcaccgcctgcaaaagggtgcccgatgtggccagggccgcaccggctaaaatggcgataaagacccgcgggaagcgcaaatcgtaaatccgcgccacatctccgtcataggagaagaatagaccgcgcaaaatttgtcccacgcctaattttaatgagccctccgtcagggagaagaaaaagaccacgaccaggaggacggcgacggcggcgaaggaaatccatcgcctgcgtactttttgttttaattcgtcagttcccttgtccataaaacaccttttctaaatctcccagtgcctctttgtaggaaaaattggcactcataccaaatatcttcgtattaaggtcatacactttattttcttttacggctcggaaatgtttccagacgtcgttgtttttaaattcatcttgaaacatttgatgcaccttgtcgggcatggcgtgtgccgttctgagaataatgtccggatctttttccagcatatcttccgtattgaccgttaaaaattgctgatcgtcatcggggtagacattctctcccccggccagcttcactaaactgcctgcataagacttgtccgtcgccaccacataggacccgggaaggcccatgagaatcaacactttgggcgcgggccccttgtttcgcgatttaaagtccttcatgaactcctcgtaatcttttacgagggccgccgcttctttctcccgatttaaaagacggcccatgtcctcgatggagcgatacatccccggcacattggataaattcaaaaaaccgaagtgaatgcccgccgccttatacttcggcaagaggtcgggcataaggctcgccggagaaaagacgtagtccgggttcatggatgctattttttccatatccggattcatggccatgccgatggtgggcaagttggcgtatcgcgccggcggcgattccaattgcgattccgcaatggcgacgagatccacatccagcttgtccatgatgtcggcacaagccgccgatgtagtgatgatgcgggcgtggtcgccgtcgatgcgcttttcaggtttcgccttttgattgacacagcctgccaggaaaaagagagcgagggcgacactaaaaatcttcaaaactgaagtcttcatcgtcatcttcctctcttaattcattgagcaggcgctttttctgtgccaaaacatagaacaggccgccggccgccagggcgccgcaagtcacaaagaccaaaatcgccatcatggatgcaaaaacaatccgcgtcgcaggcccccaaggggcttttttctttggcgtctcggttttgtcgcctttggcagcttcgccattttcaagggattgtatctccggcgaatcttccgttaaaagaccgtgttcgtaaccgatgtcgctttccgtatcgccaaggcccgacgcgccgccgtgggtgagggcatctttatcggcactccctccttcttggggcggactcttcggcgaagaagcgggggtttttgatgccgaagccgccggtgccgctgcgtccacttttgtcttggcgggcgctccgcttttcgccggtgccgctttttgaggcgcctgctttggcgccgccgcgccttgggacaaaacgaaatccgtattgcccggcgtcatgtttcccatgtcgccgtaaaaaattacttcgcggcccattgcgtcgataaacagactcaggcgaatcacgcattccttcgccggcagttgaaagcgaaaatctttccattcgccgccgccttgtggcgaatcgtaggatacattgctaaagccgcttgcgccgcgtttttccgcggcgatgcttactttcgacacattgtccatcatgtgcaggcgaatggttaacatccgcttgccgcccacttcctcgtaaagggcctggggatccaacacgccttccgccatgccttggccgatgccttcattctttcccgaatcttcaatggccccggtgatcgggtggcgataggaagcgtgcatgtccacaatggaagggccttcggcaaaactgatgttaggcaccagaagaaagatcgccaaaagaagagacaatagctttttcattgcgcttccctctccctttccgcttcatagatcacttcgtccatatacatgcggtaatactttctcgtcatgtacgcgccgccgcctaatgcggcgaagataaccgtcaaacaaaaaataatcagacccggcctctctttctcttgtaattcttcttcgttcacgggcgccttggggatggattcccggtccgcgatccccgtgccttcgtcatagctgccttcttcgaaagacggcgcctccccgtccgccggcgtatcgtcaggcgtcgacggactcacattggtgggctcactcgtcgatgttgtaggcgatgaagcgttcaatgttacaggcttcgtcccctgacttttcggcgtcttcacggccttcaccttcgcaggcggtttaatctttaagccgccgtttgcgacgggctttgccgcggttttcgcagttttaataaagaaggtgcccaagctttttgtttcaaagtgaatgcttccctcttttatttttgaggtcagtttctctcctttttcgtcgtaaatctccgccacggtaccttggaagggaatggctaccgccacgggcttttgcggcgaaagatttgttcccaaggcttgtaccgatcccttgtaatctttcggaatcctttcaatgggccttcgacaagaaaggttgtaagcctttgtgcccgcaggaagattgagcttcccgagagcggtttgaagatcccgccccacaagaccgttggcgtaaaattcaaatgcttcgccaaagcctcctgccggcacggagagcaccacgcctttgtctgcatagctgtgggcctctgtaaaagacggtgccttcggccccacctccgcccgatgggccaaggtgtgctcgtcggcctggattttttttacgctttgaaaatccaatttcaagcgggcatttaaaggctcgtcacccatcggcgccactttcggatccaccttcaggcgaatcgtgtcttttttcacatccagaggcatggcaaagatactcggacgcggcaatggctctttctccggttgcagatcgtagcaaagaggtcgtgccgcggaaaatccgtcgtcggtttcgtaaaacacgcggctgagtgatgcctgtatattcgaaactttcaaggccttcgtccctaaaaacaaggttcctttgccgtcttttactaaaagctccgccttgggatccagagcgccgttgcccatggacggcttgtcttccgtttcgtgccacaaagcaacatcgagggagtagaggccgtcctctacatctaaaggcgacgacgtggctccgggcacatcagaaggcggcgtttttttcgccgcaggctccgccttttcgctgcccttatttggccagtcgacttttaagcgggcttcctgttcgccgaagcccatttctcccataaccggcacgtaaaacttcaagtcgtagatggcgcgattgggatccacggaaaaggtgacgctcttcggataaagcttgcccttcacccgcgggtcgctgccctttttcgggtcgttgtagctatcgtaatccttgtaatagtccaccacctgaacgccacgaccatctacggtgacttcgcctaaatagccgcgggcgcccataaagtctaagggcaaaaattccaaggtgagcaggcgttcattgcccttttcaatccatttcgcctccggctttaatgccttttgcgccatggaaggggcgttttctgttttctttaacagcatcactttcgctgtgccaccgcccgcccatgcgccgccgggaataagtaaaacggcgaggacaagcagaagtatgaatttatatcgtttcatgtccccatcctttgtgatcctattcctctgcagttgcctcagcttgcgtgggtatgcgcttcaggaaaatatagtagtggagcgccagtacgaagacgatggccatgcgggcgtgtttcacgggaatcacgaaaaagcaaatggccagaagcaaagtaatgagtgcgagcactttatactttttctctttcgtcatgcccttgccttccaacaggggcgccacattgttttgatacagaggcaattgggtgagccatgtgtgaaatttttccgagccccgcgcaaaacatgccgccgccaaaatcagaaagggcgtggtaggcagcaccggcaaatacacgccgatgaggccgattcccgtaaagagaaagcccagaatcataaatactattttcaactatccgctcctttaactaacactgtgcaagatttaaaaccaaaagataattcgcctcggcccggtggccggaaaagttcaccgccgcatgggagcggaaccaggtgtaagacaacaggacgccgccacctaaataggtccactcgccgaaaacatccagagggatttccacttgccgatccttaaagggaatggcatggctttcgccgtctttttggtaaaccaactctttcaccgcaccgtgtttcatatgccctttgtgttcttttttcagagaacgggtggcaaacaccacatggggcgatgcgtcgatgaccagatccgccttgtgttcaaagaccttgttggccatggaagggcgaatcgccgcttcattttcgtcgatgtgttgttggaaaatagtgagatacacaggataagtcttcttttccaaaatgtgaagaagaaattccccgggcaccttctgccccggctccggcaaatgttcgaataacttcgatttttgcaacaggaagcaggcgatgcaatcctctcccttgccgataagctgcgaggagaagctcgtggcccgatcttcttcaaggccgaaaatgccttgcatggttagggcaagcaattgcttttcccgctccaatttatctttaatcaacatgccgatttcggtgacgtagtaatcatttttttgtttgtataaaatcccggccttaaccattcggtccagcattttctttgcattgggccgagaacacgcaaagatttgacttaagtcgataatcgtgcgactcgggtgctcttcggtaaagcacagtagatatttttgttgttgttctgttaaatgtaaatccgtcatagcgtcatccttccaatgaaattattgatacgctttatcattgcatacacattttcattgtaagtttttattgcccggcatgcaatcattttttaatcatggaatgggatgcggaatcatccgcacccctccacaattaattggctgccttctgaatttctttataagcccagtgattggcgggaacatctttaaattgcatcgtgccgggtcgaccgaccactttaaaggcacggtttacaatgacgataagttccgcacgggttaccgtgcgctcgccgccaaaggtgccgtcggggtagccttgaatgatccccgcattttgcacggcgccgacgtagccgttgtaccaagcgccgccttttacgtcgttgaagcgggcgttttctgccttcagatttaagatgcgggtcatgatggccgcaagctccgcgcgggtcatgcttccttccggttgcagactgccgtcgttatagccatttaaaatgttcaggccgtggagtcgagccacgctatttccgtaccactctttgccgcttacatccttcgggagacgataggcgtcgctgttttgaatgaattgattcaaaatttgagccacttccccgcgggtcactttcttgttcggcttaaagctgccgtcggggaagccttttacataagctttttcaggcgctttcaccgtaaagctgtttgctttttgttccacatgctttggtgcttccttcttcgcctcaggttgtttcgcctcaggcgccgatccttgatggctcggacggttagaaggtgcaggcgattcgcctctcggctcttggcgaggccaagggttcggcttcggcacgtcgggtgtcggctccggcttcggcttcggcacgtcgggtgtaggctccggcttcggtgtttccgttaccaattgatccatggcgtcgtaaacagaggttactgctcgatccatggccgatacatcgttgccttctaaagccgccttggccgagtgaatggcatcttcaagcttggctttcgattctgccgtataagttgcggcggcaagttttctttccgctttttcaatggcctctttcaatgccgtttttgctttttcgagggcctcgtccaccttcggcggtttttcttccgattcttcaacctgcttcatgttgtcgatatcgtagcttagccgcataacatctttatggaagtcgggtgcgttgcccaggacgtatttcactttcacgaaatgttcccgacgaaggtctttgcccatgtcgatggtgacagaggttaagtctcccatggcatcggttactttgttgatgacgggcatggcgtccactttgccctccatatcggtagaggcaaagagaatgtctttcaaatgaccttccaggttcccaatttgaagaaccttacaattgacagtgacgcggtaattgatcttgccctctttgtccgttgtcttgaccaccttcgcaggggatttgaagacgccggcggccatagaatcttgatccttgcttgcgtgaagtgctctaaagggaagctcgaagatttctgttttcgccgcttcttcttgagacgctttttccagaagagcaatggcttcttttaaggtcctacgtccgtatttcaaactatctaaactggatttttcgttatcggcaattctctgtacataggcgatgcgctcttgtaattgcagccagcttttaggcgtataatcgctttcttttagctcgcgcgccgctaagagctcttgctttaatgcttcgcgctcagcttcccgctctttcttgcccgtaatggagtgaagctttgccatggcttctcgtaattcctgtgccgcgccgttgacttcctcttgtgaggggaaggggcgatccataagctcttccgctgcttccactgccaattccaagcgacggaaggattccgacgtaaagtcgctcctattgtattgagcgtccttgtaagccttcaacgcttcttccagcacttttttatcgaccaaagcggcgccgtctttgcgcttcaatccgtccagggcatcgttaagatcgtaagtcgcattattgaccttatcctgattcttttccccgtcgggtttttgaaggatggctttcgctttctctaaagctttttgtactttttgccacgtcttatcggtgtagtcttcagcctttaaagcttccgcatgttcaatggcacgctttaatttcgattgatcgaagctagattcgccttttttgcgcagcttgctgaggccttcgtttaagttgttgtaaactttgtccacgtcgtcttggcttgcattgtcgttggctatggtttgttccgccatgggcaggtaaaggtcgatgtattgccagtgacgtagatcgtccttcgtttccatggcgtattccgacttatgagccagggcttcccgtgccttggcgactaatgcgcgaagtttattcttgtcgacgtagttgggatctttttcctcaaggggcttgagggtgacggtccaagcactggcactggtattggcagcccatgttttggaacgatcacttagtccgtaatagccgtcttccatatcttggagttctacattggagggaatgaagttaaggcgtactttcttttccttttgtcccggtgcaaattctatattttgctccgttcggtatacgtctttgccgattaactttaagcgaagagcgccgtcataaccttttcggtttaagcgaacgtttatttctttgctttcgactttgttaacgttgacgctcttcgtcaacagtttttgactgtccacggtgaaatcttcgccgccgtcgaccatggcgtaatagtctttctgaatgccgcttacatcgatggtgtaattgcctaagggcagcttaatggtttgaagaccggggttgacaatggtcggtacatattcttggccttccacgtctttattttttaccacgagggacacgttcaccttgtcgggattgttcaagctaatgtgaacatctgccgtagcgacggattcaaagtgcacttccagctctttcacaagctcgtcttctccgatttcaaattcctgggctttcttgccgattaatttgtagtttccgtctttcacgttaaccacgagtaaatgctttccgggagaaagattattcgggtcttcgatttttccgtcgggactttgtaccgtccaagtaaaggcttcgctgggtacggcttcgcttccggccaaagccttaatgcgcacgctccgttcgttgccggtgcgttcgccgcttgcaagaggatagtgtacatcgttgcgggcttggtcgttgatttccacttcgtaatcttcgatctttatattttttaagtcgaaaacatatttcccgttttccatcttgggctcgatggtgtctttgccttttttcaagcgcacagaaagaatgccggagccgttttcgtcgatggattcgacggtgtaggtgctcttgtcggcgttaaagtatgccttcgtcacgcgaggatacactctgtccatggtgatggggaattccatcacttggctgtccgcgccgatggattttccggcagcggcaacttttaccgtcatgtagtattttccatcgggaaggggcttacccgataaatcgttgccgttccattgccagtggggcttggtggtcatcatattattggcaaacatattgcccattctcggatccacgaagaagtttttcacgccgtgatcttccgggtttttgctgtaataaacttgcttgccttgatgatctctaatggcgatttcgacaccgccgaagtttctcaggaaggtcgccataaagatggccttgtccgctctgccgtcgccgttgggcgagaaggcgatcttttctttatcgaagacgggattggccttcgtcgagttggcttgcgcacctaatacgataaggtttttgtcgatttcgccgccgatattggtgccgtagtaatcgtcttctccgcctttgtcatagtagtaggagcgcttcttcgccttcactaaatcgtaaaggggtgtctccgctatttccagcttgtcgaaattgccgtggaatccgacgaaaggagccgacaaattcacgccgccttgctcttcgcagaagacaaaaccttccaggaagaagccgttgggcatggtttgctctagcttatccaaacccgttacgggaagttctaccgttaattccagggattgatggggttcgactgtgacggttttcctttcgctttcggaaatcttttgaggacgcaagacgatcttgccgccttcgaccttgtccgtatttaacacgccgtagtaggtgtaggtcttcggtttatctgacaaattgacgattttaaagggtacggtgaccttgtcgccgcttaaattcttgcctagattgatggaagttaagccgtgggatccttcgataaaggcggtggtcgtaatggctttatccacttgcatcaggcccgagccttgttgacgaggcgaggcataggctccggagtccttgtatttgtaaggttgcgccgtagacattaacagttttttaatgagatcgtacttcttatcaccgtgaatatcagagaaatctttctctacccgttgtttcacaagggccacgccgccggcgacgtggggtgccgccatggaagtaccgtccatgacgccgtattgattgtcgttcaatgaagaaagaatgccgccacccggcgccgcaatatccggcttcagattgccattaggcgttaaaccccaagaggaaaattccgagggttggccgccgtcttcacttatactgtaaacatactcgtcgttaaaacgaatttgtgcttggggatttctttcgatgatgctctttaaataaaggccgtctttcctgttaacaaaagcggcgggaatggtcgtccccggcgcttccacttggattagaggcatatccggctcattatcgtaaataataacgcctgcataccccttgtcccgggcattgttaatcttatctgtaaaagaaaggggatcgccggcaacagggcccggctcgccacgctcgattaaagcgtaggtgttcccgtctccgttttctttaaagtcctctggccgcccgtaaccgcaatcttttaaggaaacccattgatccgttaccttgccaatggccgtcggttggaaacttaacacgcgatcgtcgcccttaatttgaatgccctttttggccacctgcatattttgaatggaggccacggaaagagaattggggctgacggaggggtcggccaacataccgatgtccggattttccgctttcggcttagcatttgagccgggagagtagccgaagaagccgttgttccccgccgcaatagctacgagaatccccgcttgctttgctttttcaagggcgcgcacggtattcgggaagacataatcttccgtaccggcaggggagccgatgctgatgttcatggaatccacgcccaatttaatggcatcgtcaatggccttggtataaatttccgccgaagtgccgttgccgaacatgccgccgccgaaaacgcgcataaagacgatttgtgcttccggcgccaccccttgaattttattactgttccctgccacaatgcccgaaacgtgcatgccgtggctcatgggatcaaattctttaatggaagtggatttgttggcgtagttgtagccgaaggggatcttcgagctgaagtactcgccgcgggcgatgtccaagtcgctgatcaacttcttcacttcgccttgacttttgatgcgaccgctatttggatcgctgagcttcatggcttcgtggtaaggatccacgccggagtcgatgacggcgatgacgctgccttttccggcgtagctttttttccacgccttgtttgcttccaccatattattggacgaggtgtccgtctttccgaaggagcggggcatgatggattttttcggcgccttaaactgttgggaaatttccacagaggcgacgtccgccattttttcaatgacgggaatttctttccgctgtactttcaaggcgacgccggtgtaggccacgtcgtaggtttcaaccacttcgtaaggaatcttggccgcctttaagctattgtaaaaagtttcccgcgccgcacgagcataggccacttgggcgcgaatattttctcttgtgtttaaatcttcggcatccaccgacggtaatcccgttcttttttctcgcttgcgctcctttagcgccacgagcaaggtgattttttccgatggatctttatcgccaaaggaggcagctttggccgccccattgggggcggctgcaaagctgggacttatcattgctgtaaagagcattaagaaacttaataccacaggtatgacaaatcgtctgatagaaactccttgtttactcattggatgagcatcctctctttcttgcttttttcacatttagttggcggctttttgaatgtcttcgtaagcccagtggttttccggcaaatcgctgaacgccttgcgggattccttcttgggaatattgaatgcacggttaatcatggcgataatttccgcacgggtaatgacgcggtctccgccaaaggatccgtcttcgtagccgacgacgatgcccgcttctttaagggcaccggcatagcctgcataccatgcgtttgcgggaacatctttaaatccgccttgtttcggttgaaggccttttaatctggcgatcatggtaaccgcttgtgccctggtgacaccttcatcaggacggtaattgccgtcgccgtagccggtgattatacctgcattgattaaggttttaaagctgtcgaaataccaatccgtggggcgaatgtctgcgagggctttttgtaaatcgccgctgacatttacaaaacgtgccagcatggtggcgatttccgagcgaaccactttttgattcggtttaaagcttccgtcgggatagcctttgacgaaggcttctttcggcacattcagcgtaaagttcgccttggtttccgtcaccttcggtttttcaaccggtttactttcctgaggtttcgacggagcggattgagaatttccgccgggtctgtgcccgctccaaccggaagaggaaccgctcggcctgtttttcttatcttgtgaaggcttcggttgaggtttcggttgaggcgtcggctgcggtgtcggttgcggtgtcggcttttgtacttcttttaagcctgccaccgctttttctaaatcggcttttgccgtgttcatggcatcggcatcgttaccttttaatgcttttttggcagcggtcaattgttcgcttaccgctttcttcgttgcgtcggtgtaatctttgccgtctttcagcttcgcttctgccgcttcgatggctttggttaaagccgctttcgcttttttaagcttggcatcttctccgctaactgccggtttttcctccagggcttttacggcattttccaatgcagctttcgccgtgttcatggcatcggcatcgttaccttttaatgcttttttggcagcggtcaattgttcgcttaccgctttcttcgttgcgtcggtgtaatctttgccgtctttcagcttcgcttctgccgccgcgatggctttggttaaagcatctttcgcttctttaagcttggcgtcttctccactaactgccggtttttcctccagggcttttacggcattttccaatgcagctttcgccgtgttcatggcatcggcatcgttaccttttaatgcttttttggcagcggtcaattgttcgcttaccgctttcttcgttgcgtcggtgtaatctttgccgtctttcagcttcgcttctgccgcttcaatggctgcccttaacgcgtcctttgccttggcaaggtcctcatcaacagccgtttcaggggttttgaagtctacggagtagctaaattccgttacgaaagtactcttcgtaagcatcaggcgacgggttaatttataatttgcaccgggatccaatgcggcttcaatgacagggtttaagctgtctaccggatcgatttccgattccacatcgttgtggcccttgttctttacaaaaccgttatagacgacagtggccttgtcgccgtcgatcttttcaatgatattttgaatcttccagtcccagccggttttatccaagacttgtgcaatgcctaatcggtcgttgcccgtgacaatgccgtacttcttgtaaatggtgttttccacaaaggctttgtattcgtcggggctcttgaagaatttccaatcgttaatatctccaatattccagtagaacatttgaaggagatccaaatcttggcttacctttaccttgccatccgcatagttcacttgtgcgttgatggcgctgcgttggggttggtaaaagttgtcgtgggtgtctttaatggtaacgcccgcttttttaatggtagccaattcggcgtccgttaaggtggacttcaaatagttgcaggatacatcgaatttgttgaaccgtacccgttgaccgcttgccttttccgcaattttatcgaagggaatggcttttaagagattgcccttgacgactaaattcggatttttcgtggcgtattcattggcgttgtccgccatgcggagccacaagctctccggcaaggattcaatttcgttgttttccaaatcgagaatgaccagtcggcttaattgatccatggccttgggaagcgccttcagcttgttgttgttggctcgaagttcttccagagctttgtacttgccgaatgcttccggcaaggaccttagttcattgccgttgacattaatgattctcaaccgtttatacttgtctgccaaaacgccgtccaggctggttaacttgttttcggaagcatagaaggtttccaaacgacttgcacctttcaagaagccttcaggtaatttttcaatgccgttgttagacaagtcgatctctctgatttttgtatttttcgccagtaagtccttgtctaagtctgtcagcttattccctgacatccatagagtggagaggtcttcgtttttgtcgaaaatgcccttaggaagggtcttgatcttgttgccgtaaatattaatatgggtaaggcccgtcatcttgtcgaaaagcccttcggggatttcggtaatgtcgttgcttgaaagctcgatgcccgcaacgccggggccgagatccttcagcatggaaatatccggtgtcttggcaattttttctccggaaagatccaagcggccggtggccttatacaattcgtcaggggtaagcttgccgtcattgttcgagtcctttaccccggctgctaacaacttcaaggtaagattctcatcgtttctcttcttttgcgcttcgggatccgtgggatcgtcgtagcctttaaagccttttttaatgggggggttaaagtggaggtcggccttacgataattttcaaaatgaccgatttgatcggcgcttcctcccatgatttttacaagaacagcgagcttttgaatttgatgcaaatccttcacttcgcaagtatagatggcttgatcttgttttaaaccctcggtggttttttcgccggacttaaattgaccgtcgatcttcatacctaagtccagtatttgatccgccagtttacctgccctcaaggacaacatcattttgccgtccttcacgacaagcttggcacgattgccgataatgccgcttaccatgggaagctctttggttttcccttcttcagtaggcgtgaaatgaatggtgtattcgccgttgggaagcttgtccgttaaatcgaaattgtcggtcttggcaggtgtatcgccggcttttctgttttcccattcgcttccgtcggagaagaccactttaatgtgggggttttctcccgcagccacgactgcattcaagagtgcttctccgccgccttcataggtggcgacttcaaaattatccgttaccatcgtccaatatacagtgacattttcaatggcttcgccgccgttgacgaagaacttcgcttctttaattgcatctgcaaatgctttttgcccgtcacggtcgtcggatttcatattcttcagactgatctttagggcgtcggagcctgcataatttttttccgccttcacgtccttgatttggaagcgctcgttaagcttcctcgtatcccccggctcttcttttacgccggaggtgacaaagtagtagctgaatttttccgcttcaaagacgatcttatcgccttggatcttcacgtcttttacaagctcgggtgccgctgcgccctctttatcgaagtggtaaaccttcacgctgtctttatcgtgtttcccaaggggaaggcttactgccaccttgcgattcggttgttgtttcgcattgttaagcaggaagctgatgtcaaaggccgtgacagtcttggctttttcggcaacagcttttactgccacattgtcttttacaaattgatcgcctgcgacatccgtaaccttcagttcaacgccctctttaaaggcacccttggggtatacaacggataccttcgcagcgtcgtcggtttttttgatcatcttgtcgcttgtaatggcgtaagtggtaaaggtgttggtggagtaggtgataaagttgccttccactttgggctctactttgtaggttcccgtatacatttgttcgtcgtcttcgtcgtaattagcataggcttggtataaaccgacgcttgttttgttgtgttcgcccacggggaagaaaagcttcacattcttaatggtgccttgctttactccgttctttacgaaggacacgtcgtaggcggtaaagttccctgctttgtcgatttccttgtccgcgtttttataggtttcaaagaatttcgctttttcgactttttctactttaagttccgttccctcttcaaagacatcggacatgtattccgctttcacacctgtggcagcgtccattttggtgacgagcttgggcgtttccggttgcggtttcggtgcattgggatcttccaccggcgtaatggtcacggtcttggtcgccgtggtgttgtcgttgtaggtaatttccactttgatttcgctcttgccgtaaagggctttggcgatttcttcgtcgttggaaatgtagtgatcggtaaccatactaaaaccaaaggtcgatttgtcgtatgcttttccgttgatcttaatggtcttaatttcgttacctacttctttcgccttttgagccgaaccgaaatccaattctaattgaggcgaggatccattgattttaaagataatgttttgaatggggtattcgtctttctttccggtttcaggggccggcgtttcgtgtccgctttcgttgggcttgttgtcccatacggagccgtcggagaaggtaaccacaatatggggatcattgcccgcttcttttattgccttaccaagtgccggtcctccgtagggcgagaagctaaatgcttcaaaacattcctccaagccgcgagaaatactaccttggacattggtgattttttcgccgccattgacttggaaactggcgtccttcatggcattttccaatgccgtactttccgccatatctgatttaggcggaaggtttttaaagaaaattttcggctgactgtagtcgtaattaccggtatagtttttagtgaagccgatgcgttcgatttggaagcgcttagccaatgtgttttcattgcccggttccggtttttgatttttgtcttgctcggcgatgtatttctttacatcgaatttaatttctttcggcgctacatagcccgcttgggtgtaggtaatggtgttgccgtctttaaagccgatgacgattttgtgggccttgttgtctaaaagctttaagcccgtcatggcaaattcaagcttcccgttaaacagcgtaagatctctcgtgtctttctttgcatcgatgaaaaagttggtccactccggtcttaaatcattgcctccgttatcgtcgacgagaatgtagcgaatgttttggaagtatttttcgtgccatttttccctcgggatatcgctggaaagggttagggcattgcctaatttttcgggcgtgcccacgccgtcgatctctaaaccttctgccatgcccccggtgttcacttggctgagtttttcattgggggtaggttcattgttcttatcgacataaccttcttccctcatcacgacttccgagctgtccttcatgatgattttaaattcatgggcggtgttcgcggcgaagttctctacaatggccttcccgtctttcatcttatcccatgtgcagaaaattccgttataccacaggagattggggaaattgtcgcttcctatgcggttcagcgtctttccgtcgatgacgaccttctccacattgttttttaataagtaatttaacgcgccgccgttgtcggaatcatatttgtatgacaatcgaacgccgacataggttcctttagggtctgtgctggattgtcctgtttcgatcgatgtgatcgtcaggccatctgccattttctttatcttttcgtttttgatcacgcctttataaaaggtataaccttgcgccgtgatctcaatgggattttccggcagaacgaggacatgattgtcgatgataatcttttcttcgtcttcatcgaaaacaaatctataattcttttccccggttgtgcttccctctttgtaataatactgcccatttaacttaatggattcaatgctttgcatccaatcacgctgcgcttggctgggctcggcgccggcaaatcctatttttaaagcacctgccgatgtatcgaagacgatgccctgaggcacttccttcgccccattggcgtggacactccttacaggaaaacttgtcagcaacatacaaaaagccaacaagagtgcgatatgtcgtttcatttatattcctccttctgtctatggttaaataagagccaactgatcgttactatcattatgttaattaagccggtagactttttcaatggattcggtataattttttgcgttacccttggttaacggagagggagtgatatctcctctcatcatccttttattcccatgatttcaaggttttgcccaccgtaaacagggggttattttaatttcaatttttacttttcagcggcacaaaaaaaaagcacctccgtagagatgctttcgctctttgtcataaatttttttacattttcaccgaggtcaagacggacatgatgccgtcgatggcgtaggagcggcggctcggcacctcgccttgttttcgcggttctttttccttcaccgtggccaccaaataatttccgtctttcgcgcccaagaggagctggtctttttgcggaaagtctttggggttttcttcgatggtgcctaagatttcgccggttgctttaaacttaaaggcgatgctgccctttcccttcaccacttccaccccttcgatgccgtcttctggccaatcccaggtgatggcgggaccagtgagggtttctttttgcgtgatgtcactgtaggccaggtcctttctgtcgaaggtgcccaggacgagaaggtgcttctcttcgtcatagtagacgatttttttctgcgattcgaagaccgtttccatgttcacgtagcgcttatcgccttggcggatgacggtgtctttttgaatgggaatttgaatgatcttctcctgcgtcgttttaaaagacacattgtcctcgtctttcacgggcaggtagcatgccttttccatgaccacgtcttcgtcgatgaatgccttgccgtcttttacgatgtagtccgacgggtccagtagctgtccgcaaaaaatcacctgatccaccgttcgcgacgccggcgccgtacagcctaccaaaaaaagcaagaacagcgcggcgaataatccttttttcatttcatctcccccttttttctcattatagcaaagggtgccgaagaaaaagagtcggcaaatcgaagcttttcctaagattccatgctttgtttgcaaaagaaaaacgcccgccgaagcgagcgccatcttttattttgttaatccattaatttagagccgtttacgcggatcccggggcccatagtggaagccacggtgacggagcgcaagtagcgacctttcgctgctgccggtttcgaacgaataatggcagacattaaggttttgaagttttcggtcaacttttcggtgccgaaggatttcttgccgatgggtacgttgatgatggccgctttgtcgacgcggtattcaactttacctgctttgatttcttgcacagcttgcgctacttcaaaggtaacggtgccggctttcgggttcggcatgaggcccttgggacctaaaacacggccgatacgaccgacgacgcccatcatgtcgggtgttgccacgacgacatcgaattcgaaccagttttcgtcttggatcttcttcatgagctcttcgccaccgacgtaatctgcgccggcttcttcggcttcttttgccttgtcgcccttagcgaagaccaagatgcgttccgtacgaccggtgccgtggggcaggacgacggtgccgcgaacttgttggtcggcgtgacgggggtcgacgccgaggcgaacggcgagctcgatggtttcatcgaaattagcgacggcggtcttttgtaccaattcaatggcttcgttcacatcgtaaagattggaacgatcgacgagtttaagactgtcttgatattttttacctctcttaggcatgtttaacctccttgtggttcaaacgaaatggaatttctcccactaaccttctacttcgacgcccatgctgcgtgccgtaccggcgatcatgcgcatggccgcttcgacatcggctgcgtttaagtcgggcattttcgtttcggcgatttggcggcattgatctttggtgatcttggccactttggtcttgttgggctcgccgcttgctttgtcgatgcctgccgcttttttaattaagacggctgccggcggggtcttggtaataaaggtaaaggaacgatcttggtagacggtcatgacaaccggaatgatcataccggcttggtcttgcgtcttggcgttaaatgctttggtaaattccataatgttaacgccgtggggcccgagggcggtaccgaccggcggtgccggcgttgccttgcctgcggggatttgtaatttaacgattgctatgactttctttgccatagtacacctcctaatgtggttttgcggggtttccctcccactcttaatgtgcttacgtttatgcctcggttaattggttgacgtccaattccaccaaggtgtcgcggccgaacatggaaatggtgactttcacctttcgattttcctcgtccagctctttgacaatgccgacgaaatcttcgaagggtcccgtcaggactttgacgcgatcgcccacgacataagtatccgacagggcttcttttttcgtcacgcctaagtgcttgacctcttcatcggaaagaggaatgggtttactccccgggccgacgaagccggtgacgcctctggtatttctgacgacgtaccaggatttatcgttcataatcatctttaccaggacgtaggaagggaacattttgcgttcctttaatttctttacgccgtctttttcttcgacgtaatcttccatgggaacctggacatcaaagatcatatcgccgagatcctgatttttcaccatggattccatattgtctttgactttgttttcgtggccggaataggtatggatcacataccaatgggcttcttcctgaccggcttcgccccggttgcgatttaaatcatctgtcaattgaaatcctccataccgcttatacgccgaaaatcaggcccataatatggctaaagacaaagtctacggcataaataaacagggcggttacgatgctgacgaagataacgattaagctatattggaataattgttttttcgtcggccatacgacccgcttaaattcccttctgacaccgcgaaaatatctcgttaaggattgtttttcctcaactttcggggtagtggttttttgcgccatcgtatctctccttacttcgtctccttatgaaccgtatgggtcttgcagaatttgcaatatttcttcatttccatacgttcaggcgtatttttcttgttcttgtacgtgacatagtttctttgcttgcactctgtgcattctaatgtgacgcgatctgccatcacacacctcctctggctaaattaatggaaataaactcaataaaaaagggcttgtatcaagccgctttttccagttttccggatttggtttacggagtaatcctatcaaatatccggcttcctgtcaattgtttaggcgtttttattttctaaaagcccttcccaacggtccaattccttcaggtatttttccctgcgatgggcatgttccgtttcgaatgctttcgtctcccggtccacggcttccaatcgctcggcgcttaaatttctctcggcgaagggatagaccacggcgttttcccgctcggcgtgggcctcgagcaaaaaggcgtagttgtacataaggccgaagacatcgaggagatgctcatccgtcggttctttttcccacacttggcgcgcttcgtctaaatttctgacgatgtttcgcgcctgatcgtgttcggcaaacatgccttggcgcacgattttttccgccacgtcacctaaatccgacagcatgtagcgaaagagaatgtcttcttccttgccgtggtgatgggcgtcggagtagtttcgaataaattcgatcatgggaagcacttcgtcttgaaataatacttccccttccaatgccttgattaaatagcggcgaatgatcccggtaaagcgcaggatctgttcgtgttcgttcatgagtacatcaattccgtacatggtctttctccttttcgatgattttttccgccacccgcatgccgtccatggcggaggatacgatgccgccggcgtagcccgccccttccccggcggggtaaagattttcgtggcttatggactccagtgtacttaaatccctcgtgattcgcaccggcgaggaggagcgggtctccggagccgtgagcattgccttgtcgagaagggccgggaagcggcgacccatgtccttaagcccctcggtcaaggcccggtccagcgcttcgggataaatggtgtgcagatccgcctcgaaggtgccgggcttgtaggtgggctctacaccgcctgtttcttcgccgtaaaggtagctgctcacgctttcaacgggcgccttgtagctgtttgtcatagcgaagaccttctgctcgatctcccgttgaaatgccacgccggcgagaacgccttcgccgtaggtggtgtgatcgatggtgacgagaacggcggcgttggcatttttcccgtcgcgggccttgtagctcatgccgttggttacgacgccgcctgcctccgatgcggcggccaccaccttgcccccggggcacatgcagaaggtgtagacgcccttctcttccaccttggcggtgaggctgtaatcggcggcggggaggaagcggtgattgtccccgtactggctcttgtcgatggcggcctgtggctcttcgatgcgaaagcccacggcaaagggcttctgctccatggccacacctttttcgtgaagcatgtaaaagctgtcccgcgccgagtggcccaaggccagcaccacgtacttggagcgaaaatcccctttgtttgtactcaggctgtagccgtcattttccttgaccagagatgttagcctcgtgcggaaatggatctccgcccccatggcctcgagttcgcctcttaagagaaccaaaacttttcgcagggcatcggtgcccacgtggggctttttcttgtagagaatgctttcatcttccgccaggcgactgaacaacgcgagcactgtgcggccacggggatctttggagcggctggtaagtttgccgtcggagaaggtgcctgcgccgccttcgccgaactgcacattgctctcgggatccagcttccccgtctcccaaaaagcttccactttttttacgcggtcttccacgccgtcgccacgctccagaaggatcggcgccatgccccgcttggcgagaacccaggcgcagaaaagccccgccggtcccgcgccgacgacgacgggcttctccgtggattgaatgggcgacaaatcgtagggcatctccttcacgggaaggatttgtttgtttttacgcacctttttatccgtcgtaacgtccacggcggcgatgaagcgcatggtgcgcccctttctggcgtcgatggattcccggtggcggctccatgtgtagtcccccggctttaatccggtgattttttcgatttcggcctcgtaggcctcgggtttcgagtcgatgggccgatgtaaattgttgattcgatagttcatgggctcaattatcctttgtctttttcaaaaggtcaagttcagtgtagggtattttccgaaaaaaatccgtaacctatgtaacgaaaaagccttcccgcaggaaggcctttcccattatttatttttctttcccagaatatagtccacgcctgcttgaatcaccggcatgatcgtcacattcggaatgtttttatagagattgtcttccacccgttcgatgtggcccatctttcctaagatgtggccgtcgggactgatgagcccttccatattgaactcactgccgttgggattgtccacataggtgaaggccacttgattgttttcaaccaatgccttggcctgttcctcggaaagaacgaggcggccttccccgtgactaatgggcacttcgtattcgtcgccgggattcaagtacatgagccagggcgaatcgttggtcatgacttgggtggtgaccatgcgggccacgtggcgggaattgtcgttgaaggtgagggtgggcgatgtagcttcttgcacccgggcttcgccgtagggcaggtagccggatttaatcaaggcttggaagccgttgcagatgccgagcacaaggcctttcttttccttcaccaagtgatccacagcggatttcacgacctcggtgcgaagaatgttggcgatgaatttcgccgagccgtccggttcgtcgctaaagctgaagccgccgggaatggcgaagatgtccgcttctttaatctttgcggccagttccgagatgctcttcaccgtttcttccgccgtttgattcttgaagataaagacttccgcatcggcgccggccttggtaaatacatcttttgtgtcgtattcactgttggtccccgggaagcaggcgatgagcacgcggcagctgtcttttgtagaagcatttcccgtgcgggtacttgcgatttgtaccgtggccagggctttcttttgatcgtggacttccggcgggaagactttgtcgagccccgtggtgtaagctttcttaatggcttcttcgtcgagtgtttcgccgtttaccacatagccggattctgtgaggctgcccacggctctcacgccgtcgaaggcttctttgtattccacgataatgtcgccgtagcgagcgttgtaaaggtcgtctaattggacgtcgaagccgagatcgttgcctagggcggagataatcatccccggcaaggtgcccttgtgggtaatggcggcggcggaaagaatattgccggaggccatttcttttttcagcaccttcgccgatgctttgaaggcctcgatgtcgattctgccgtctttcgtgcgcacagcttctacgatgcccagcttgtttcctgccgccgtaaaggcattgccgatgacatctttcgccgccatgggggcaatggcgaaggagatcaaggtcggcggtacgtctttgtcgcggaaggtgccgctcatggagtcttttccgccgatgggaggaattttaaaatccatgcaggcgtcgaaggcgcctaaaagggcctttaagggcttttgccaacgggtttcgtcttcggcgagtttttcgaaatactcttggaaggtgaagtacatgtcgcagatttcagcgccggtggccacgagttttgccacggattcaacgacggcatagtaggcgccaaggtattgattttccgaaaggaactcgggattggcgccgtagctcatgacgctggccgtttggctcttcttgccttctacgggaatgaggcccgccatggcttgggtgggggtgagctgcagcttgccgcctaagggcatgagcaccgtgccgcggcccacgctgttgtcaaatttttcgattaaattcttttggcttaccacatttaaatccgccatgggttttaaaatgtctttcgccgtgagggaatcgtagcgattcaaatagccgcaggcgggatctttttccaccttcaccttttggctgcggtctacaccggcggtgtcgataaaggcgcggtccaagtccacgatgcacttgtcttcgtagtagaggcgcatggcggcttcttcagtaacttccgctaccacggtcatttcaagattttcttcccggctcatcgcttcaaagaggggcaggtcttctttttcgatgaccacggccatacgctcttgggattcggaaatggcgatttctttcggcttgaggcccgcgtatttcaagggcactttgtccaattgcacccggatccccggtgccaattcgccgatggcaacggagacgccgccggcaccgaagtcgttgcaacgcttaatgcgggaggcgatttccgggcggcggaacaggcgcaggagcttccgctcttggggggcgttgcccttttgcacttccgcaccggccgtagccaaggaggccgccgtgtgttttttactgcttcccgtggcgccgccgatgccgtcgcggcccgttctgccgcccattaagaggatcaaatccccgggcttcggttcgccgcgccatacatggctttcaggtgcggcaccgaccacggcgcccacttccatgcgcttggccatgtagccgtcgtggtaaagctcttctacgaggccggcgggaatgccgatttgattgccgtaggaagcgtagccgttggcggcttccgtggtgattttcttttggggcagcttgctttcccaggtgtcttcaatgggcatggtgggatcgccgcttcccgtaaggcgcatggcctgataaacataggctctgccggagagggggtcgcgaatgcagccgcccaagcaggtggaggcgccaccgtagggttcgatttccgtcgggtggttgtgggtttcgtttttgaacatgagaaggtagggaatggtctcttcctttcctgtgcggaggtcttccgccaccacgtcctcgcgaatggagcaggcgttgatttcttccgactcttccatgttggtcttcacgccttcggcctttaagtgtttcgccaccaacgtgccgagatccatgaggcttacgggcttcttgcggtttaatgcttcccgcgttttcatgtagcgatcgtaggcggcggtgattttttcatctacgccttcgtcgaattcaatttcaagggccgtgttaaaggtggtgtggcggcagtggtcggaccaataggtgtccaaaatcgccagttccgtttcgttaatgtcccggcccacgtctttaaagtggtcttgaataaaggcgaagtcttcgaagctcatggccagatccatggattcgaagcggcgtttcaattccccttcgtcccaggaaataaagccttcgatgacggcgttgtccgtatttttttccgattcttttttaatggtggtgggtacgccgaagaggtttccgattttttgatccacagggttcaccaagtgtttcacgatggcggcgtagtcgtccgcgtcgatgtcaccgataaaatcgtagaccgtggcgcaggaagcttccaggtgggtgtggccgaaaatggccgtggccgtatccaagacgccggcttgacgctgatcgtattgacccggttggtattccaccacgaggccgtgatccatgtccgcttgcaacttgaaggcgtcggcgtcggcgaaaaccacatcgcttggcgcttcggaaagcacttcttttgtcaggcgacggacttcttcttcagtcaacccttccaaatcgtagcgggcgtagatcttcacgtcatccaggtgaatgcccagctcttcgtttaattgggcggcgagacccttggccgcgttgtcgaagcccggttttctgcccacgtaaacgcggctgatcatggggccgatgtctcggcgaatttgtttatgttcgaattgaatggcatccgcgccggcataagctttggcaatggcttcttcgaaggtatccgccgtggcggtgacggtgagcacgcgaccgccgttggtgacgagcttgccgtctttaattttcgtgccggcgtggaagacggtaacgtcgtttaaatcttcgggaatggtaatttccacgcccttttctgacgactcgggatagccgccgctggcgagagtcaaggacacgactttcttgtcgttttctttcacggacactttgtccagctcgcctttagccgtggccatcataatgtccaaaagatcgccgtcgaggcgttctaaaaccgattgagtttcagggtcgccgaagcggcaattgtattcgagaatttccgggccggcatcggtgatcataatgcccatgaaaatcaggccacggaaatccatgccgtcttttttcaggcccgccataaaggggcgcaccaatttttcgtcgatggcatccaagaggggcaaggcttccacattgggggcgtagctgcccatgccaccggtgttcggtccccggcccccttcgtaaatggatttgtggtccttggctgtggagaggggcacgatggttttgccgtcgcagaaagccagaaggctcatttcaaagccctcaaggaattcttccacgacgacgcggtcggtgtggaagcggtctttgtcatagacgtcgattaaaaatgcctcgatctccccttccgaataggcgatgaccacgcctttgcccgcggccaggccgtcggcttttaagacgcagacgcctttttcagcgagaagtttcatggcgccttggcgcaccgcatcccgattcgtggattcgaaataggccgccgtgggaatgtggtggcgaacgcaaaattccttcgtaaagagcttggagccttccagctgcgccgcttcttttctcgggccgaaaatcacaaggcccgcctcttcgaagacatcggcgatgccttcaaccaagggcgcttcagggccgacgacggttaaatccacggcctcatctttggcaaatttcaacaggccttgaatatcatcggcggaaatggcgatattttcgcccacatcttccgtgccgccgttgcccggtgcaaagtaaattttttctaccgctttgtttttggcgatggcatggccgattgcgtgttcgcgaccgccgccgccgacaattagtaccttcacaatgcctccttaatgtttaaagtgacggacgccggtaaataccatggacagtcctttttcgttacaagctttgacggaatcctcgtcgcgaatggagccgcccggttgaataatggcgctgacgcccttttctgccgccgccttgacgcagtcgtcgaaggggaagaaagcgtcgctggccaagacggagcctgtgaagtcgcgatcgggattgtggttaaagatattttcaagggcccagatgcggctggtttcgccgccgcccacgccaagggtcatgccgtctttaatgaggaccacggcgttggagcgcacgtattttaccaccttcatgccgaagaggaggtcccgcttttcagcttccgtcggcgccttgtccgtgaccactttgtagtcttccgccgcgtcgagatccgtgtcttgtaccaagaccttgccgcttgcgaagcgcatttcttttttcatggcacctgccgcgtaatccacttgaatcacccgcagattcttcttttgcttaaagacttccagggcctcctcggtaaaatcttttgccgcaaccacttccaggaagatcttcaccatttcttcggcacaggccttgtctaccgtggtatttaaagccacgatgccgccgaaaatggagaggctgtccgcttcaaacattttcttgtaggcatccacagccgattcgcctaaggccacgccgcagggggtggcgtgttttaagccgacacagataatgccgtctttttcttcgtcgaattccccggccaaattcaccgccgtgttaaagtcgttgagattattgtaggaaagctccttgccttggaactgtttcatgtggctgaaatagctgttgaccatgggatcggaatagacggcggccttttgatgggggttttccccgtagcgcagatccccgtcttttttcaggccgatggtcaagagatcgtcatcttcacccgtcacttccttgaagtagcgggcgatcatggaatcgtagtaagcggttttgctgaaggccttcatggccagcttccggcggaaggcgaggtcgtcttttccttcttttaatacggcgagcacatcatcgtagtcggcgggatccgtgacgatgagcacgtctttgtggtttttcgccgcagagcgcaccatggaggggccgccgatgtcgatgttttcgatcatgtcggcttccgatttcttttgtttgtagctttcttcgaaggcgtaaagattgacgcagaccaagtcgatgttgccgatgccgtgttccttcaccgtatccacgtggctcttttcgtcccgtttatagagaatgccgccgtgtaccttcggatgcagggtctttacccgaccgtccagcatttcgggaaagcctgtgtaggcgtcaatgggcgtgacgtcgacgccgccttcggcgatggttttcaaggtgccgccggtggacaacagggtgaagcccaaatccaccaggcccttggcgaagcttacaatatttgtcttatccgtgacggacaacagtgcgtatttcataggatgccctcctcgcataatcgaatggctgttttaagtaattgatgctccaaaacgagcaccgtttgttgaatggcttccggcgacgataatttttcgatgtctacggaagattgaagcaagatggcgccgccgtcgacggtttcggtgacgtagtgcaccgtagcaccgcttcgtttttccccgtgggcgaacacggcttcgtggacgtgcatgccatacatgcccttgccgccgtatttcggcagaagggccggatggatgttaatgatgcgcccggcgtagcgcgtcaatagctccttgccgaggatttttaaatagccggcgaggacgataaagtcgatctgattctcttccaagacggccatgaggtccccgtcttcttcaacgaaagtggcctttcccgcctccttcgcccgcacgaggccataggcgtcgcggcgattggagacgaccagggcgatgtgtgatttgaaaaatccttcggcttccgcatctaagagggactgtaaattggtcccggagccggagatcatgacggcgattttcatttcagcacggtcttgccttcgcccttggtgatttcgccgatcaccgtggctttttcgtcggtcttttcatttaaataggccagggctttttccgcgtcgtctttggacacgataaggaccatgccgatgcccatattaaaggagcgatagagctcttcttcggcgatggcgccggtgttttcgatgaaggtaaagagatcgcccttgtcccagctgcccttttcgatggtgcagtttaagtcgtcggacaagatgcggggaatgttttcgataaatccgccgccggtaatatttgagacgcccttcacttccacttcctccatcaggcccaaaacgggtttcacatagaggcgggtggggcgaagaagcacttcgccgacggtgccttcaaggccttccaccgtactgttaatgtccagctttaagtgatcgaagaagagcttccgcgccaggctgtagccgttggaatggaggccgctggatgcgaggccgatgaccacatccccctccttcactttgcttccgtcgatgattttatttttatcgcaaagacccacggcaaagccggccaggtcgtattcgtcttccgaatacatccccggcatttccgccgtttcgccgccgattaaagcgcagcccgattggcgacatccttcggccacaccttccacgatcttttgcattttttcagcggagacgcggcccgtggccacgtaatccaaaaagaacaggggcttcgcgccttggcagatcaagtcgttcacgctcatggccacgagatcgatgcccacggtgtcgtgaatgtccatcatttgtgccaccataagctttgtgcctacgccgtcggtggcgcctaaaagcaccgggtgttccatgtccttggcggcggaaagatcatagccgccactgaacaaaccgatgtcgcctaatacattcttgtcgtaagtggatgcgacggcttttttcatgagttcgacggcacgattgccttcggtaatgtcgacgccggcgtctttgtacgataaagtcataatgcctcctaaataaccgtagggtctaccgggtagtccccgttaaaacaagcgatgcagtaattgtctacgctcttctttcctgcgcgggccaggccgtccatggagataaaggccagggagtcggcgccgatgttttcttcgatttccttaatgctttggttggcggcgattaaatgcttcctgttcggcgtgtcgatgccgtagtagcaggaatattttaccggcggcgaggtgatgcgcatatgcacttccttggcaccggcctcccgcaagcggtgaattaaattgcggctcgtggtgccgcgcacaatggagtcgtccaacaagacgatggatttgccctttaccacgtcgcctaagggattgagcttaagttttaccgccatgtcccgttctttttgggtgggcttaataaaggtgcggcccatgtagcggttctttaccaggccttcgccgtagggaatctttgccgcttgggcatagccaatggcggaaggaatgccgctgtccggcacgggcacgacgagatccacatcacagggcgcttcttcccacaaaatttcgccgcagcgtcttctgaaggtgtaggcgttaatgtcgtccagagtggcgtcgtttctcgcgaagtagacgtattcgaaaatgcagtttttcggcgtatcttccgattcgtaatgatcggaatggatgcccgtttcgtcgatgacgagaatttccccggcggcgatgtctctggtcatttggccgccgataatttcaatggcggcattttcgctggccacgatgacatcgtctttgtctcggcctaaaaccaaggggcggaagccattgggatccctaaaggccacgaccttgcccttgagcagcgccgttaccgaataagcgcccttaatgacgcccatggtctttttaatggcggccacaatgtcgccgtcgtagtagcgggtaattaagtacaaaattacttccgtgtcgttggtggtttgaaacatcatcccttcttcttccagccgttcacgaagcacttggtagttcaccaaattgccgtcgttggcgatggcgatggtttccccgccgataaaacccataatgggttgaatattgtaatcgtgggaaccttccgccgtggaatagcgcacatggccgatgccgatgtgtcccgccagatcccgtaagctttcttccgtgtaggcgtcgatgaccaaacccatggcccgctttctcaaaatctcttccccattgtcgatggccatacccgtagcttcttgtccccggtgttgcagcgaattcattccgtaaaaaagactggttgctacattcgatttgctataaattccaattactccacacatagtttgtgtttgatcctttctatctaacgataccttcttcgttcgtgcaactttgtttttctaaaaggatactttttcatcggcttccctaatgaagccacgcacaaaacctcccataaaatgaaaaaaagagatacgggtgccgtacctctttacatgcctacactgagggcgtagcttggccattttttaacgcaagaaaaaataagctcgcgaaaagccaagtgctttaaatgcaattgaatgaattcaaaacggatcaaccccacgcccccctttgtcgaaattattgtaccatatttttttaggcggaacaatcggccgggaaaaaatacgggacgtgtcgggaaaatccatcttgtcagtttcgatcaatcgtgaaataatgaaaacaaaacaagatttcgtcaacgaaaagagggatacatgcttggaataattgatgtaggcggcggcatgcgcgacgtgttcggcgccggcgtattggactattgtttggatcattgcattcaattcgactactgcctcggcgtctcagccggtgccagcaatttaatcggctacttggcacagcagccgggccgctccaaaaccttttacacggactacgcctttcgcgacgactacatgggcgtgaagcactacaaggaaaccggggatttcattaatctggattacatctacggcaccctttccaatcacgacggggaataccccctggatctggatcaggtaaaggcctcttccgcgcaatttgtcatcgtggccaccgatgccttcacaggcgaggccacctattttacaaaagacgatttggcccaagaccgctacggcgccatcgccgcctcggcctgcgtgccggtggtcaatcgccccttggcgtttcagggcggccactacgtcgacggcggcgtctccgatcccattcccatcgagaaggcgcaagccgacggcgtgacaaagacggtggtcattttgacgcggccaaaggattacttcaggcgcccgcggcgggatctctacttcgtcctgcgcctccgaagaaaatatcccgccctggcccgggccctttccaagcgggccgaaacctacaaccgtcagctgcgccgcattttagccgacgacaacaccctcgtcatcgccccccaatccacccttcacatgaagaccttgaaattggatctgaagaaaatgaacatcctctacgacgagggctataaaaaaggcgcacaaatcgaaaaatggcttgcccgctgatccggcaccgataaacaattccatttccgacaaaaaaagacccgcgatagagtgaccccataaagttggacttaatcgagcaagcgaaatgcttgctcgattttgttttacataatattcgttatatgcagattgcatccgttcacggtattgctttggactcaagcctcctaacttttatttgattcgatcgttgttgtaatagtggataaagtttttaatagcccggacgagttctctccggctctggtagatgtgaccgtcgtagatttctcttttcagtacactgaagaagttctccatgggtgcgttgtcgtagcagttgccttttctcgacatggcttgagtggtcagtatggaaaaatttaaatttttaggaagcctcgtatgtgagaatatgttaatcaataagcatcttattatttaatatatcattctggagcaaagaaaaaacagccctcaaaagagctgtttagattgttattttcttgttttagtcgcattacttatattagatgacctacaaacattgctataggcagtaataagattaacataatattcaatactataaataatccgtccttttcccttaccccaaatattaaacctattagtccaataattgggcagataaacatggatgtgagtccagttggtcttagacttgtatagctttcaaagatgtctattggcagtaggtaggaaatcgcaaaaatcgtgagtccaagtagaaataattttttactgatatttttcttcatactattctctttctttgaaattatattgttcgaattaaatctgtagtcggtctgtttaaaattctctttaaagaaaaatgatagatgattagattaataccatagacgactaatgaaaatcctaagaaacttttatagtcataatattttattaaagtactcattcttaaattagaagcgattatcgacattataaacataactcctaaacttgttataatagaaattgtaaccgacttttcaaagtaaaatttaattttaaaaatcgcaccatcttttccattttttacagatatatctccattgtctgcctcaacaattgattttgccatgacaagtcctatgccaaagcccttagagtcaggacttttgtaaaatcttactaatattcttactcataagtccctcctagtcaaatcctcttatcaaatcaatgggatcgatctttaaaatattttgtaaagttgtcttgtaaattaaaatatttataccataaatcaaaatcccaaaagcaaagaaatatttatattcaaaataagacaacaaaattttcatatccaatgttggagatatttttgcaattacaaataaagcagcaaaacttactattaaaactattgccagtgatttaatttcttctaatataaaatctcttgtatatttgtttttcagttcttcctcatctattccacaagacactaaagatccaatttcttttttccttgccattaaacttaaattaatagaagaatatccattagttatatttaaaataaaaattatgcttgcaataaaaattatcataagtccaaaagtttttacgtctttcatgcgatttgcttctacatctttgcttgtagttaaattataagtttcattgtaggcaatggaagaatctaatctctctttaacttcattctttatatcgtctaacttattttcatcaactttcattgagagttcgtaggtgtttcttctcaagtcattgttgttttttaaataaaatttattccattcttctaaaagtttaaagtatgtgtcaaagtcaacatataaattcacataaaaaggtagtcttctttgcctaaagtcctttgtgttatcaattaacctatctactttgattgaataattgtaatttttctcttctgttatagagtaatttaaaatacccatatttttaaaatattttgttgtttctgatccatcaattggtgcatttggatttacttggaccttatttaatagcaaaacttctccctttttacctcctattttttcaaaagtttgatcatctaaagcagttataaatccatcgagataaaaatcttcgccattatcataatatttacgcatttttccatctaaatcaagagacctaaactcatctgaataattttgctccttactaagagaaatatatttttcagttgaaagaaaggctctgtcattttctgtagtcttcattatatcctttaagacatttggaacttcagcttcatttgaatgaattgatatattaatattcgtattgtaagtgtaagtatttttcaccctattgtactttgccatagagaaaactatcaaaaaaattgatacaattatcattccaattgcagaaatatatctctgagaggaaatagtttttaaattatttatctttaattccttccaaatatttttattcttctttagttttatatttttgtcattaaaattgccctttataccatcaattatatttacctttgcgatttttttagctggagcaagtattgctattaaaattataaaaaagcaaattaacaaaactacaagtgaaagccttggcgaaaattctatatacttgtacttttcctcttcctctacaatcctttgaataccaagattgaggaggttgattcctccatatccgaaaacatgtcccataactattggtagaagcgaaatttttaatccatcttttaaaagcaatttataaatttggtaatctgttgaaccaatggacttgtacattgaaatttctcttatctttcttagaccccaaactgtaaaaatattttttacaaaaaatataaaaataagtattgtagcaaatattaaaatagagtctacaatcacctgcctattttgttgtaaaagacttccatcaacattatagtaatctttcattatttcgctaaattctagttctactttatctttattcaaggcagatgcaatttctttttctaaattatctttattactataggcttttctaaaattatcaaatcttacaaagctattagtctttgcatcctttccaatgacagtagaagcataaaaaatcttcatattctcattgtaaagatttcttgtgataccacttattacatattctttgctattttttcttgcaaattcttcatccttagtaacacttgaaactggctttataatttttccatcaactaatctattcccaaattctacttttaccttatcgccaatttttaaattttctttttctgcaagacttttaggtatggtaatttcgttatcttttgtagcaaaacttccctcttttaacatattatcttctaacatcttggtaaaagcttggtctgtataatttatcactaagacattttgagatagcttggcagaatcattttctactgcaacttctcccacttctttaatgttttttatttcttttaatttacttgagtcaccagaaactgtatcaggcataattttagcatcataaattgatctgttcctaaaatattcataatcaaacttattatttacatatccaaagtaaacactaaatgtaaagaaaattgcagttataaaaagtgaaagtgagattgagagattcttcttattcattatcctcatctcccactattttcccatcgacaattgttattaccctttctgcctctagggctatagactcatcatgggtgattactataattgtctgttttaaagtcctgttaaaatattttaaaatttcaattatttctctcgaattttctctgtctaggtttcccgttggttcatcggcgagtacaagagacggagaatagataagactccttgctatggcaaccctttgttgctggcctcctgatagttcacttggaaaagagttaagtttactttctatacccaattttttaactatatctgaaaattcatcttgatttgtttttcttttatctagttttagtggaagttctatattatgacgaactgttaaatttggaatcaaattataaaactggtaaattagtccaacttttcttcttctaaagtaggctaattccttggaagaatactttgatatgtcgttaccatctatataaatcttgccatcatctggactatccactcctcctatgatatgtaaaagtgttgatttgccagacccacttggtccaacaatggccacaaattcgcctcttccaatttcaaggttgacaccatctaaagcaataactttggagtttcctactccatattcttttcttaaattttctacttttaatatttccatacttgcctcctttttatcaaagaaagcttattaaagtaaagtgatttttaggtgacattgtaaaattttatttcaaatcttgctccacttccagtatttgaaacagaaatttccccgttgtttttttcgacaattgtctttgccatggcaaggcctattccaaagccatttgagtcgggagttttataaaagcgtttaaagatttttttcatattctctttttctacccctccgccattgtcttcaatgattaagctcgtatagagtggatttttataagatgaaattatgatttcatcacaagtcggtctactatcagcatttttcataatattgatcagagcttctgccagccaataaaaatctccacaaatactattttcctttaaacttttctctatttctacattggtaaatctatttaagtccaaactgtccatagcataatccactaattcatctaaacgaatttcttcttttttcataagatctttgttggcatcaaggctagatagtttgagtaaaatatctgatagagagtttaatctaagggtttgtctttttaaaatctctatgtcatcattgtccggaaagttcatctccaaattttctatggaaaaaagcatagatgtaatgggagttttgatttgatgggcgatatcttctaggtattcgatttgcttttcgctattttttctacttgtctctttggcttctactatttctataaaaagcttataaattttatcttccaaaattgaaaaatcatcttgcttcataggaattttgtagtcctgatttttcatattttctaccagatctataagctcatttattctatttttctttcttgattctaaaaaataataaagaagtcccagacttattatccaaaatacatatatcatcatctaatccatcctatatccaattcctctaacagtagaaataactcccctatcaagcttttctctgattctcttaatagttgatgtgagggtattatcatttacaaatttatccctatcttcccaaaacatttctaacagttgacttctggtataaactcggtgaggatttttaataaataagactaggatttcatactcaagtggagttagctctatttgcttacctttaaaataaacttttgaatcatttaaatctatttttatatccttgtaagtaattattttgtcttgacttagaggtattgttcttaaaaccgcatcaattcttgcccttaatattgcaagggaaaatggtttagttaaatagtcgtctgctccttgatctagagattcaattataaaatcttcatcatttcttacagttgttacaataactcttatgtccttatcttttaatctttctatcaaatgttgaccgtctttatctggtagatttatatcaagtagtgccacatccatgtctacattcatcttataggtcgcctcataaaaagatgatgcaacctttacttcataaccattagtaactaaatacttttccatttgtaaggcaatttctttattatcttctataatcaaaacactcttcattctaaccctctcatgtatcaacttttatattaaaaacagacccttcacggtagagtgaccccataaagttggacttaatcgagtaagcatttcgcttgctcgattttgttttacataacattcgttctatgcagattgcatctgttcacggtattgcttcggactcaatcctcctaacttttctttgattcgatcgttgttgtagtagtggataaaacgttcgatggaacgcacgagttcttgtcggctccggtagatgtgaccgtcgtagatttctcttctcagtacactgaagaagttttccatgggtgcgttgtgccttttctcgacatgctttgaaagatgagatgtttttttaacatggcttgataggcggtcatttggtaaccccaaccgcgatcggagtggaaggtgcggcggtaggggcaggtgtcggtgcgcttgatagcttcttctaaaccttgcagcatggtgacgccgttgggttgatcgaaaggatgtagctgatgatttcaagattatacaggtccatgacctgaaccagtcgttgaattttctttttgctcaccacccctccccggttcttcagctccagatggatccttcgatagccatagtctttgtgttcgcaccgaatagccaaaacttcgtctcttaaggcttgatccttatctgcttcgctccgctttttctgcccgtacataaatgagggcaagaatctttcttagttggaattgttctcggagtttggcgacgatcctcgcctttttttcattgcttcttccctctccaaactccttaactgttcccagaacttcttttgaatggtgggtttccggttttccacttctaattttttgatgcggtttttcaatgcctcccgtgtggatacatcaagaggcgcctcctttgttagagacttcgatgcttgattgcggtcatctttcttcgtcacaggtctccctcgcttgtgtggtcgcagaccctcaatgcccttctctcggtactgttttcgccagttcacaatcatggatggattcagccgagttcaagggcaagttggctatagctgcattcgctcgtttcgtaacgtgtgatggcttctaacttaaactctacactgtactcacgattatttctagagcgtattaacccttcatcgccaaaatgtctgtaattattcacccatagtctaagaacagattttcaatttggtatttcattgccaagtcacggtaacttgacttcccggacaagtattcctcgacaatttccttcttcaattcataactgtattttgtcattaaaagacccccaaaggttggatttcttggtccaacttttgggggtcagttcacgaaggacctttttttattccggttccaccggcgcatttaatgtttcgttttcgaaaaagtccgtgccgtcttccacattgccttggaaggcgccgaaggtggagatgtagttttctccgtcgatcgtgtaatggacttccacctgcaggtattccagaaagtctttttcgtattggcggccgtagcgcttggtggtgtagctgtagcccaagtccccttcgtcctttacttcgtcggtgataatccgcgtcttctgaggatcgtcatcgtccgatgcgtgggcgatgattttaatgcttatctttttaggctttacgggcttttcatttttctcgaattggaaaaagatccggggctttttatttaatttgatacaggggatgtcgccttcgatctttccgtggattgtatcccgcaccttcgccaattgattttccgtaaaagcaagatagtctttttctttaaaggtgcggacaatgggcttgcgctcgtcccatgccacgacagcatccatgcgcacgccgcccaccgtttcattgcgccgaaagtccggcgtcggcgacaaggcataagacaaaaaggccgcaaaagccacccccgccacaaagagaatccccaaggcgatcaaaactttctttctcatagcccacctcctttccctttatatacccttttcgccgcaataaaaaaccggcccgaggccggcattttacagattgattaagtggatggccacttcgaagtaaattaagagagcgaaggtgtccaccaaggtggtgatgatgggccctgccataaccgtcgggtccacgtggactttgtcagcaatcaagggcaggatgccgccgatgattttcgacaaggtcaccgttaaaagcagagtcgccgatacggtaaggctgatggatagatcgtggtcgcctaaaatggtcatgcgaacaaagtttaccgccaccaaaatggtgccggtaatgaggcccaccttcagctctttgctcatgacggagaaaatatttctgaagtgaactttccccgtgtaaagggcgcggatcaccgtggtggaggactgggtgccggcatttccgccggagtccatgagcatgggaatgtaggcggcgagggccacgctggatgccagcaaggactcgtagcgctgaataataaagcccgtcatggtggcggtaatgaggcagataatgagccaagtggtgcggtctttggcgatggcaaaactggaacgttccaaataatcttcgtcggaggtgtcctgtaccccgtggatgttggacaagtcctcttcgtactcttcgtgcataatgtcgatggcatcttccaagggaaccgtcccgatgaggcgcccctcggaatccgtgacgggaatttccgacaagtcgtagcggtaggcgagcttcgcgacgatttcctggtcgtccgtagccaggacggtgcgaggcagaggcctgagtatgtcctccacgggctgatccatgttgcggagcacatcggctaaaaagacgtagcccaaaagcaccagggaatcgtcggtaacccaaatttgctccagcttgtccccatccaaggtggatgccatgacccgctgatagatgtgctccatgccggaagaagccttggcggagacaaactccacggtcataatggcgccgacgctgtcttccggatagcctaataatttattgacgatgacccgacggtcgccggtgacgaattcgtccataagccggcgcaccatgttggcgggcagctcctgcaaggtatccaccaactcgtcttcgtcaagctcctgaatcagggttcgtatggcatcgtcggtgtagctgtcgattaatagacgcttcgtctccccgtcgagctccgcgaaagtatctgccgccttgtccttgtccaaaagcttcagccacaaagccacggacacgggatccatgtcctgaaggcgatccgccaagtccaccgggtccatttgattaatttctaattttaaggatttaattgcatccacgtcgtaattacgcgtcatctcatccccctttctaaacaaaaaggatcgagcgcactcaatcctttttctttgtttctaatgaatagccagattatatcataggccatggaaagaagatagttttcgcatatttgcacaaaaaagacagaccggtctttccgatctgccttttgattttagtggccgaattgatagatgacttttgccagttgcgcgcgggtgaagtttcctttcggagcgaaagttttgtcttcgtttccttgtaggatttcgtagcggctcatgtgcatgaccgcttcttgtgcccacgagggaatggtgtcaaagtcggtgtatttcggcacttgttttgtttctttcaattgaatttttaaggtgttggtgtatcggtagaggatggtcgccatttcggcgcgatccagtgttttgttcggtgcaaagcgattgtcgcctacgcccaggacgattttgttttctgctgcccacgcgatgtagggggcggtgaaatcgcctgcgttcacgtctttgaatggcgcaaattgatatttgcttgtgtccacgttggcgtagcgtgccaggacggtgacaaattgtgcccgtgtaacggggagatcgggcttgaagacgatgtcgcctgcaatgttgctgaagtagccttttgccaaggcgtctcgtataacggcttccgcccagtggccggtgaaatcgtctttaatttgcgatgcttggtttccattggcagaatcttgggaagcagatccgcggttcggtgtagaggggaaccaattatgactcgatccgccacggccgggcttggtgccgggattgggcttggttccgggatcaggcttcgttccgggatcgggtttcgttccgggagcgggcttcgttccgggatcggggttgctttccgtgtctttccattgtgccgtaatggtcatatcgtccttaatggtgacttctgtgccgggtttcgtcaatgtgcccgatacgagccagccggcaaattcctttcctgccggtgctttaaagccgttttccggcaagataatgctagagcctttttctacatccttggattgtgccgtaccttgtccgcctgctccttcgaagtttacagttattttttctataggtttggcgtttttgaatacggcggtaatctcgagatcttttgttgcatcaaggacttcgcccggttgacgcaagcctttaaggtcttcgcttgtcgctgcccgtgtgctgccacttgtcgctgcacgtgtgctgccctgtgatctcgatacgccatacataaaggcgttggcttcttttacgcgccatcctgcaaagactttgcctttcggcgccgtcaaagtgcattccggcaagacgaagtcttccccttggacgactgtaatgggcgccatggtgccttcgccaccatggaattgaatggtgacctttgcgtttggcttttccataagtttgtcatcatcaggatcgaagctcataattttcactgtcgtattccgcgcgtagtcttttgccacgactttgatttcataaggagcgtagccgtaattttctaagtccgtgccggcgatatagggtttgccgttaatgaaaatttctttttcttggatttttccttcttttttacctgtccgttcatccgtaacgttcacgtaaagctttttgttgttgccataggggatggcctgtgcattgtctttgacttcttttgtaatggtaacctcgggttttacatcgtctaaatagatatagtattgggtggtgagggcacgttgaatgatgttgccttcgctgtctttaatgtcgccgggcatgccgtttccggagtagtcttttgccgcccaatccaggcgatcgccgtcttcaaaggggaccttcacttcaaagggtcggctgttgtcgccctttagatcgccgtagatcaagtattcgtcgacgatgctttcgttaatacgcaggtgccagttaaagccgcctttatcgccgacgacgcctttcatcaccaaggggctcttgcgaacgtaaagtttgctgtcagcagtggggttgaagaagtttttatccatatccaattgcacggcgtctttatcgaagtaaacgcatttgcctttttcggaaatgagatttttctcattcagttccaccttgccgtcctttgtaatcgctttaccatctttatctaaggcgattttgtaaaccttgtagtttatgtggttaaagccttggagaatattgaagcggacattttcgtcttttccaaagtcctcgcccggttcgcaacgggatgcgtcgcagtaatatacgtcggagcttaagggctttaagccgtttttgcccgggttgaaggctgtgatctttacggcgtagcctttgtagatcttcagttcttcccgcattttaaagacggtgttgccgttaacgtctttatcggcgaagactttgctgtttaaatcgccgttactaagttcttcaataccgccgaccttggattcgacggggtgaaatgctttttcgtcttttttcttcgttttgggcattctaaagaaaatgggtttgctgtcgccctgttgatcgacgacgaagagtttaatatcccgttcgtagttggttcccttatcgttattgacatcgtctttgttgccgtagaaatcgaaggaaagggtattcgccttgtcgtcgtaattgaaggtcatgacttcggctcgtttgccgatttttatcatggacgccgattggtaataaagcttggcttttttcgatacatttttcagcgtaccggatacgcggaagccgccgtcttcatcgggggtgattttgccgacatagcctttcttgttcagaccctccatggtttccttggtgtattccataggatctccattttcatagaagagggggttgccgtcggcgtccagtttgttgttgtagtcgccgtaatcggtgtagggctcttcttcgccgctaataaagttgtatttgttataggtcttgggtttcggcatcttccgtaaatcggaatcttctaattttcctgtagtggaatgtgctttgtccaagacgatttcaggtgtgccttcgacttttttgtcgtcttcttgtttttcttcttccggtttgttttcagggggtgcggcagtctttagtttgctgccgtcgatggcgtacttgtcatctgccgtgtaagtcccatcgtccttatttgcctttgcgtttacttcgtatttcagcttaccgtcggtaaggtttttgtcgaatttcacgcggaaggtgtcggagaagttggtggcgccgtcgagggccgccaattccagggttttgcctagaagatcgctgttggcgcctttaatgacgtagcgcgtttccccggtcttttcgtcgtagcctttgttgagaacttttaggctcggctctttaattaagtcgccgtcttcatccacaaaggatgcgcctaagaaccaaagtttgttggaaacttctttaaaggcttcgggatgttgtttttgatcgtaattaaaccacgtcttcgatttgtccgggttttggtgataggtatccttcgccacaaccttaatttcatcgggatttgaacaatcaatggacaaaatcttcggcgccgtattgtcaacctttacgggaacataggacacttgataagagtaatccggcgtgaggcggtattggaatttgtagaagtattggccttcggcaagaggggttaggccgggttcaatgtattctccatttaactgcattgctttcggcgaatacacttggccgtcccattgcatttcggggaatactttcatcttggatttttttaagccctttgccgtgttgctcttacagtttaaaataccttttataaattgttgtacggaaaggactttaaggttccgttggccctcttctttctgttggttgacgatggccaccttcgcatcgtaggcggagcgtaaaataaggggggtcggcgttaccattttatcggtggtgtagtccttgataatttgactgtcgcctgaggtttgttgcgaaaaatccttgctgttattcaaggagaaaaaggcgggatcttgttcaaagttcgggttgccgtcttcggtgttttgaataacgcctgccgggttaaagaggtcgattccgtgttcgccgccgcgtccgcggttcatggtgccggggcgttttaagttaccttcgtcgtcgtaaccgacgatgcctttggatttggagccttcttcccacgcccatttgtcgataatggtttctttgttccagtctcctgcaaagcccatgaccggcatggaaagggaaggttgtgcgttttcgtttttgctgtcggcggcttctttggattcaaagctcaagaagctttccacaaattgatctttcgcactgccagtttccattttcgccgccaaattgtagctgctgtgggcggggacggttatggtttcggcggcaagattcaggcgggcgccttcgacttttttcgggtgaatttccgctacgattttttgtccgtcttggctcttttcgtctttgtattcttcgtccagttttttcaccggcgtttccccgtcggtggtgaccggacttgcggacacgttaaatgtcaagtcacgatcggaaatattgcacagggtgacggtgaaatctttcgatccgtctttaatttctctgagggatgcggagccgtaatcgttggattggccgtcgccgcctttggcttttacggatacgatgacattgtttttcaatgctttttccacgtcgataatgcctgccccttgttgacgcggcgatgcgaaaagcgtttgattttgttcatctttcgtcgtcgggtctttcatggggcgcgccgtattttgaagcatgatcttcgtcaaggatacgaggtcgatacccgatcctttaatgagaggatctttttcaatttgttttaagcgcgggcgaatcaatacggtagatgccgataccacgggggtcgccatggaggtaccgctcatgtattgataggtgcttacgccgttaatgacattcagtgtggagtaaatgtttttaccgggagcggatacgtcgggttttaggagaaggtcggtacggggaccccaggatgtggagcctgccggcacttcttcgtcgccccatttgattttgtcatttaaaaattccacggagagacgcttttcctgtccgatggcgggtttgtgtgcgtcgaatgccttcatgtcgatgcggtaatcgccttttttgttttgcttttcatcggcagtcgtttgtttgccggtgatcatatcccaaagatccctgccgtcgttgccggatacagagaagacttgtacttgtgtacgttcatcttgttcgtaacccatggcagggacattttcccagtcgtcgcggttgtaatagtttacggtgttcacgacgataacgccgacggcgcctttgtttttaaccttttggaaggcgtatttcatgtcggtggagaaaatccggtccatgacgacgattttgcctttcacgtcttttccggcaatgtctgcatcttggcatttacctaagtaaataaagtcgtaatctttttggttgaagtgttttttgtcgaagaaggcgccgatttgtgcatagcgcatatcttttccgccgatctttacgccgttaaattccacgacagtgtttctcgacgaggcgacggcgatggcatcttcgtgtgccgccgtacgggtgacgttccccgtgtcagtcattttaagggcattgttgctgtagcggtcccatgaggagtccgacgcagatgtagcgtagttccccgtggcgacacaaacgggaatgtcggctttcctcaagccgcgaatggcttgccagtatttttcgcctacgaggcccgtgcctgtaaagcccgacgaaatggaaataacgtcggcgccatgttggatacagtcttcaaaggcgtggaacatggtttcgtcgccggcaaagccgtcgctggcatcggagtacattttgtacgccattaattgagcattgggggcaatgccgcggatcccgtttttagcctgaagatcctgtttcgtggcgttggctgctaaaatcccggaaatgtgcatgccgtggggatcgtgataatcgctgccgtcgtcgtacatttccttcgtaatcgtgccgccgcttaaatagttgaagctgcggggcactttcggcgacaagtaaaagggcttgtcctcaggttttaaattcttttcctgcattttggcggcagacaaggcatcgtcatctaaacgcatgtccttgtgcttatagtccatccccgtgtcgatgttggcgataagcatgccgcggccgtcgtaatgtttcccgatttcgggattggtggcattaatggcctttaagtaatcggtggctttatccactttgacgactttgcgcgcgttttccattaaaggctcgagggttccgcaccgctccacgctcttgaccccctgcaaggttcggataacttccgcctgttcgggataggtctccacggaaaccgcattaaaaaggatgtgataatcgtatagaattttcacatctttcatcttttttaatttttccttcaccggagcacgcatcgcttcctgtgaaaattctacgatataggaaaatttctcgttcttcactgccacatttttctgtgacgcttcgaatttttttacaatggcactggcttgcggtgctttcttatgaaccgtcgcctctttagtgccgtcaacagctgctgcaagggcgctttcagccgacgaaaaaatcatcgtcgccgccaagagcaagctaattatcttcttctgcatccaaaacctcctatggtggaccgctaaactattcttgggaacgatacccattatcgtccatttgggattataagcttctaactatttcacgtcaaggggctttttactttattgaaaacaaagcaagtctttcattggatgcgaatcattatgatcgattttttcgcgcgaacggtatagttgataatattaatcgaaattaatttgttcctttctcgaaaattcttcgattactttatcttctcttagaataaaaaatgcctccttataaagaaggcatgcaaaaattacacgtcaagcacgattggtcgatggcgaggatttctccaatacatcgatggaattaatttcatccggaaaaaatagaataagatgatttcccacactcacatcgatgctttcttctccctctggattattattggaatccgcatagccctccacaaagccgatccactcgccatcatcaacgtccaccagcctaatggttttaccccaatagtttattaaatacgccatcattcacctcatgcttttgctctattaggttgatgtagactctctactcgtcgtcacacatccgaattgcttttcttaatgtgtcgtttattatttcatcaattcttgaagaagcatcatattcaacaccgatgtccataaatgattcgttcagaaactccaagatcggtttgttctctctatttttttccagtcgttcataatcgtctgcaaattcgattgcgaagtattcattgatattgtatggcgattttgatataagggataacaaaatctctcgcaacgttttttccaatgttcactctcccttttttcgctatacatcacaagccaagtttcgggctctgccacacttctacctccgaagcacagcccttttttcttctatcctctactgggaagataaaagcatcttgtccataatggaatggatgatttttcttcgtcacatgcaaaaaatcgggatcgaagtcgggaaatggggatcaacgcccaacaaagagatggcgtcggacagtgaaggaaaatgaaaaaacggctgatttacgccgttaaacgtaatcagccgttatcacaattggtcgagatgacaggatttgaacctgcgaccccatgtcccccagacatgtacgctaccaaactgcgccacatctcgatgcaataatggtattataacaactttgcctcgcctttgcaagtacatgattctatttttatttttcacatattcacgcggctaaagaatagtctttttatccacgatgttgtacaatagtcgtggtacatctgataggaaaaagaggagggtactatgagtgagagagtagacggaaaggccattttggaattgttggccaaaaatgaactggaggtggcgaaagtctatcgctaccttgccgaagaggcaaatttcggcgatctgttttttgaattgatggcaaaagaggaagatcgccaccacgatgtgtatttgaatctggcgaagcaggccgaagccgacggcggctgggtcgtagaaaaagacgactacgactacttccgccttcgcttcgagcgaagtctcttgtcgaaaccggaagagctcgtggaaaaggcgaagaaaatccgcgacaagatggatgttttagaattggccgagcgcatcgagcgggaaaccgtggaaatcgtgcgggaactccaagacatcgtgcctcgctttgcgccaaaggaattaaaactcatcgaacaacaggaaaaggcccacttgaaaaaagtgacccagcgaattcgcgacaatatgcttaatgtaagaggcatgtagtcgcacgaaaagagcgtcccgagggacgctttttttattagctgcggtcacgctcttttctgtagcggacaaattcgtcgaaatcgtcgatgacgaggaaaggattcacctgcttttcctttcccatggtggtggggagagtgacggcgccctcatctctcaggctccgcactcgctccaattcgtttttcgtggcgtcgttttttaaatagttcacgctctgttcaagattggacagggagtattcgtgggcggaatagatttttacttcatcgtccatggcttttaaatcctccagggtcttaaacatggcttcgtaatcgccgctgaagacccgcccgcagctggagaggaagagggtgtcgccgataaaaagatgctccttcattttgtaggccacgtgcccttgagtgtggcccggcgtggcgatgacatcaaaattttctccgagaaggtcgattttctcgccgccttttacgatttccgtggccaggcccgtttcctcggggccgtagatcggcgccgggttagatgcgattaactctttcacgccgccgatgtgatccgggtgcttgtgggtcaagagcacggcatcgagatcgtagcccttcgtcgccataagctgcaggaggagatccgcttccgagggatccacgacgacgatgtgcttgtctttttcgatgatccaaatgtaattatccgacagtgccggcaggggcataatgttcattttattcacctcattcaccttataccctatttccctcatctttcaaagacgttgttgtttcctttgttcccgacgtgcgatcggtattcaacaaaaaaagagccctcgaggctctttcttattgcaagcgttccaccacgctctttaaatattttccaacgaccacggagaagcgctccaggtctttgatgcgcacgaagtccgtgccgaagatgagtcgttcctgatccaattcctcgtcttcgccggtaaagacgcctaaaacggcgcgctgcttcagtttgccctgaagcacttccgccgccgtgtcgtagaccgcgtcttccccttcgtagtcgacgacatcacctttgcccgtatccaggccgacggagagcaagtcgttgggcatgccgtcggagaggacgatgagcactttcgtgtccgactcgatttcttccatggtttcgaagacgtagcgcagggcgaagccgtcgcgattggatccgctggctttgtaggagaaaatctcgcgattttctttgctgtcgtctttgtagtctcggaagatgcgaataatttggtaattaaagagattgcaaaagcccatgacccgcgtgggaatgcgaagttgggttaatgcctcggcgatgagaaagccctgaatggccacttccgcctgccgatcctgttgggaaccgctcatgtcaagaagaatgtccacggcaaaggaattttcctgctcgaaggagtttttcttgaaaatgcggtcgtcgcctaaaatgacgtggcgccacaaaaggcccgtgtcgatggcgccgttggcggcccgcacggattcctgggaggagtcgtccagcaggtttttacgaatgatttctcttaattcaaagatggatcgttcgtaaatgtggcggtctttttcgtagatagcttcggtttcttgcctttgggcgaggatttgatcctcgaaaaaccgcgctcccatgtcgttttcgaaattgcccttcgtgacgtgcaggcgcatgccttggtgcaggcccgtggcgatggttgactcgattttttttgccttggcgggagaaagggtctccttgccgtagtgtttgcgtacccgagccaaggtgcgggcttcgttgtcggcgcgggtcctggtaatggatgcgtcggattccaccaccttcgacgtgtcccgaatgacgccggaaaattccgccgactcgatgatttccgtgtccttgtcttcgatttgctccgccttggtctccacgatttggcggcgcttctttttcggttccggctcctccggcggaggcggcacgtctttaacctcgatctttttttccacttcgaaggttaaagtgggattcacgtggaaatgttcccgccaaagtcgcgccaagtactcgtaaaattcgccttcgctttttaatttgtccccggcgatgagcttgcgcattaagggctccaggaacgtaccggcgctcatgggcttgcccatgcggtaggcggcgtattgcatttcaatttcctgcgccaagtcccttttgtttaaaaaatccaaggtgcggtagcgggttttgtaactatctttggccatggccttgattccgggccgctcgctgtacaaggtatttttcgtatactgcagggccaagatccgcgccacggcattcatgtccttaccgttggtgacattttgcgtgttttttgccacgaagttcaccaggcgatttttcggaaaagcccgatcgatcattcccgattccgccgcgtcgaagccgtcgccctcgccgctgtagcgccgctgataattgccgccgacggtccagtacacattttgtcgccgcttgtccgtccaggtcatcggaagagttcacctttcgtcacgccttttgcaaaaagggtatcgatgacatcttccaccacttctttttcgaagcggtcgaaggatttattgacgatgcccatgttcagggcctctttcacatcaagcccccgctcgatcatggtaagggcgccgaaaaggccacgcatatccacggccttggaggaaatttcgccttccaaacttttgttttgcaggtccgtaaagaggcgggcaaagaggagcatgccttcttcgtttaaatgggtttcttcccgcaaaatttgtttcagtccttcgccttccaaaatcggcatgtcgatgaccataaagcggctgattaaggcttcgtttaattcacgagtgcccatgtagccgtagttcatggtgccgatgaagcgggtggcatcgtccaaaggaatgcggtcgtagcccgccacatcgatcatgcggcgaaagtccagcgccgagtgcaccacggaaagggattcgtttttcgccatgttgatctcatcgaaaatagcgaagccgcctttttccgccgccagggtgacggggccttttttcaacaccacttccccgtttctgaaagtgtccacgccgattaaagaggcgctgtctacattgacattaagggacatattccacatggggcgattaaaaagttgggccaggttttcggaaaagacgtttttccccgtggctttcgggccggaaagcaaaatgtggtagccggataaaatagcgtaaatggctttttcccaaatgctttttccgtagtagcggtaaatggatacgggcacgcgatccgccacggcgggatccactttgtgttctgcgacaaaatcttctacgtctttcagcaaggtggcgtcgatggcttgtttgtttaaaaaatctaccagttgttctctcttcatgctcttcccttctctatatgatttattaaatttataatctcgctctagtttatacctctttcttcttggcataaagcaatttttttatctgttcgatttcatcaaatttcatgaccagggccaagaggaggtagcttattcccgccacgaccatggcgcccaaaagggccacattcggcgaaagaaagcccagaaggattttctccacgcccttggcaataaggcccatgacaatcgatgccaaggcgatttttgcgggattcttcgctccgcaggcgagtttcaaatccatggacgtgttctttaaatggatcagcatgcccacggcccccacccaaagggagacggaggtgcctatggccaggccacttaggcccacgacttttccgagaataaaacttaaagccacgttcaccgccgccatataggccgcgttaattaagggaactgcggcgtcttttcggctgtagaaaatccgtacgccgatttcccgaataccgatggcgaaaaggcccagggcgtaaaacaaaagcacttcccctgtggcccgcacatcttctgcggaaaaggcgccgcttaaaaacaagagctgcacgatttctttgtgaaagcacaggacgccgacggtggcgggcaagacgaaggccgccatcaaagagaggctctcccgcatcacacgagacagttcctcgctgcttttatcttccaccagcttcgccatgcggggataggtgacggtaacgatgctggtcaccacaatgcccgtaacgaagccctgaatctttgtggcgtagttaatcaccgcgaccccggtgggggcgatgacggaggccatggccttgctaacgatgttgttcagctccaagaccgaagtggagattaatatgggaaaaattaagcgccacatatgccccatggccgcccctttcagggggtagcctctacgcaggtgaaagccgctttttttcagatagggcaaaaagatcacgtattgaaaacaaaaagcgaacaaaattcccagggccagaaggcgcaagtcgccggcgcggcccaaaaacatggccacgattaaaatgctgttcatgaccacggagtggaacatggagacgataaagtgttcgtgaatttgcaaataggctttaaagatggaaaagacggcgcttaccgtcatgctcagtgccgtcactcggctcatggccacggttttctcgaaggtggcgccttgaaagcccggcgccatcacatgcaccagtaccggcgcaaagataatggcgaggacgctgaggattaaggcgatgaccgccacggcaaagaccaaggtggtggtgaagcgattcgcttcctcctcgcctcctctgtgggccatttccgtgtagacgggaatgaagccgccggcaatggaacctgaaaaaagattggataagaccataggcaaagtaaaggcgataagaaatatattcgccacatcggatgtaccaaaaaaatgggctagggctttttccctagccaatccaaaacatttggtccctatggtaatgagcattaaaagtagggatgtgtgctgcataattccctactttaagataccgaagctgtagccgtcgtcccgaagggcgtcgatgacgtggggcaaggcgtcggcggaaagctgtttcgtttccgcatcgtgcattaaaatgacgatcaccgaagcgtcgccgtttttcggcatggacttcttcaaaaattccacgaggcctgcagccgtagtggggcggcgactggccggttccgcatcgccggtgagggcgttccagtcgatccaggaaatgcccatgtctttcagcttttgatcggccgcatccaggcccttccagctcatgtgcccgccggggtaacgccaggcgccggaatgaaagtttttccctaaaatgctttgcagggctttttgcgttttaatggcttccccttcgatggccgccgtatcggcgatgcgtccgggataaagcttggtgtaatcgtggctgtaggagtgcagggcaatggcgttgccttcgactaattcccgtagcaaaatatcgcgatttttttcatggacgctttttcccacgacaaagaaagttccgtggacacctttttcttttagcgtgtccaaaatttggggcgaaatcttgtgattcgggccgtcgtcgaaggttaagaaggcgatttttttcttgcccgtatattcccgcttgccttgaatgatttcggaaatttctcccgcatcgtaggcgtaactcgaagcgcgggtaatgtggttttcacctttggccaggcgaatttcaatgcggtcgttaataatattattggttaagttgccgatttcttgcggcgtgtagctgcccacggtatgtaaggcatccatgtttttaaggacaaaccattcgatttggtttccgcccccatccgatgcgccctcaccggcgagacgctttaatttatgaaaggccccggcgaagacgattaaaatcacggccaaaagcacgaggccgcgaaggcgcgcctgtctctttcgcttttgaatgcgcatttttctgcgccgccgttgtctttccatttcttctttattcatagctcctccttaaggacgcaccgtaatggtttgcgcaatttttctgccgtcgccgtagacgtagcctttcagcacactgccgttgtatagccacaccacgcggcggtcctttaatgtatcttcaatattgaccatgtccaataaataggtcgcatcggaatctaaatcctttagctgtaccaagcgcccctgtccgaaagccaggtacctgtcgcccatgagcttgacgctgtggcctttgttcttgtcgtaggctgcaaaagacacggcctgtagcgtatctctatcgagaatggtgacaaggcctaaatccccgtcgtccaggagaatgtaggacgcactgaggctgaagtggcccgccttggaatccaagggcctgtcctctcggtcgtcttcgtgtataaacaaggcgccgcctcttcggtaaatgatgcgtccgtcttgaacatcgaagtcttccgtgtcccgatccactacccgctttaacactttcgatttcggcgagtaggcgtagatgccgccgggcctttgaaagtacacgtggccgcggtcgtagcagattctttctgcgccttccatggcgtagggcaagggatagaatttgcggctcattttatcgagcgaataaatgactagccgctgaccgtccacagccaaggccgatttcgtttcgtcgtcgtagtacaccggcgcgtctaaggccaagtcgccgataaagcgaatggactgtttttcgttgatttgaaaaaagctgcccatgcctccgggcactttttcgccccagcccctgatctgcgtggtgctgatatcgtaaatttccgtggccatggtgccgtcgcgatagggggagatgcttcccaccttcacggcgcgatcggggaccactttcgcttgatcctccggcggcagaatcaacaggcgggatccgtcgtctgacagattgattccatagcccatttccttcagtgtaaagaccaggggcacatagagtgcgtcgccgtcaaatgtgggataagacgcggcctctgcccgccccgatgggcgaaccaccacggctttatccgccgccatgtaaatgcgattgatttgattgatggtaatgattttttcttcgggaaaatagcccatgcgcttttctcccaccaatcggataaaatccttgtaggcaagggcccaatcgccgtttattttttttacgggataggtgtaatgcaccgggaccgcgcccttggatcgccgaaagatagaaagctccggcacatggttgggcgtttccaccaccggctttttcgatggtatgtcgcgaaaaaatttctcctccggcgaataaggcttcgccgccactaggaaggcgagaagaaaacacgccgccaaaagggcttttcttttcatcatctttcgcctccgccattattttaccacagcccgagggcttgaaattctaagataaataggatttatcactcaaaaggtgcgatgacattgtccttttccaaaaggcccagataactaaacgccgcctcgccgaaagccgtgggacggaagatgattttcccctcgtcgtttacggccatgtcgtataaatccaggtcccgacccagatccatgatgcgtctcagaatcacgtcgtctttttcaccgaccacttccctgaaaagcttggcgcccggcttgaggcattgggcataaacatctcgaaaaggccattggcggaaatacatatctgcgccttggaatttttcgttaaacagagtgcttacccaaagcaccaacttttcttcgtcttccatttgcatgtattgctccaggcgaatggtgggaagaagcaggccctcttccacaaagaccaggctctttaaaagggcgaattttctgaaaaacaccagctccggaaagctgctctcccgattggcctggctcttttgcagaaaaatcggcacattttgccgcatgcgcgccaagctcttctggttcaaggcgccggttttcgtcaccattaaatcttcgtcgagaatggtttccatgtagcgatcgaactgatcgagccagcgggaggagcgcttcatctcgccccgggcctctgccaggctgtttacccggtacattccccgcaccgagtgggcgaggcgctttttatagtcgagaatttttttatccgccggctccagggagcgaaggcccgcatcgtttccccgcatgcggcaccagtggcgaaagagggcgtaaatccgaagcatttgggcgtcgtcagcgaaatccccgtcgtttgaggccgccaccataagctcgtcgtagtgggtgaagccattgtcttccagattcaccccttccgccataagcaccgccgagtccatgtgctcgagaaggtacatatccgccaccacggcggcgtcgtcatcggcaaattccggtgccagggcgagaatgccctcggagacatccaaaagcgcttcctcctcgtcgaaaggcaaactttcctcgtcctccgcccgagcataggccagggcaaagagaaagaggatttccggattcccgttttttaaggtgtcctcataggcctttgtgttttcctgcatcatgggctgacgctttttcagttccatgacctgttctccaaaggcatcccgtaatttttcaggcacaaccttcgccttgttgaagagaaaatggcccacggaagtttccacgatgcgacccaaaaagagatctccctctttcagcgccttcgcctcttccgtggcctcgaggatgacggcaggctcgggaaacaaaaggctttgcacataaatgcccgcctcgcttttgtaattgacgcggtaaatggacagataggaatcgaaaatccgctccaaataaggctccacgccgcgcattttgtgaatgtggcgccacaactggcccaccaattggctcgtcgtggggcgattttcctccgtgtcgaacatgagccaggcggccaagtcgaaatgaggaatcgacacgcgcatgggcgcatacatttcctcgtctttaaataagtcgtccatgggaatgttgtggcgagtggaatccacaatggccacaatatcctccagggttttcagccaaagctgtgtattagacatgggttactccttcgtcgtaaagggcttttgtggcttggagcttttccaaaaccacatggacgtgaaaattcacaatgggatcgggaagcacctcgtccatgccctcaaacagttccgtgtagtggaacagttcttgaataatcaatttattttccgtcgttagtttgctttccatcagattcatatgagacaaaacccgcagcgaaataaagcattcgctgaaatgatccaggagattttccacgccgtaaaggtctacgtctcgggcaaagggctcagacatttcttttttgatgagctcaaaggattcctgggttttggcgagctctttttgcagcgcatcgagcccgatcttttcgtcggcgagaatcacggcctcggaaaggcggaaaatatcttcgtatgtctgctccaagaggttttcgaaactgcgcttcggcgtgggccgagcgatgaggtaattaatgaccagggaaacgaaaatcccgagaaaggtcccaataaggcggttgacgccgtaaattaattgggattgcgtcgatgaaaagctggccacgaaaataatattcgtgagattaataaagcggttcatcttaaatttcagcagggttaagataataatgacgatgcccacgccggcgataaagggacgaatgtaaatgttgtcggtgatcagtgccaaaacatagcccaggaccacgcccatgacgcaggtaaacattctgagtctgacggctttgtgggtttcgtgaaccgaaggctgcatggtggtcatggcggcgatggccacaaaaaggggcgtatgaagccccagtatattcgataaaaacaatccgatgacgacggccagagccgttttaaatgtacgcatgccgacatggggcaaatgatcttttaccggtggaatgttcaaattctgttctcctttttgcacttctagaaaaagtatagcaaactgaaaaaaaactgcaagggagaggcccgtttcaatctcaggaatcggggtattataataaaaagtagtgagaggagacatgactatgcgtattgaattttacggaaagaatattgaagtgacgtcggctttaaaaaatcaagcggaaaagaaactgtcgaaactggacaagtactttgccgaagaggtaaaagcgaaagccacattctctgccaccaagggcgatcacaccactgaaattacggtgttcttaccgaccagcattgtccgcgcagaagaaacgactcaagacatgtacgcctccattgatttggccgtggacgcgctggaaaggcaagtccgcaagtacaagacccgcctgaaacggcgccaccaaaatgccgataccattcgcttcgaaaatttcgaacaggccatgccgcaaagcgaagaagacgaacagggcaagattatttccaagcggaagcactttaaacttctgcccatgcacgaagaagaagccatgcttcaaatggaactgttgaaccacaatttcttcgtcttcttagatgccgaagacagcgcaccggccctgctttacaagcgccgcgacggcaatttcggtcgcatcgacttcgatatttaatcttaaacacgccctataataaagaaaccggacgctcgtccggttttttaattggattcaatttctttcggtagctcgataaagacctggaagtagtctccgtcgataatcatgcgaaattcgccgcctaaaatttccaccaagtttttggcaatataaagacccaggccgcttccttccgtggtgcggctcttgtccccccgaatgaattgattggacaattcggcggtggactggttaatcttgtttttcgacagattcttcatattgaagtagatcttttcccccaccaccgaggtgttggcggtgacggtggtattttctttcgcatacttatagcaattactaaagaggttttgaatgacgcggctcaaaacattgccgtcggtgtaaatgggaatgtcttccgcatcggaggtgtagacgaaatttaaattcctggattcataatcggcggcaacgtcgccgtagatctggctgactaattcattgaagtcgataatcaccggctccagagtgacattgccgcttcccgtcttcgaggcttcgatcagatttataatcatgctcttgagccgctcggaattgcgccccagaatatgaatgtaatttttcgcctcgtcgtccatgacgtcttttttgcttaatatgtcagcgtagttaatgatgctggtcaaaggcgtttttaaatcgtggctgatgttggtgatgagctcggtcttcatcttttgcgacttcacctgggcctgagccgcctgatacatgctgtctttgatccgggtcagatccattaatgcctcgtaggtggattccttcatcataggcgagaaggccgtaatgtccacatagctttgggtctcggcaatggcggcgcgaaggatgcggttttgaaccacctcgtcttcccccatgagcatgagccgcaaaacgggcataattaacatgccgtagagaacgggaaagcctgtaaacaccatgagaaagtagataattaaaaacagattcatgaagcaaaagaagccgtagatggtttctttattcatttctttaatcatgctcgccgtgagccaggtgcgggtggtggcccgcataaaaagcttcacgcaccaaaagaccaacagaagcaccaagaccgtcaggctgtagaaggcggagcgggaaggatcgtaaacgtgtccgccgaaaaaagacgcgaaaagactcatgcaccccatgataaaccacaggtccacccaaatgatttccaggtaattgccccggcagtacttataggcgcgggctttgatcccttcgaaaaattgccgactcttgtcggtcatttagtccacgtcctcgaatttgtagcccatgccgtagacggacttaatgtaatcgggctttctcggattgatctccactttgtcccgcaaatgggagatgtgtacggaaataactttttttacgtcgtgggccgattcttcccacacaatttcgtaaatttcgtcgctggagaagacccgccctttgtttttcatgagcagacgcagaatcttgtactcgtggggcgttaaattggccacttccccgtctacccgtacttccttggcgttgtcgtttaagctgatgcggcccacggtgtaattgccgtcgtcgatttccgcagcacctaaagaggtgtagcggcgaatgccggagttgacccgggcgatgagttccacggcgttaaagggcttgatgatgtagtcgtccgcccccatgttcaagccgatgatcttgtctgtgatttcactttttgcgcttaagataataatgggaatgttgctggtttcgcggatttttaaaatggcggacatgccatccatattaggcatcattaaatccattaagaccaggtgaatgtcctcttttttcattacttccagggcctcgaggccgtcgtaggcgggaaacaccctgtatccttccgcttccaagtagattcttattgccgagacgatgtccttttcgtcgtcgcaaaccaaaatattgtattgcataaatcatcctccatcttgggtctattctatcataactatgatataatcgccttaggagggaagaaggattctatgaataaattgaaaaggaaactcaaaggtttcgttacaaaaaagcctttcgcttttttcgatatccttttctacaacattttgaaaaacgattcgatacaaaaggcggcgagcctgtcctacttttttgttttggccatcttccccttttttatcgccctgttaaatattctcaacgtggtgaaccgaagctatctttccaaagtgtcgcaaatactggacaatttgccgccggagattcaaagcattgccacgagtttttttaaagacctgcagctgaactcgtcttcggcccttttgtcgatttccttaatcggtacgatttatgtggccagcaagggcattaagcagctgattaagagcattaacgacagcctttccattgcggaagatcgaaacattttgtctctcaccgtcctgtcgtttattattaccatcgcccttttcgccttggtgattttgctctttgtcacccaagtcatcggctccaatgccctgcgctttgtttttcagtttttgcagctgcccccgaaggcatttacattcatccgccgcattaccaccttcgtgcccctggtgtatatgtttttgagcttctactgcctctaccgcttcgcaccgaagtggcctgaaggcacgaagccgaaagccggtgtacacttggcagcggctttattttccaccgtaggcattttactttccaacgcggtattcggctattatgtagcgaatttttccaattattccaacacctacggatccctggcggggatgattatctttttagtatggctctatctgttcggcttgattctgctcgtcggcagttccgttcaggcgagtctttatctattgaacacgaaaggcgcccaatggccacgggaagaaaccctgctttcgggcctgatctcgtcgcacacgcaagtgctctgattagtataggagttatttatgaaacaatttatcgtcgatacctttacggaaaaagtatttaagggcaatcccgcggcggtctgcctgcctgatcgcctcttaaccgatgagctcatgctggccattgccaacgaaaacaatttgtcggaaacggcctttgtcattaaaaacggagataaatacgtgctccgctcctttacgccggaagaggaagtggatttttgcggccacgccacctttgccgccgcttacatcgtatttttgattttggagcgggaaaaggacacgatttatttcgaaacgaaatccggcaccatgcccgtctccagaaagggcgatctctttaccatggacttgcccactttcccgctgaaaaaagtccccgttaccgatgaaatgacagcaacggtgggcgccacgcccaaggaagcttacatgggcagggatttactcctgatcatggaagatgattttgatttggcgggatacgatccggacattttaaagatcaagaccttggaaggctccatgctccacttgaccaaggcaggcgacggggattacgactgcatctcccgctcctttgcgccgaagctcggcgtggacgaagacccggtctgcggttccggccactgccacatttgcgtctactggtcggaaaaattaaacaagcccgacattttggcctaccaagccagtcgccgcggcggcattttggaaacctacgtcaccccgggccacgtcaacttaacgggccacgccgtcatgttttatcgaggcgacattcacatctgatcccctgcacaaaaaagcgatccctctttttagagagatcgctcttttattgcctttattcgtaatcaacatcccgggccttcatgcacacgatgccggaaacagacgccgccccagcgtccatgcatgctttttgcgcggccctcatggtggcgccggtggtgtaggtgtcgtcgattaacaagaggcgcttccccgacacatggcttgcggcgaaggcgttctcgacattcaatgcccgagccttggccccgagaccgatttgatccttgaccttttttgtgagcacaagcccctcttcaaagggcagatccatctgtgtcgccactttgcgggcgatgagccccggcggattgtagccccgaatgcgccgcttcttcgccgaggtgggcacgcagacgatggcgtcgaagggtccgaggccgctgtggcgcaaaaaatccgccgccatttcgccgaagacatccgcccaataccgctcttcgcgaaattttaagccttcgatcataaaggacgccgccttattttcccgaagcagagcatagacgggaaaggccttttcgcttaaaattgcctcccccataaaagagagagtgtctaaacagctttcgcagaggtgaaatgtgctcgccgcctcttttttgcagagtgcgcagtctccagatgcgaaaaatcctcttaccatgctcgcttctcctttaaaatgacatccaaatcggaatagcgccagcgaatgcggttgttttcaaccatgcgctttaagacctgaaagcttccgacgatgaccacgagcttccgcgcccgggtgacgccggtgtagagcaggtttctcgtataaagcatgggcgggccgtttaacaggggcatgaccaccacgggaaattccgatccctgagatttatgcacggtgctggcataggcgggcataagctccggcaagtattcgctcgtgtaggtgcaaagcctatcgtcgtagaggaccttgatccacccgccggcgggatccactgccgtgactcggcccaaatcgccgttaaagacgccttcgccctcgttgtcgaagactttgttttgtgacttccagggcatttggtaattgtttttcgtctgcatcaccttgtcgccgacgcagtaggtgaagccccggctttcaaggcctttcttcccgggattcaatgccttctgcagggcttcgtttaaatgctcgatgccgcaaatgccctttttcatcggcgccagaacctgtatgtcttccatggaatccacgccgtagtaggcgggcaggcggtttttcaccaaatcgcaaataagcgccagggccttgtcgggatcgctctcttccataaaaaagaaatccgtgcccttttcattgacccggggcagttccccgtgattgatgcggtgggcattttttacgatgtaggaggtttccgcctggcgaaacacttcgtccaactgcacggaaggcacttccccggaatccaaaatgtctttcaacacatttcccgcccccaccggcggcagctgatccacgtcgccgacgagtatgaggcgggttttttcctttaaggaggtgagcacgtcccgcatcaggagcaaatcgatcatgctggcctcgtcgataatcaacacatcggcatcgatgtcgtcgccggagacgatggaatcggtgccctcttcgtcgatgtagtcatattttaagaggcggtggatcgtggaggcgcctcggcccgtggcctcttccatgcgcttcgccgcccgtcccgtcggcgcagccagtgcgatggaaagattcagccgatccatggcttccacaatggcccgaagggtggtggtcttccccgtgccgggcccgccggtaatgacgaggaggtgggaatccacggcccgcatgagggcctctttttgcttctccgccaaggtcatgtccagcttttcgcacacggcactcaccatgtcttccgccatgtgctcggcgagatccactttgccccgctttttaatctcccgcgccaccaattgctcggcgcgaaagtagttgaggaagtagattttcaccacgccgccgcgctgggccaggtaaatgtccggatccacagcgaggatttgcagaaactcctccacaaattccacgtccatgtttaaaacccgggccgcctcttccattaaaagatccttgggcaggtagcagttgccgtctaagacgccgttggtcaagacgtatttcatggcggcgacgatgcgcttcgggtcgtcttccgccatgccgatttttctcgcaatcccgtcggcctttaaaaagccgaagccccgcaccttccccgccaaggcgtagggattcttttcgatcatggccggggcatctttgccgaagactttgtaaatggccatggcttctttattggtgagatcgaaggccgccgcatcgagaaaaaaatcccgcatgcccttctgctctttcagggcgtctaagatcacggcgagctttttcttgccgatcccttccacctcattcagccgctccggtttctcttcgataatctgcagggtctcctcaccgaaggtgtccacaatgcgcttcgccgtcacttttcccacatggggaataaggccgccggaaaggtaagcggtaatggcttccttccctcgcggccttattttttccgcccggtcgaaggcgaactgctccccatacttcgggtgataaatcagctcgccttccaggcgcaaatgctctttttcatgaaaggcgatggacgtgcctacaatgacgatatccgtatcctccgtaataaattgggcgacggtatagccattgctttcgtttcgaaaaataatatgatccaaaacgccttcgatgatcacaaagtccctactttctgtttttcaatgcctctaagatggcttccaccttattcgtttcttcccacggtgccgtcacatcttcgcggccgaagtgaccgtaggcggcgacatttttgtaaatggggcgcaaaagatccaagtcgcgaataatcgctgcgggacgcaggtcgaatacttcgtggaccaagtcttcgatttcgttgtcggtgagatccgaggtgccgtagctttccacgtagacagacaggggcttggcgatgccgatggcgtagctcaagccgatttcgcatttgtcgcaaacgcctgcggccacgaggtttttcgccacgtagcgggcggcgtaagcggcggagcggtcaacttttgtcgggtctttgccgctgaagcaaccgccgccgtggcgggcatagccgccgtaggtgtccacgataatcttgcggcccgtaagccctgcatcggccaccggtccgccttccacgaagcggcccgtgggattgatgtagatcttcgtgttctcatccatccacttgtcggcgaccacgggatcgatgacgtatttttcgatgtccccccgaatggtatccagatccaccgccggatcgtgttgggtactgactacgatgttttcgaggcgcaccggcgtaccgtcgtggtattccacggtgacttgggtcttgccgtcgggacggagataggttaaggtgccgtctttgcgcacgtcggaaagcttcttcgccattttgtgagcgagggaaatgggcaagggcataagctcttccgtttctcgacaggcgtagccgaacataatcccctgatccccggcgccgaatgcgtccaactcctcggtgcccgcttctttaaagcggtcgacgcccatggcgatgtccgggctttgttctttaatggcggaaataaccgccacggattcggcttcgaagccgttttgcacgccgtggacgtagccgatgtccgttaaagtttggcggactacattggtaaagtccacataggcattggtggaaatttcaccggtgatgactaccatgcccgtagaaaccaagctttcacacgccacgcgggcgtttttgtcttttgcgagaatcgcatctaaaatcccgtcggaaatttggtcgcacaccttgtccgggtggccttcggtgaccgattccgaggaaaataaccatttattcattttttcctccttatgattcaataaaaaaagcctgcacgcggcaggctttcattcttatctttcagacctgtcgcgtctgtaggatttagcaccaaaaagggttgccgggtttcacagtgcctagtcactccaccgctcttaataagaatgttaaacagtgataacagtatagacgaatcaaaaggaaaatgcaagtcacgatttccaaaaaccttttttcatagcggcctttatgagttcatcgcgaaaatccggatgggcgatggcgattaacgccttggcccgctcgtaaaggctcttgccctttaaattgcaaatgccgtattccgtgaccacatactgggtcaccggggcgggcaaggtgacgatggtgcccgttagaaaatcggggacgatgttggaatggcgcaggccgtttttgtccacgcgggatgagcgcaggcaaataaagcccttgccctccggcgccaagtagcttcccacggcaaaatcgaattggccgccggcgcctgagatttgccgcgtacccacgctttccgagctcacttcgcccctgaggttcacctgaatcgccgtgttaatgctggtcattttgtgttgggcggcgatggtggcggcaccgttgacgtaatccaccggccccacgacgatggaaggattttcgtcgacgaagtcgtagagggcctcggtgcccgccaaaaaggcactcacctgccgaccgcggtccagggtctttttcataccggtgatttttcccgccaaggtcattttcataaagctgtccacgtacatttccgtgtgcacgcctaaatcctttaagctgctgcctgcgatgacatcgccgatggcgttaggcaatgcgccgatccccagctgcaccgtggcttcattttccatgcgttccaccacgatttctgcaatttttctgtctaactcgccgtagtctcgattgggtaagacgcccatggcgtggggctttgcctcaatgatcacatccacctgatcgatgtggagttcgctctcacaaaggccgaaaatccgcggctgcttttcgttgacctccacgatcacccgcttcgccttttccgccagtcggaaaaagtggctgccgtcgatgccgaagttaaagtagccgtgcttgtccatgggcgagacggagatcaccagggcgtccgtgtctctgttttccgtaacgtagcgaatgatttccgagtagcgcacgggaatgtggttggccgtgcccgcatccatggcgcggcgcacttggccggtgccgtgccagctctgccacaaaaaggggccgcctgcatctaccaagcgggaggaatccacgaggacgccgtttctgatggccacgtgattcagctcatgggccctctccgccagggccgcatcaaattccacggggaagtttgcgccgaaaccaatttcgatttcatcgccgtcttgaatcagggccgccgcttctcgtgccgtcttcagtttttctttgtaaatcttctcgtacatactttaaattccctcacaaaaaaagccgaccgcagtcggctctttcttatcgtttgttgcttctgcgccaaatacccatttcttcagcactcttaatgagttcatctctgaagtcgggatgtgctaagttaatgagtccttcggctctttcccaggtgctgcggcctttgacattgaagatgccgtattccgtacagatcatgtgggtgttggggcgtgccacggtaatggcggagcctgtttggaaattggggagaatccgggagacggtttcgccttgtttgttggtaaaggtggagcttaagcagataatgctcttgccgcctttagccaggtaagcacctaaggcgaagtctaattgaccgccggcgccggagatgtggcgaaggccggtggattcggaggatacttgtccccacaggtccacgttcaatgcgttgttaatggaaataaagttgtcgatttctgcgacgacggcggcgctgttggtgtattcaaccggtgcagccatacattccgggttttcgtccaggtagtcgtataattccttgctgcctgcagcgaaggcgtagacttgacggtatttgtcgatggttttcttggagccgttgactttcccttttttcgccatgtccacaaaggaatcgacatacatttcggagtgaacgcccaggtcttttaagtcgctgtctgcgatcaatgcgccgacggcgttgggcatcccgccgatccctaattgaagggtggcgccgttgggaatttcatcgacgatgaattcagctacttttttgtcgacatcgccgtaacccgaagcggggagttccacgggagcaatggatcccgcttcaacgatgtagtcgacattgtcgatgtggatttccgattcgcatttacccgggcagtaggggaatgcttcgttgacttccacgatgacggttttggctttttccaaaatcgccatttggtgagatgtattcaaaccgaagttgaagtaaccatgtttgtccatgggggtggtcataacgacggcgacgtcgatgtccacttcatctctgtaatatttcggaagttccgaataacgcaggggaatgtagaatgcgccgggacctgcattaatggcttttctttcggatccgcctgcatgccaggagttccaggtaaaatgtttgccttccgggtctactttaagtacttcaggtgcggcgaatgctaaaccgccgtaaaccaatacgtcttctaattcatcgacgcgttttgccagttctttgtccactgcttgactgatccctgcagcccagccaagttccacacggtcgccggattttaccttggcggcggcctcttttgcggaaatcaatttttcactgtatttctttgaatagtccatgatagtcctccctggtttttgatcataaaaacgttcgcttgtttaataatacacgatattgtattgtttttcaatttaaacttgcccaagtttgttatttttttataaaacttttttcggtgcacggaaaaaagccctcatctttttcggatgaaggcgtttcatttttcttattgcttaaaggccgtgtttcctgtataaatccccgcggcggtcgtttaaaaagtgttgccagcgccgggcttcgtccaggtgctttttttcgaagacggcggaataaattccctcgtcgcttgcaccatagaccaagagatcccctctcgggctgaccaggccgctgccgccgcttcgcatattccccgccttgtcggatttgcaaatgcccgccgcggcgacgaaacattggttttcgatggcccgactgcgaatcacaagactcatgtgttccagccacttagcgggccaggcaaaggcggcaaacataatgtccacgccttttaaagcatagcagcgaatgtattcgggaaaatccatgtcgtagcaaatggccacgccgcaggggatgccgtcgatggtcataaagcccggcccgtcccccgccgcgtaaaattcctgttcgatgcccgcctgatacaaatgggccttgtcgtagaccaacacttcttccccggcgcggtcgaagacgtggcaggtgttgtagagcttattctcccgcacttccgccacgctgccgccgacgatgttcaccttgtatgccttcgccaggcgagacaagagggcccgggttctgtcgccgtttttgtccgccccgtcgaaatgggtggagggggatgaaaacagattccacttttccggcagaagaatcacgtcgggcgcatcttccgccgcccggtgaatccacgcttccatgtagccgaaaggatcccgccttgccattcgctcgtcgatttgaacgctgctaacctttaaacgccagtccatgttttctctcctcgtctgtcattgaaaaaagaccttgcgtcagcaaggcctttggtttattcttcgtcgttttcgtcccacgattcgctttccccttcgcctaagggtttcatggtggggaagaagagcacgtcgcgaatgctggattggttggtaagaagcataatcatgcggtctacaccgatgcccaaaccgccggtggggggcaggcccacttcgatggcgttaatgaagtcgtagtccatgggatgggcttcgtcgtcgcctttttcctgatctgccacttgctcttcgaaacgggcccgttgatcgatggggtcgtttaactcgctgaaggcattggcaaattcccaggtgttgatgaaagcttcgaagcggcgcgtctttctaggatccttgggatcgcgcttggccagagggctcacttccaccgggtggccggtgacgaaggtgggctgaaccagcttttcttcgcagaattcttcaaagagctcgctgatgacgtggccgcgggtccagaagggttgcacttccaggcccttttccttggcgatggccaaagcttcttcgtcggtttttatagcggagaagtctacgccggcgtattcttttaccgcatcttccatgtccacgcggttccacggcggcgtcaggtcgatttccgtgccttggtaattaatgacagccgagcccaatactttttccgccgcataggcaaacatgtgctcggtaatgtgcatcatttcgtccatgtccacataagcttggtacaattcgatgttggtaaattccggattgtgacgggtatccatgccttcgtttctgaacatcttgcccatttcgtacactttgtcaaagccgccgacgatgaggcgcttcaggaaaagctcgttggcaatacgcatttgcaaatcgatgtccaaggcgttgtggtgggtcaggaagggacgggcgttggcgccgccggctacattgcccaaaatcggcgtttccacttccaaaaagcccttgttgtctaaaaattcccgaatggacttaataatggcggaacgcttgaagaaaacgtcttttacatccggattcacgataagatccacatagcgttggcgatacctgaggtccatgtctttgaggccgtggtatttttccggcaacacctgaatgctcttggataagagagccacttcttgtgcttccacggaaatggcgccggcttcggttttaatgaccttgcccttgacgccgaaaaagtcgcccacatcggcggccttcaccacttcataggcctcttccaaaatgtttttcttggcgaaaatttggatttgaccgtaggtgtcctgtacgtctaaaaaggcgatttttccgtgacggcgcttggaaataatgcggcctgctacggagacgatcttgccttccatggcatcgaaattttcgacgatgtctttggtgtaggtgtccacgtcaaacttttcgacgatgtaggggctgttgccttcgtcgattaaattttggactttcttcagtttttgatctcttacttcactgctcttttggcccttcgccatggtctacctcccttatgcgatggaaatcttcaataccttgagtcggactttgccttgaggcacgtcgatatcggccacttcgccgatgctcatgcccatgagcccggcaccgatggggctttcgttggaaattttgccttccaaaggatcggcctcggcgctgcccacgatgtggtaggtatcttcttcctgtgtgtcttcgtctaaaaccgtcaccgcactgcctacattgacgatttgatcgttcaggtcgttgcccttgaccactttggcgtttctcgccatgtattccagcttggcgatgcgctcttccacttgagcctgttcgtttttcgcctcatcgtactcggagttttccgacaagtcgccgtagcccagagccactttaattcgctctgccacttccttgcgtcgtacggtttttaagtagtcgatttcgctttcgattttctctaagccttcttctgtaattaacacttcattattattttctgccatagtatcactccacttcgtttctcgtcgtttatgaagaaaggacccgacgccgggtccatgtaatcaagtcgccctattatataagaaattactccctctgtcaattacaggcttccttcgccaaccgatccaagtaatcgtcgatggcgtctttctccgacagggacaggatttcgttgcgccgcctcttcgcttcgctgaagccttttaagtagccgatgaagtgcttgcgcatttcgatgacgccgaggtgctcgcctttttccgccacgctcagctccagatgatgcttggccacggcgatgatctccctttggctcggcgcgtcgatggcctcacctgaaagggctcttcgaatttcccgaaagagaaagggatggcccacggcgccacgcccgatggccacgccggccaacggtgcatccatatggcgtagcacatcttccgcccggtaaatgtcgccgtttcccacgacgggaaccttcaccgccttcgccaggcgcgtgataaagtcccaatccgccacgccgctgtagtaggcttcccggcttcttccgtgaacggtaatttcccttacccccgcagcttcggcgatttttgcgatttccatgccctcttcgtccccttcgctaaatccctttcggatcttgacggagacgggaatgggtgagctttccacgcaggcttttaaaatggcgtcggctttttccggcgtctttaacagggcgcttcccgccccggtctttacgattttcggtgcgggacagcccatgttgatgtccaggctgcgataatttttcaattcgtcgccgagcgcatcgaggacggcgcgaaaaatctccgcttcgtcgccgaaaagctgcaaactcaccggcgcctcgtctgcggccacagccatgaggcggcgagtctttttgtccttataatagagggctttggcgcttaccatttccgtggtggcataatccatgccgtaggccgtgcaaatgcgtcgaaaactttgatccgtgtagcccgccataggggccagggcaatggtaaaggccattagctgttcatctcgtaaaggattctgagaccgtccatggttaaatcccggtcgataataatatcgaagcggctgtcggagaccaggagattggaaaaaccgccggtggcgatgattttaatggcttcgctttccatgcccagctcgtcgcaaatatggccgagaatgccgtcgatcatggtggagaagccgaagtaaaggccgttttgcatgctgctcaccgtgtttttcccgatgactttctccggccgaatgatttcgattttcggcagcttcgacgtgcgggagaccaaggcgtcggcggaaatggaaatccccggcaagatcaagccgcccaggtagtttttctttccgtcgacgacgcagaaggtaatggccgtgcccaagtcaataatgatgcagggcccgccgtatttttccacggcggccacggcattgacgatgcgatcggcgcccacttccttgggattgtcgtaacgaatattgatccccgtctttacgccggcaccgacgataatcgggtagcgatgaaagtagcgcacgatcatgttttgcaaggtatgcataatattcggcaccaccgacgacataatgaccgcttcaatgttcaccggctttaactgcacgttgtccaacatttccgtgaccaacataccgaactcgtcgctggtcttgttttgatccgaagaaatgcgccagtcgtggatcagttcttttcccttgtacgccccgaagacgatatttgtatttccgacatcaattgctaataacataatgcacctacttgattctaactttatttacttgccttccacgccgtgacgacgccggtggagacgatgcccgcgaggattccttcgggcacacccgatgtaataatcgtaccgaatataactgaattcaccagcacctccgacgccccgacggcccgcacaaagtcttgggcaaagaaaatatagatgccgcccatgaccatgacggagtggaggatggtggagacgaaggccgaaagcaccacggcgcttgccttgttttccgaacgcagaacccaaataaacagggccacggataagatgaggaagccgccgtttaaaagggcgcctgcgccaaaggctttcgcagccatgtttttgtaaaggcccacggctaaaaagacgatgaccccaagccatgccgccatgcccattttcttcaagcccttgccgtcgaaggatttaaagaagcggaaaatataggcggaaatcacacctaaaaggatgcgcggcagaatggatataaggggattgtaaaagacaaaggagatgggggtggggcgggtgatggcgttaaagagggagctgagcccgaaaatgagcccaacgaaaccgcccaccaccggcccttcgataaaggcggcgattaagacggggatgtgcatggtagtggcgtttaaggggccgatgggcacaaagcccaagggcgtcatgcccaagaccacggtaatggcaccgagaatgccgataatgacaatgtcccgtgtggtgagaaagggcttcttcaatttgttattcataaaaacctccgatccggctcgcgaggatgccggtctgtttcatggaaaaattatacgctgtataaactgttggccacggcccgcgccatcactttcggcaggtaatgctccgccaattgcatggagcagtccacttcattggtggccagagaaaaaatcgtgtccccgtccaggcccgtgtgcaccggggtaatggtttttgcgtagccgttgtgggcgacggaggccagtttacaaagctgtgtcttcgtaaagcgcccgttggtggctaccacgcctaatgtggtgttttgatgcttgcctttttcgaaatccacggcacctttcgacagggcctcttccacggaataggtgatcccctcgacttccggtgccgccaagatttcgccggtttctgcatcttgaatgtggccgaaggcattcaccacgaccaaagcggaaaacaccacgtcccccacggtaatggaggcgcttcccacgccggattttttcgcgtaggcggggcccatggtcttcgccaccgtggcgccacatccggcaccgattgcgccctggcgcctgtcccccgggcttgcggcttcgtaagccgcccggcccatggctttatcgggccagacgtcggcttttttgtacgtcaagtcgaacaacacggcggcgggcacgatgggcaccacgcccacgcccacatcgaagccgattccgtcgtctcttaaagcttccatgacgccggtggcgctgtcgagtccgaaggccgatccgccgcttaatacgaaggcgtgcacttcgctcacggcataggtcgggcccaaaagcacacactcgcgggtgcccggagcgccgcctcgtacatccacgccggcggtggagcctttcggggcgagtattaccgtcacgccggtgccggcttctgcatcttccttgtggccgacagcgatgttcgctacgtccgttaaatgtcccgaatacataatccctccttttttaacgaaacgattataccatatcttcgcctgcctcacggcaggaaatggcaatagggcgcctttctttccccggaaaagaaaataaaaatccatctttttgttaagatggtgaaattcacggaattcctgtcaatatgtgagatccttttgatataatagacaattatgaaggaggtttctatgggtaaacgatccggccggaatcaacatgagggcaattcccttcgttggagctcggcctttaaaatcctattcttattaatcgtcatcgcaggcattaccctggtgggcatcgccatggcctatgccgtgacggcgatcagccagtcgccggccatcgatccgaaaaatatccgctcggctatttccgagacctcggtggtacgcgataaaaacggcgacaatgtggagcaattggtacaaaatgaattcagcgagtgggtgcccattaagcgcatgcccgattacttgctggatgccgccgtggccattgaagaccaacggttttacgaacaccacggcgtggatttccgccgcctggtttcggccactttgcgcaatctccaaagcatggacttcagccaagggggctccaccattaccatgcaggtggcaaagaatctttacacctcgccggtaaaaagctatgccagaaaatttcaagacatttactacgccttccaattggaaagcaatttaagtaaaaaacaaattttggaggcctatttaaattccgccgccttctccaaaggcaccaagggcgtggaagccgcatcgaaaacgttcttcgacaaagacgtcagcgacctcaccttggccgaagcggcgatgatcgtaggcattaccaatcgtccttcggagtacacgccttttaacgccgtgcccatcgaagaaagcgacgatttagataccatcgaattcagcctggttcccgccgaaagcattggcgcggaagccacggaacgagacaaggaattaggcgatgccctggcggaaaaggaattaatcgatcccttcgagcacagtcaaatcgcatccggtgttctggtggcgagaaaagccgtggccaatcccgccagtaaaaaacgccaggaattaattcttcacaaaatgaattccttgggcatgatcgacgaatccactatgaaggaagccattaacgaagacatccatctggacttaggcagccacaccaccaagggcatttcgtcctactatgtggatgcggtgaaagacgaagtcctcgatattctcaaagaaaagggctacaaaaaagacgaagcgcaaaaaattctctacaacggcggcttggtcatcgacacgcccttggatttaaacattcagaaaattttggaagagaaagtatcccaaaatagcttcttccccggtcgccacaccaacaaaaaaggcattattcaaccccaagtcggcattaccattatggatcaccacaccggtgaagtggtggccatcgtcggtggccgcggcatcggcggcaacaatattttgaaccgggcaaaaaacccccgtcaaccaggttcgtccattaagcccatcggcccctacctcgccctcttaaacaagggcggcactgccggcgacgtctaccgcgatcttccccgacccggcggctggcccaaaaactccacgggctaccaaggttgggccacggtgcgcaatttgattcgcaattcttccaatgtgggcgcctatttagtcggcaagggcctggctccgggagaagacgaggcggctcaaatgatgatcgacaatctggaaaaaatgcagatctccagtttggttcttcccgacgatcaaaagaagtaccccaacatcgatacgatgaaatacaacgacgtgaatttggcctcccttactttgggcggcatgaccgtggggatcagccccctggaaatggccggggcgttcagcaccttccccaacggcgggaaattcattaagcccacctttatcgataaaattaccgataagagcggcaaggttatttacgaaaatcccaaagaagaagtggaaatcacgtccccgcaaaatgcctacattatgacctccatgctggaatccgtcgtaaaaagcggcacggggacctacgccaacttctccggcatgcacattgccggcaagaccggtactaccaaccgcaagcgggacagctggtttgtcggcttcaccccctactacaccggcgccgtttggatcggcaacgacgacaacacgcccctgtgggactactcccgtatggcggccaatttgtggcgctccattatgcgcgacgtccacaaggacttagacgacaagaatttcgacgaaccggaagacggcctgtacaagaagtacatccccgtttcgggctacacggaaatcttcgccgaaggcacttcgcccaagggcctgaaaaatctttatcgcaacgttcctccgaaaccgaaggaagaagataaggataaagacaaggacaaagacaaagataaagacaaacaaaacggcaattccaattcccaatcctcgaaaggcggcaacaaaggcggccaacagggcggaaataacggaaactaattgcctaaagaaaagagcaagacttcggccttgctcttttttcatgggatttgaaatttttcagctctatccacaatttattcataataaaaacacctttcttttttagcacagagtgcaagaaaggtgtttttgttgttcttacaggatatcgacttcttcgccggccagggctttgttcatgcttctgacggcgcagaatttaccgcacatggagcaggtttcttccacttccggggagcggtcgtcgcgaacggccttggcgtgttccggatccatggcttctttaaacatggcgtcccaatccaattcccgacgggctttgcccatgcggtcgtcggcgtctcgtgcgccgggaatgcctttggcgatgtcggcggcgtgggcggcgattttcgatgccataatcccctctttcacgtcgtcggcattgggcagagccaagtgttccgccggggtgacgtagcagaggaaggcggcgccgctcatggctgccacggccccgccgatggcggcggtaatgtggtcgtagcccggggcgatgtcggtaacgagtggccctaaaacatagaagggtgcgcctttacagaggctttgttggatttccatattggccttgacttgattcaagggcacgtgacccgggccttccaccatgacttgaacatccttatcccacgcccgttgagtcaattcccctaagcgaaccaattcttcgatttgaagcaagtcgcctgcatcggccaagcagccggggcgggcgccgtcgccgagggaaatggtcatgtcgtattcacggcaaatatccaaaatgtcgtcgtagtattcgtagaaggggttttcgttgccggtcatgctcatccaggcgaagaccaaggagccgccgcggcttacgatattggtggtgcggccgaagcgctttaattgttccacggtgcggcgagtgaggccgcagtgcagggtcacgaagtccacgccgtcttccccgtgggcgcggatgacttcgagaaaatcttgtgccgtcaattgacccaggtcttttttatgatagatgaccgagtcgtaaataggcacggtgccgatcatggccgggcattccgaggtgagtttccgtctgaaaatcttcgtgtccccgtgggtggataagtccataatggcatcgccgcccagtttaaccgcgtggttcactttttccagctcttcgtctaaattttcaacgtctttggaaacgcctaaattgacattgatcttggtctttaacatggagccgatgcctgtgggatccaagcatttgtgattaatgttggcgggaatggcgactttaccttccgccacccattgccggatttcttccgccgtgcggttttccttttcggcgacgattttcatctcgtcggtaatgatgccttgtcgtgcagcgtccatttgtgttgcatatgccattattttcttctcctaaccatgtgattgatcggtcctcgtcctcgtcccaggtcgagaccgtcagcgattgcatcgtacacgtaattttttgcttcttccacggcccgcacctcctcaaggcccagggccaagtaggaagcgatggcggaagacagggtgcagcctgtgccgtgggtgttgggattgtcaagcatgggcttttcgaagtggtgaatccctccgtcgtaaaagacgtccaccgctcgaccggtgccgtggccgcctttcaccaaaaccgacacaccgtaggcgtcgcgaagggccttggccgctttctcctgatccgccaccttctcgatggccatgcccgtcaaaagttccgcctcgggaatgttcggcgtaagcaaggtggcgcagggaaagaggatggtctttaaactttccatggccgccgctttcaacaggggcgatccggaggtggccaccatgaccggatcgaggaccacgggcccttcataacccgccagttcctcgccgatggtttttattatttcaggggatgagaccataccgattttcacggcatccggcggaatgtctgtgaggacagagcggatctcttgtgccacaatggcaacgtccaaatcgacgatggcctgcaccccggtggtgttttgcgccgtaatggatgtaatggccgacgtggcaaagacccccagggccgtggcggttttaatgtccgcctggatccccgcgccgctggaagaatcgcttccggcgatggtcagcatcgtcttcacttcgccgcctcccacttttgtgccagttccacggctgcggctttgggatcttccgccgaggcgatggcggaaacgacgaagaagccgtcgacgccggtttcggccaaggcctccatgtcctcggccttgacgccgccaccgatggtaatgggcagaggcgaaatggccaccagggctttaatttcatccaaggtgcggtagatgatattgccctcttcatccatgccgcagtcttttttcgtgtccgtttcgtgcaggggcccggcgccgaagtaatccacgtctttaaaattgccctcttgcacgtagcgggtcaaatcccctgtgggcgcggaaaggccgatgaccgcatcgggccctaagtattttcgacacacggacacgggaatgtccgattggcccacgtggatgccgtctacttttgcccccgcatccctcgccgccagcgccacgtccaggcggtcgttgatgagcagggtcacttcattttctttgttcatggatgcgataagatccgatgtgccgcaggccagggcgatcatttcccgtgccgatgcggttttggagcggagctgaatgcaggtgaatcccgcttcgatggcgtctcgaataatgggaagcaccgggcggttccaggtgttttccgggccgacgacgaaatatttttcaatgctgaatgtcatttaaatcgcctccatggggcaggcggccaaatcgtcgccggtgagattggacagggcgtctaaaaaagccaccttgaagctcgccgtgccttccgccttcttttctgctatggcacctgccacattgtaggcattagtcgccgccacagccgccgtaaagggatcggtgaccgaatgataaacggcgcaaacgccgcctaaggagcagccgcttcccgtaatgcgggcgaagtattcgctgccgccgaaggagaggatggtgcgctcgccgtcggtaattaaatcctcttttcccgagacgcacacggcgcctttaatgaagcgggccaaaatttcagccgcttctctcgccgattccacgctttccgtggaatccacgccgcgaaccttgccctcgtcggtgtcgattagatcccacattttcgccagggtaatcacttccgatgcgttgccgcgaacgatggccggcggataatttttcatcccctttaaaagggtggttctcagctcacccatgcctgccgccacgggatccaacacataggcacacaactcgtgtgcagcctttgccgcattgggaatggtttcggcgtgaacgggaatcaaggtgcctacgttaatgtagaggcatttggcgatctgtgccatggtgcgcccctcatcgggcatgtaaaccatggctgcggagccgccaacggcgatttgcgcgttggcgacaaaatcgatggtgacgaaattggtaatggaaggtgccatggggcaaatcttccgtacgtcgtcttgtgcttttttcaaggcattttttaaatcgttcattttgtccttcctttcgagacaaaaaaaggtatcttcccgtgagaagatacctaaaaaaaggccgcccgaaaaggcgggccatgcattcctacgcgagtattaactcacaggttcaaagggtcaggttttaccttctcaacttacaaagttccccttgcgctattcatttaaaaagaccttaccattcagcaaggtctttgtcaaatagtcaacacgacaaataagccgtccctttcttccgaaaagtcgaaaggcggcttatttacgcccgtaggcgcaggtcgatttttttgtcttttgtggcattgagatcatcggccacttacttctcaaggactttttccagcgtgtagcggaattttccggcggatttttttccgtactcgatggcctccacggggcagtaattcatgcaagccatgcagtgggtgcagcggtcgtaccacacgggccgccccgcttcaagctttacattggccaaaatgcagcgcttttcgcattcgccgcagccgatgcaattgtctttggcgtaaaagggccgggcctttacaaacagggcgtagtaggcgccgttaatggcggtgagcagccggccgagaaggcccgcatttttctgccctgcttttttctgttcgattgtgtctgcgattctttcgattgttttatcggcctcggcaatgatcccccgcgcctcggctgccttcggcgcatcgaacatggcgatgtagttttccggcatgatcacttcaaagacgccgccgtagaccaggtttttctcccgtgccattttttcttcatagaccggggcaccgccgatgccggagccgcaggtcatgaccaggtaaagagtctttccctccacctcgatttgatgccaatagtcttccacgatgcggggcaggcgccagcaataggtaggcgtcaccaaaatcacggtgtcgtcatggatagcgtccataaccccgttttttatgcgctcccctatgtccaccgcgtccatacctaatttgtcggccagtttcttcgccacataagcgctgtttcccgtgccgctgtagtaataaatcataaacccctcctatgggagcagtataacatattacaaggtcttcattaggctgcggaggctttttaccgccgcttccggatcgaccgcgtattgaatggcggagaccacgcagatgccgtcaaagtcttctcccttgagctcggggagcgtcttttcgttgatgccgccgatggcataaacgggcaccttcgcacatttttttatggcgcggaaggtctccatggaggtgtgacgggtaatgactttggtctgcgtgggaaagagggcgccggtgccgaagtagcttgccccttcttcttccgcctctttggccctcgccacggttttcacggaagcgccgatgagggcctcatcccctaaaatggcccgggcctctttaatgctcatatcgtcgtcgcccaagtggaggccgacacctaattttttcgccacctccacccggtcgtcgataatgaggggcgtgttgtatttatccgcttctttttttatgcgaagggcccgagcatagactgcctcgtcggaaagctctttttccctgagctggatcaagtccacgccgccttttaaggccgcgaagacgtctgcaaaaaaagcctcttcgtcgtcgtattttgtggaatccgtaatgaaataaagggtcttcataggcgaatgtagtcgtttctcaggacgtagaggccttcttctttcaaatccttttcgatttcatccaaggtgcgggtatcggcgatgacgaattgttcttccccttcgtcttcatcgggctcttcgccgcggcgaccgatgcccgtgtccacggaagcggaaatcttcgtggcggcatagagcatggcctgatctctgaattcttttctttcccgcgtggaaatggtaatggatgcgaagggcaggaagatgcgcatggccgtaataaattgcatgagcttcttttcgccgatgcgattggtattgtccacatcttccgcaccgtgggtggggcgaatccgagggaaggacacggcgatttccacatgggggtatttccgttgcaccaagtaggcgtgaaggcccaggcggaagcaatcggctacgggatcggcaaggccgaataagacaccgaagccaacgccccgcataccgcccatggcggcacgctcttgggtgcccattcggtagataatgctccgcttgtttccccgaggatggtagtaatcgtaaacttccggatcgtagctttcctggaacacggtgacaaagtcggcaccggccttttgcagccgttcgtaatcggcgacattggcgggataaatttcaaggcctacgacgcggaagtattttctcgccagcttcacggcttcttcgatgtattccaccggcgagtagtgattgctttcgccagttaagatcagcacgtcttcgatgccgtctttggccaaagcccgcatttccacttcgatttcatcggaattcagcgccgcccgcttaatgtcgctcttggcgttaaatccgcagtagcggcagccgttttcgcagtaattagcgatgtaaaggggcgagaaggaatacacattgtcgccgaagtattgccgacgaaggccgcgggatttttccatcatacgttcgagatagggttccgccgcgggagaaagcagggtgtagaaatcgtcgggagtaaggcgatcttttctgagcacttccgccacttccgcgccggttaccgtcctttggctttcccgttcgtaggtggaggcaatttctttgggaatggcttcggagatttgatccatgcccggggcgtaatcgaatactgttttaatcatcgtaccctcctcaatcaaagaagtctcttaacggagacgagggatcggcgcctttgtccaggatgcggcccggtccggataaatggcccaagcggcccgcttcaatggccagcttaaaggctttggccatcatgggaatgtcgttggccgtggcgatgcccgtgttggccataatggcggcggcgcccatttccatggcttcggcagcttgggacgggcggccgatgccggcatcgacgataatgggcaggtcgatttcgtcgattaaaatttggataaatgccttcgtggccaagccgcgattgctgccgatgggagacgccaaaggcataatggcggcggcaccggcatcacgcatatcccgagcatagttcaaatcgggatacatatagggcatgacgacgaagccttccttggccaaaatgtccgtggcctttaatgtttgttcgttgtcggggagtaagtacttggagtcccgcatgatttcgattttgacgaaattgccgcagcccatttcctttgccaggcgggcgattcgaatggcttcatcggcattgcgggcgccgctggtgttgggaatcaaggtgacgtgtttcggaataaattccaaaatattcgtcacatccgccgtgtttgcccggcgaagggccacggtaatcatttccgccccggcgtgggtaatggcggcgtcgattaattccggcgcatacttgcccgatcctaaaataaagcgagactcaaaggtcttgtcccctaatttccacgtatctttcatgctaatcctcctattatcagttcgaatacaacttgacactccatggcggcgatggtcatgaccttgggcaggtaacaatccctgcggtcctcgccgttaaaatcccccaccatatgaatgtgaccgaaatccttgcgcttcacagcccctgagggccccgctacgccggtggtacagacataaggtgttctgtggtcttgaaaaaaatcaaaggcctctattttcgactgaacgccgtcataggcctccacaacaatatccgcctcggcctcgatggccttcagcacttcggcgtccacaaattcatcccgcgcctccacacatacgtggggcagccaatcggtgatcttctccgccgtggcctgtacctttttctttcctatatctgaaacgctgtagttttggcgatttaaattcgacgcctccaccacatcgaaatcgtacaaaataagttttcctacgcccaggcgggccaaaatccacgccacttgggatcctaagccgccgcaacctaatacggcgacggtaaaatcctccacggcatcgttgatctcgggcctttgacgcgccaagacgtcttctcgtttaacctccaccggtaaaagaaaacacctccaacatatcatcgtcatcgaccattgtcttcgccatgtccgcccgcttcaccagctgcccgttcatttccagggccacgccacaagcgtcgtagcctgcgcgaatcaacacgtcgattaaaggcgcggggccgtctaatgccacgaccttcccgttaatcttcacggtcacctcctcacaaaataaaaaaaagcacgaaggaactacacccgcggtggtgtaccccttcgtgccttgcactctttttcgagtataacacggtcgcctttccctgacaagtcatataggtgtaaaaaaatcgttcttaccaccttctttcattccccggcctttgattcggctcacgctgcgcccagcggcataccatttttaatggcctccccgcactttcttaacagggtggtgaaagaaaaagcggatcccctcgctttttttcatccgctccgctaaaactgtatccccttctgaaagaagcaagattttcggcgaaaacccaccctctcccacggtcaattaacttatagatcattcattattttgatatttaatcttatgtggagatggcctccccgattttaacgcatccatccgccccccttttttgccttaaataattttctcacagcctctgtcgttataaattttaattttaacaacctgcatttcttgatatttttatgactgatggttttctgcgaaaaaacatttttaaaaaacgtccgtttttttgtaaaaagaggtttaattttttaaaaagaggtgtataatgtattcacaagcagttattcatacttattcggaggtgacttatgagtttagcagatgtactaggtaaaattgatgcgttcctatggggtgttcctttaatcgtattactcgtcggcgcaggcattatcctatccgtccgcaccggcttcgtccaagcccgtcgtttcggctatattatgaaaaatacgatgggcaaaatgttcgaaaagcacgaagttgaagaaggcgccatctcgcctttccaagccttatctacggcactggccgctacggtcggtaccggtaacatcgtcggcgtatcggtcgccatcttaggcggcggtcccggcgccgtattctggatgtgggttgccgcattcttcggtatgtgtacgaagttctctgaagtaaacttggcagtcgcctatcgcgttaaaaccgaagacggctatgccggcggccccatgtactacttagaccgcggtttaaagaaaccctggttaggcaagtgcttcgccttcctggcaggtgttgcctgcttcggtatcggttgttccgtacaatccaacgccatcgccggtacgttgaaatcatcctttaacgttccgcccatgatcactgccgtggtcatcaccgtcgccgcttccgtcgttattatcggcgggatccaatccatctccaaagttacagaaaagctcgttccctttatggcagccttctatatcgcaggtggtttaatcatcattatctctaacgcccacatgcttcccttcgccattcgcgccatcttcgtcggtgccttcaatccgtcggcagtcggcggcggtgtcatcggctacaccattatgttggctatgcgtaacggcgtcagccgcggcgtcttcaccaatgaagccggcttaggttcttcgcctatcgcccacgccacggcatctaccgaccacccgacccgtcaagggatgtggggtgttacggaagtcttcttggataccttcgttgtctgctccattaccgcactggttattattacatccggcgttttggataaaggcataaccgatgcatcggccctcgtatccacggcattcgatatgcacttggccatcggtcgttacatcgtatccttaggcttattgctcttcgcattctccaccattctcggttgggaatactacggcgaaacctccgcccgctacctcttgggcgcaggcatcggcaaaccctacaagctcgtttatatcatcatgatcttcgtcggttgcgttatgaacttagaccttgcatggaccgtcgctaatattctcaatgctttaatggcagtcccgaacttaatcggcttgatcggactttccggcgtcgtcgtcgctttggaaaaagacttcttcaaagacgaccgcaaacggacgtcccctgcagaatacgaacacttattgaaataaaaataactcatactgctaaagacccctcggcaattgccgggggttttctttttggctctataatatccattggggagtaacctccttaatggatatttttgtgcaaaaagatagcacttgttttcctaatcacctaaaattaaatcaccacaaaataataaaggggggcaaacaagtgcaaaacaatattaccacattacttttaggaatccaagatgtcgaggtcaccggtgtttcagaagaaagacgcctgattaccattgattgcaa

SEQ ID NO: 34 - DNA, 90671 bp, Peptoniphilus rachelemmaiella
  source 1..90671: mol_type = genomic DNA
ggatggaagaggcaaagaaaagcgggctaaaggagtggcgccactgcttacgtgcctacaacaactggttcgaggagatcaccaacagctttgattacccgtggagtaacggctacgtggaaggaacacacaacaagatcaagacggtgaagcgcgtggcctttggaatgcgtaactttcatcatttccgcacgaaactgcttttcgtttgttcaaaagataagtgagtgagggtgtgtaggaaaacaaaaaggagcctagttttcactagactccccaatggttgacatagaaccttttttattctccccacaaaaaaagacgcccttaggcgtcttctctttctctcattctcttattatcccttttgctcagtcttccaatacatacacggtgacattgcgtcgaccgaagttgtaggcttctcttcggctgttgtaaaacaggtcgatgcgattgcctttgatggcaccgccggtgtcttccgccacggcgaagccgtaggtggggaagccgtcggcgctttcgatgtagagtttggtgccgagggggatcacgcggggatccacggccacggcgccgacgcgggcacgggtgccggaggcggtccatttgccggcgctgggatcgtaggcggtgcctttcataagaattttctttttgtatttcttaccgtgaatcatgttttccacgggctttgtgcccacttcgacgatttcgtttttgccttcacgaatgacgcgggaggaaaggacgaggcgggcggtttcttcctcgttgacggtgctgatgcgcaccacttcttccacttttccggcctcgcctttttgaatgacgcgctcggtccccgcatcgatttgaggattttcccggcgctctgtggcgtaagccacgtcgcgcacaactttttccgtgcgttctttgtagcgattgatccgaaggatttcgccttcgttaacgctgcctttcatgggcggggtcaccgtgtctttttcgccgagcttgatgttcagctcttttaagatgtcggccactttgttcgacgtggcggagcgggtgtagctgtgtttgccatcttttacggtaatggtgtagcccgacttaatggttaattccgcctgctcgctcagcgcttccgaggcgcttgggaaggggacggtgcctttttcaagctgaatgtctttctccaggagaaactcgccgacggtggcggcgtcggtttcgtagcgcacgggggcaatgcccggtcgattgagggtaacggtttttgcctccgcctgtgcgggcagaatgaggctcacggccaatgccgagagtaggacggtcttttttatcacgatgacaactcctttgtccgaatagtccgaaattagttacagtttgtaactttcacaggctttattgtatcaattgacacatcctgtggcaaggaatcgccgtcgatgtcatctttttgtaattataggagagtttttaacagtttcgccacgccgtacataatttttgccgtcatgccccacacgatttgttctttcttttcggcacctttgtagaagaagatgcggtcgatgtagttgctaaagggggccacggtggtggtggggataagttcgtagggaaagccatcgtctttgtcttttttaaattcgatgggatgcacctcgggctccgtttccaggaacagggacaggggcacagtgaagacgtaggccacttccgccggctcgggatcgatggcggccacgtccacgccgtggagcatgccgataaagcagtgcacgacgatgctctggcgggtgactaaatagtcgctttcgcccaggatttccaaacatgcgggatcgattcggagttcttccacggtttcgcgaaaggccgcttcttccggcgtttcgccatcttcgatgcggccgccgggaagggagacttcgccggtgtggcgcttcaggcgggcggatcgcttttcaaagagcacgtgaagggcgccgtcgatttcgatcaaggtgcacatgacggcgtagcgatgaacgagctccaagggctcggggcgatggttttctaaaaggcgggtgattttttctttattcaatggccaacctctttccgcaaaatagtaaatagagcacgcgatccagggtggtggtgacccggggatggacgtggtttttttcgtctaatgcatttaaaaagccatccacggtgtaaaagggatctttcggcagatgaagcaagctgcctctcgcttccatgaggccgataaacagggctttgtagctgtagtcttcgggcagatccagggccgaggccagggtgggccacagattttccacaatgccccgctcgccgcttcccttggcttccgccaggtagcgaaagtcttccgtgcgggcgaagaagagttcgcttagtcggcggaaggcttctttttcggagatggggtagaaggtgtaatccaggccgtcgtagcccataaggatgcgccgaccgtggcggtagccctgctgcatgcggtaaggcgcgagatcggcatcgaagtgcatggtgtcggcgacggggcgggcaggccctaagacaacggcatcctcgggaaggtgctccccttctttcggcggattggtcctaaggatgacgggctcgaggcctttttccgagaccatcttatagggcagattgtctcccacgccgccgtctacataaagtttgccgtcgattctaacgggcggaaagacggggtaggcgcagctggccaaaatgtattgatggagtttgcccttgggaatgtcgtcaaggtaaaggtatttcgtctttccctcgcttaggctgtagaccacgaggccgtagtctatttcagaggcgcgaattttttcttcgtcgatgtggcggtgaatcaattctttcaagggcgccatgtccatgttcagggcggctcgggcggttttggccatgcgaacaatgtccggcgtctttttcacttcgtccaaggaaagcataagctctctgcttccgtcgaatgaaaatttttgccaaatgtccgccaaaacatcggtgtttccctgaacaataaaagcgcccgttaaggcgcccatggacgtgcctacgacgaggcgaatgtccggatgtgtttcttgaagggcgcggtagaggcccaattggtagctgcctttggcgccaccgccctcgaggaccaagcctttagccattattgatcctccaaaacagcggtgcagtgggggcagcgggtggcttcgatgtgcacggcttccttgcagtaggggcagattttggtggtggccacttcctcttctgtgtggataaagcgggctttcatcttgccgatttgtttaatcaccataaagatcacgaaggcgatgattaaaaagtcgatgatattttgcaggaagtccccataggccaaaatgggcgcgccgctttccgccgcttccacgggattggcgtaggtctttccgtccaatgccacgtagagtttcgtgagatccacgccgccgattaagagcccgattaaaggcataagcatgtcgttgactaaggatgtgacaatttttccgaaggcgccgccgacgataaccccgacggccatatccatgacattgcctctggcaataaagtctttaaattcatttaatgtctgtttcataatgactcctttcgcctctctcctctctcgtgctatactaaatggaaggaggtttgctgtgagaaaatcttgggacacctattttatgcaaatcacggaaatcgtggccagtcgctccacttgcgaccgcgcttttgtgggctgcgtcctggtcaataaagaccaccgcatcgtctccacaggctataacggctctgtggcaggcaatccccattgcgacgacgtgggtcacaccatgcgtgacggccactgcatcgccaccattcacgcggaaatgaacgcgctcttgtactgtgccaaggagggcatccccaccaaggacactatttgttatgttacccatttcccctgcttaaactgcacaaaagcactaatccaggcggggattcgggaagtggtctacaaaaacgcctatcgggtggacgattacgccgtcagtctattcgaaaagaatcatattacccttcgtcagttgccctaaaggtcgcttccttcgccaaggtatcggcccgctcgttgccctccacgccggtgtgggcttcgattttcacgaaggtaacggccaggcgatcttttacggaatcatagaatgctttgtattctatggttccttttttattgcattgccattcgcccttggcccaatgttcgatgccggcgtagtcgtagcaaagcttcatggtggaaaagcccagggcaagggcttttttcatggccacggtggcgcctaaaatttctcccgccacattgcgcatggcggcttcatcgcctgtaaagcggcagctgtcttcccaactgccgccttcccaagccatggacacgccgtagctgtaggatctgtcttcgtggcgatagcttccatccacataggccaccgcgtcgtaggcggcatcgtctttttcttccgccacatcccccatgtatgccagggcttcttcttctgtcttgaaggatttgtacatggcccctttaaaaccatggacctgggccttgcagctgtcccagttgcggtagattcccggcactttccccgtcttcacggcgtaatactttttcataagctcagctcccatgcccggcgcacggcttccacggtggtgtcgtgtttcatggccagggccttcagatcgtcgtattccggagagatcttttccacgtctttataacgggccgttttcgtccccacagggccgaggacggtcatggtttctttcgaccctcggggcaactcgattttttctaagggaatctttttaacgcccaaggtggtggtgtgggtaaagagcgcatccagcaccttgccttcgcaggcggcgtcggtgagcacgtccaggcgatagcccgggcgatttttcttcataaatatgggcgtaaagctcacatcccgcgccccggcatcgaagaggcgctccatgcaaaagcccatggcctcgccggtcatgtcgtctaaattgcagctgtagaaaatcggcgcacgggcttcttctgtctcgatgaaaaagaggcggagcacattggccacgtcgtgatcccttgtgccggcgccgtaagccactttcaaaacgcgcccctcgggccgagggcggtaggcggcgcgaatgccctttaaaatggcggcgcctgtgggggtggtgagctcttcttccacggcctcgccgcctaagggcacatccagggtggataaaatatgggccgtggccggagcgggcaccgggtaggtgccgtgggcacaggtcaccatgccgccgccggtgttgattttgcccacgtaaacggcttccacgtcgcttaaaatggtgtagtaggccgcgcctaacacgtcgaccacggcatccaattcgccgacttcgtggaaatgcacttcgtaaagatctttgccgtgaacggcggcttccgctttcgccaggggcaagtaaatggccttggccagctccttcaccgcctcatcgaagccgctttggtcgataagggccagcatgtggttgaggccgcggtgatgatgatggctatggtcatggtcatgctcgtgctcgtgatggtgatcgtgatggtcgtgctcgtgctcccaatggcggctttcttcgctttttaaattaaaataagtggcgaggatccccgtcttctcccgcttttcgaaaatcacatcctcggcggcgatgcccagaggcatgaggccctcgatgaagccctcaggcgacaggcctccgtccaccatggcgccgataaacatattgccgctgatgccgctgaagggatcgatgtaaagcacccgcattagtctttcaacccttcgttgccggagccggagcggaagcccaacacgtccagtgccgtgtaggtcatgcccagctccttgaaataggccgccacatctttccggtgattaatgagaaacttttgaaaatccgccacaggaatttccacccgcgccacgcttccgtgaaggcgcatgcggcaggtcatgtagcccaactcgtgaagataagcttcccctttttccgctacggccaatgcctcgatggtaagcggcgtgccgtagggaatccgtgtggccaaacaggaatccgagggcttgttccacgtgggcaggtcgtagtattttttcgaaagagaccgcaccaattccttggtaaggcccgcttcccgcaaggggctcttgacccctaattcctcaagggcccgaaagcccggccgatgatcggaaagatcatccagatttgtgccgtctaaaagcacatgaaagccacgttccgcggcgtatgccttcaccgcgagaaaagccgatcgcttgcaataatagcagcgatttaccccattggccatgacatcttcgtcttctaaaatactggcgttgattacatcaatgtcccagcccatcatctccgccaagacatgggcgtcgaagcgctcgcgtcgggggtggagttcgttgaccacgtaaatcccaataacattttcgcgccccaatacttccgcggctacggccattaaaaaggacgaatccacgccgccggaataggctaccgccaccttgtcgtaggcggcgagattttctttcaatcgattgaaggcatccatttcctcaccttttcatcatagaaaaaaaggcccttgcgggccgattttttatttttcttgttcatctctcgcgatgcacgcttgtacggctgtgatcaaagacaattgataggtttcttctttagtacaaccacgactcaggtcgttgaccggcatattcaagccttgaagaatcggaccgatggcggtaaatccaccgagacgttgagcgatcttgtagccgatgtttccgcattccaagttcgggaagatgaagacattggcattgccggctacctcggaacccggtgcctttttcttggcaacttcaggatcgatggcggcgtcgaattgaagttcgccgtcgaccttaatttccggatgggattcctttaccaaataggtagccacttccaccttcttaaccgagtcgctctttgcggagcccttggtggagaaggaaagcatggcgattctgggatcgaaaccgaattgttttgcggcttcgtcggtggtgacagccacttccgccaaagtcggtgcgtccatttccgtgttaatggcacagtcggccatgaggtagcattctttgcctctgaagagaatgaacacaccggatacgcggctgacgccttttttcgtcttgataatttgcagggcgggaagaatagtttggcccgtagtgtgaacggcaccggaaaccatgccgtcggcatagcccgcatataccatcatggtacccaggtagttcgggtcgtgaagctgtgcgcgggcacgggtttcgtcgattttccctttgcggcgttcgacgaacttttcaaccaattcatcgatgtgttcgaattggcccacttccacgatttccaaaccggaaatgtcgatgttttctctcttggccgtggcttcaatttcgtttctgaaaccgatgacgatggggtggactaagccttctttttggtgctcaaccgctgcccaaagaactctgggatcttcaccttcggggaagacgatgcgaatccctttatgggtgactcgagtgtgtaaatattgaatgaaagccatgttattcctgttcctttcttttcaattagaaaatcattctgtacattgccttggccacagagggccacagtcataataaatataccacataaccggcctgtgacaaagcattattcgcgacaaaaacctaaaaaaagagactcgccgaagcgaatctcgatctggtcggagtgaaaggatttgaaccttcgacctcatgctcccgaagcatgcgcgctaccaaactgcgctacaccccgctgtaaagtaagtaattagtggtcggggtgaaaggatttgaaccttcgaccccatggtcccaaaccatgtgcgctaccaaactgcgccacaccccgctgcaacttacttacctattatacagggattgtcatttttttacaagcccttttcttccgcgccctctctcgacggtccgtgccattaaaaaaaacagccattgaggacacacgccccaatgactgtttcaaattcatttttaccaaaactatggtgatgctcttttataaatcttggcccagcttgtccgccgttttcatggcagcgaccacatcgcccggagtcacttcaaagggcatattcaccatggtgtcgccttctgcgcacgccagttcggctgcttccagaagtttttcgtcgcttacattgtccatgcccatgtctttgaatgtcgtcggcagacccaagtccctgcagaattccatgatctcataaatatcttcaaggtcgtcattttcaagtaccatttggcagatggtgccgaatgctactttttcaccgtgcagcaaatcgtgggtttcttcgataaccgtgagcccgttatgaatggcatgggctgccgccaaaccgctggattcaaagcctacaccggataaataggtgttcgcttcaataatgttttcaagtgctttggttacaaccttgttttcaactgccgcctttgccttcaagccgtcttctaaaagcgtatccaagcacagggtggcaagggcaatggaggcctttgtggaatggccgcctgccatggtgacggcattggatttttcacaagccatggcttcataataggtggccagggcatcgccgataccggcgacgagaagcttcaccggtgcattggctataacatccgtatccatgatgaccatgtccggatttttgttaaggggcaggtaataatcgaattcgtgatcttccgtgtaaaccaccgataatcttgagcaaggtgcgtcggacgatgccgccgtgggcacgatgaccatgggaatcttgctgtaaaaagcaatggccttggtcgtatccaacgtcttgccgccgccgatgccgaaaatgacatccgcatcgcctaattggtcttggtgctttttaatttcaacatcggaacattctccgccgaaaagaacgacggtgcaagtcatgccattgtccttaaaggacttttcgatgtccgctttatatttacggttcgcagaattgcctgtgatgatgtaggcattttttgctccgattcccttgcagtagtctgccaactttttaatggcgcccttttcttgaatataagaacccggcgaacagattactttgctcattgaaattcctcttttctatattcttttgcaagaaactttgactgatttcaaaggttcctccccgtgataacatcggcgtgccgctttttcaattgacatccgtcgcccaatcggatgcctccttcccaataaaaaaagacagccaaattgccatttagcaacttcgctgcctttttcctatggcggacccgattggattcgaaccaacgatctttgccttcggagggcaacattctatccagctgaactacgggtccatacccgcctattgtatcaagggggtatttttctgtcaagcggccttctccatggcgcggaacacgtcggccataaggtctctgtaggagagaacgggattgggctttttaatgtcttctttgacatagaccttcgcccgagcgatttcttcgccgttacagatgaagcgcgcctcgcctacaggttcttttttggagtagggcgcgacgatggttttgtagtcgatttccgtgcttacctcggcgccttctttgacgcagcgaacgacatttttatccacaaagaccgggcttgttctcgggctcaccgatttcagtgtcagataatccagctctttggatttgtcggcgaggattgtgtttcgccacgtcatggcttctttcgacaggcgcaaggaggcggcgtagcgatccatgtcgttttccgcgcccatgtagacgccgatgaagcgggtgttcagatagggcccttccgccggtcgggcaccggtggcgatgaggcatctgccggcggcgccggtgtagcctgtcttcaatccgtcgattccggggagaatcccgagaaggggattggtggcgtagctaacgtaggctctctccggttcgtcgattttcgcccggcgggcggcatcgaggatcatggggtagcgggccaaaaggcttctggaaagctgaaacatttcccgtgccgtggctttgttgtagtcgttggcgacataatcggtcaggccgtgaacattgataaaatgcatgtgggtaaagcccatttccttcgccttggcgttcatgcgggccacaaaggcggtctcgcttccggcgatgcgatcggccagggcgagcatggcgtcgtttcccgagacgatcatgccggcatgaatgagctcttcgacggtgtagacttccccttcttttgtcttgtagacgcttccgtgcatggctgccgccgcgtggtcgatggtcaccggatctttcatggcgatttcgcccttgtccacggcgtccatgacgcagtagatggtcatgagcttcgtggtggaggcgaggcccaccggggtgtcggcgttaaattctttgtagatggtgcctgtttcgtagtcgccgatgatgtagctttttaaaaggacgttgtcgggcttggccatggcggcgtcgaattcttttttctccgtggcggtcataggctgcaccccttggcccgtgcggattttttctttttgatcccgcggctccgccactttttccccgggcttttgcggcgcgttttccgcaggcgcaggggccggtgccgcacctaaaagcagacacattgccaaaagggcggggaggatgggcttcaatgctttcaccgactgcaccccgctttttcgttgttcagaataatatccacgatgcgctccgccgccttgccgtcgccgtagggattcagcgccttggccatggcgtcgtaggcttttttatcttcgaggagcaggcggatgttgtcgtacaccgccgcttcttccgtgcccactaatttcgccgtgccggcgataatgccttcttcccgctccgtctcttcccgcaccacgaggacggggatgccgaagtggggcgcctcttcctgaatgccgccgctgtcggtaaccaccaggtagcttctcgccataatgtttgagaagggcaggtagtccatgggctcgatgcggtgaatgtttttcgcaccgcccagttccgcttcggcgatttcccgcactttgggatttaagtggacggggaagatcacttccacctcgtcgtattcgtcggcgatgcggcgaatggcggagaagatccgcttcatgggtgcgcccaagttttcccggcggtggcaggtcaggagaatggtctttttctttttaaagtcgatggcatttaaggccgcctcgtcgaagacgaaatcctcacgctccgtgtaggccaaggcgtcgatgacggtgttgcctgtaatgtaaatggtcttgtcgtcgtagccttctcttaaaaggttttggcgattggactccgtgggggcgaagtggtaattggccaagaccccggtaagtttgcgattggcttcttccgggaagggggaatagaggttgtggcttctgagccccgcttccacgtggccgatttttacgccgtggtagaaggcggatagggctgcggcaaagacggtagacgtatcgccttgcacgagaaggagatcaggcttggtggttttaaatatgtcttccaatccccttaaggagcgcacggcgatgtctgttaagctttgaccgggggtgaagatatctaaatcgtagtccgggacgatgccgaagatgtccagcacctgatccagcatttccctatgttggccggtgacggcgaccaagctttcgacatcttctcgctcttgaagggccagaacgatgggcgccattttaatggcttcgggccgcgtgccgaagacggacagtactttcaattctcttcctctctttcatttaacagacccaagaacagggccatgatccctaccacggcaatgatgagaattgacgtgatcaggccgtttttttcgtgcatggtgcttacgatgtttccgatgatgccgaagatgatgctcacgccgtaaagagcgaagacggtctgcttttgattaaagccgtggcgcaggaggcggtgatgcaaatggcccttgtccgcctcggaaatgctttttcccgaaagctttcttcgaatcatggcgaaggtggtgtcgaagaccggcacaccgagtattaagacgggaattaaaatcgtaatcatggccacagatttcataaccccttcgatggccaaataactcagcgtaaagcccaaaaacaaggcgccggtatctcccataaaaatcttcgccggattaaagttgtagggcaaaaagcccaggcagcttcctgccaaaatggcggccaaagcggccatttcgtcgtgatggagccggtgggccacaaacatgaggctaatggatgcgatggcgctaatgcccccggccaacccgtcgaggccgtcgattaagttaatggtgttggtaatgcccacgacccaaaagacggtaatgggtatggcgagccaatctaaattgatgaggagattggtgccgtaaaaggggtttgtaaagaaagtgatctttacgccgccgaagattaagataatcgccgccaaaatttccatggcaaacttggccttggcgctcatggcgaatttgtcgtcgtaaaggcccgtggccacgataagggtagcccctgcgagaaaggccgctttttctccgtttacgggcagaaagatcaacacgctcacgaggacggcgaggaaaatggccaggcccccgcttaagggaatggcttttttatggaccctgcgctcgtctttcgggatgtccattaagccgtagcgaatggcgccttttcgaacgacgggcgtggcgattaagctaataagggccgcgacgagaaagggccataacaatgtcttcatgcttcacctactacttcgttccgaaaattcgatctcccgcatcgccgaggcccggcacaatataggcgtgctcgtctagtttttcgtcgatgcacgagacgtacagatccacgtcgggatgggccttttgaaaagcttccaggccttccggtgccgctaagaggcacagggcgcgtacggatgtggccccccgttgtttgacgaaatttaccgcggcgaccaaggacccgccggtggcgagcatgggatccacgacgatgacttcccgatccgcaatttccttgggcagcttgcagtaatattccacaggctccagggtctcaggatcccggtagaggccgatgtggccgacgcgggcgccagggattaagttcaacaggccgtcgaccatgccgaggcccgcccgcaggacggggacgatgacgggctttttgcctgccatttctttgcccacggtacgacccataggcgtttcgatgagcttgtcttgaatgggaaggttgcgcgtcagctcatagcccataagcatggtgatttctgtcaaaagttgtctgaagtctttacttgatgtagaggcttctcttaaaagagtgagtttatgttgaattaaagggtgttcggttaccgttacttttcccatgtttcctcctcgatcatggctacacggcgggcatggcgtccgccttcgaaagctgtttctaaaaatgcgtcggcgatttctttcatcatgtcgccgccgatggttctcgcccccatggaaatcatgttggcgtcgttgtggcgtctggaaagctcggccgagtagggctcggacaccatggcgcagcgaatgcccttcactttattggcggccatgccgatgccgaggccggagccgcaaattaaaatgccccgctcgcaactgccgtcagccacttttttcgccgcggcttttccgtaaatggggtagtccacggaatcggtggaatccgtgcccacatccacaatggtgtggcccttttcttccaaataggctttcagcatttcttttcgtctgtatccgccgtgatcggcgcccatggctattttcacgcccattccccctcacatttgttttttatttcttccagtaagcggtctttgctcagccgataaatttccaaggatccgccgaagggatcgatgatgtctttttcggcaaagggttgaattttttccttaaaggccgggtagccccgctttaaattggcggtcatggtgtgggtcatgccgtagactttatccgcccacataagatcgtcttctgtcacggtcttcgccttgtggaaggtggcgttaatgccttcttccgccataaccttcagggcgcctacgctcatggcttcgccctcgtgggcggccatgccccgggagcgcacggtcatattcagcccccgcttgtccgcttcaagctccgtcaagagcttggccatagggcttctgcaggtgtttcccgtgcaaatgtaaagtatgttcatagtcccaataccacctttccgccacaggcctttaagagccggttcataatgccggcgccgatgccgataaaatcgaagccttcgacaaacaggatgtcgacggcttcttcgtcgcaacgcctcaagctgtcgaagagattgtgggccacatcttccaaatggtcgcgactgcccatgtccaccaaaagatccatgccttcgtagaggtctttggtttccgtcgtgcagagcaccgccgtcttcttgccgggcgccacgtcggcgaggcgccgattgatttctttggcgatgttttttaaatccccggcaaacaaggtgccgtcgcctttcggcgcgtagtggcgatacttttgccccgggctcttcggcacggcgtcgttgtccgcgtcgatggtggtttcgtcaatggccacctcgccgataatggcttccagatcttctttcgtgatgccgccggggcgatagatcatggggggatccacggtcacgtccaagaccgtggactcgatgcccacattggtgtccccggaatccacgatcatgggcaccttgccctccatgtcttccaatacatgggaaaggcgagtaggcgacgggcgacccgaggtgttggcgcttggcgccgccacgggaatggccgccgcctttaaaagggcgtgggcaatggggtgcgagggcatgcgaatggccaccgtgtccgctccggcggtgacgctgtcggagactttttccgatcgctcaaagatcaatgtcaaaggtccgggccagaaaacgtccatgcaatccttgcctttcggcggaatcaccttgaccagatccaatacctgttccggatcggcgacgtgtaggatcaggggattatctttcgggcgccctttggcctgaaaaattttatccacggccgattcgtttaagccgtcggcccctaagccgtagacagtctccgtgggaaagatcaccagctccccttctcgcaagaggcgcgcggcttcttcgatttgctccctatccttttcatccgttatgtgtaagactttcgtttccatggcttcctcctcaacagatcattatatcatagagggattctccttacatttgctctaaaaaatccaaggtcatggccatcatattggtggtcaccacatgggaggttccttcaatgatttcaaagaccaggggtgcgtcgccccggtgttgtttttttattttttcgtagtaatttttttgataggcggggtttaccacatcgtccaactcgccgtttaacatgcaaatgcctttgtcttcgtgcttttcgatgtgattcatgggatcgtaggcctgtgccccttctttgtaagggccgatggccaaaggtgcccagtcgcctaagccgtttaaggcgatgccccctgccacttcatcgcgggccaagagccccatggcggtcatgccgcccatggagtggcccgccaccacgatttttttctccgggaagcggccgcgaacgcaggcgaggatggcgtcgaattccttcatgttttcgataaccacttccggaagcttttgaatgtcttcgtaatcccagctgccccgcgccccgtgaagagcctcttccacgacgaggacgggataatccgccgccgcccaaatgctcgcgcggaagcgggagctttcgatgtcggagccccagccgtggtagtagatgatgactttatctttcgcttcggcctccggcaaaacccagaggacgggaatggcgcctgcaaaggacgcttcttcttttacgtgtaagtacatattacctccagtccacaggcgcctcgcccatggcgattaaatactcattggttcttgaaaaacatttggaaccgaaaaagccccggtaggcggataggggcgagggatggggcgattcgatgatggcgtgggcggaattttttatgagccgctttttgctcctggcgtgggcgccccacaagataaacaccatgggcttttccctcgcgcctaaaagctccacgattttgtccgtaaagatttcccaaccgatttttccgtggctcatgggctgggattttctgacggtgagggtggtgtttaaaagaagcaccccttctttcgcccaggaagttaaatcgccgctttctcgtgtaatgcccaggtcgtcttttaattctttgtaaatattcaccaaggacggcggcaggggaaagtccgccggcacggaaaagctcatgccctgggcctgtcccggcccatggtagggatcctggcccaagagaagcaccttcgtgtcctcgaaggaagtgaggcgcatggcgcggaaaatcgcctcggcctcgggatatatggtttgcgtcttgtattcttcgattaagaggcggcgcaagtccttgtaatagggcttttgcatttcctctttcaataaatcgtcccagtcgtttgaaaaggtcactctatcctctttcttcgctacatggaaaacagttccgtcaggaagcgcttagccttcctgcgaataaacttctgtaaatctccggcacgttccggcaagaggaagaggattaaatggtccccttcttttaagaccgtctgccctttggccaagacgctttttccctcccgctcgatgccgccgattaagaaaccttcggaaagtcccaaagactcgatggtttttcccgtggcgtaaacatcttcgcttaagacgatttcgtagatttccaaggtgcccgggaacaggtgcagggagatttccggcgggccgaagagattgtttttaatctgttgggacacgaggagctcgccggagaaaatgcccccggtgtgcgccacgtccaccacccgcatgtagcgttcatctttcaaacacagggcgatgtgctcttgccccgcatctcgcgccgccgtggccacgaggaaattgtccgcatcgtcgtcggaagcggcaacgacaccgtcgtaggcggcgatgtcgatgtcttccatggcttcggtgacgggccggtcgatgacgtagttgacgccgtagggatagtgtctgcccctggaaagcagaagcgtgtccgcttctttggccagtgccgcctcaatgctttgggcgcctttgccgtcgccgaaaaccaaaaagcgccgcttgcgctcaaggccttcgaagacatccactttggcgtagcgccggcggaagcgacgcacggcttcggtgctacctaccatacgcagcacatcgtcggcttcaatgacggtgcttcctttgggcacgatgatttttccgccgcggcggatggtaaccagaaccaattcttccaagggaccgatgttttttacccgccgccccacaaaggccggattgtccgccacgtcgatttttaccatggcggagtcgaagttttcgaaaatttccgtctgcatgcccgcctcttcataaaagaagtggtgcacgcgtcccgccaaaatgctgccgtagtcgtagacatagtcgatgccgaaggtggacttggttttttccaagagacgccccagggcgctgtcataagcgatgaagtgaatggacccgcctcgctttgataaaagattcgccagagccaaggtgcgattggaatcgtcgcaaaagacgaaggcatcggttttgtcgaaatccatggccaaaacatcctcttcgtcttcgtaataatgggcgtgaaaatccctgagggcttttttcacttgtttctcccggcgaataaaaaattccaccgtatgatgttcccgaaccaaagcattcgccaagagacgcgctccggcgccggttccgatcatggtaatgtgcatagtgttctcctaattcatgtaacgattgccccgttgcggcgcaaagagggcgaggatggtgaaaaattccaaacgtcccaaaagcatgagggccgaaaagagcagtttataccccggcgcaaattccacaaaggtgttggtaggcccgacgccggaaaagcccggccccacattggacaagcaggttaaacagccggaaaaggccgtgagaaaatccacgcctgaaagggccgtgaccgccgtcgaggcgcctaaaagaatgatgtagacgcagacgaaggccacgatgccgaagataacttggtcttccacgatttttccgttgacgcgaacgggcataatggcgttggggtgaatgctcttcacgatttcccgcttcacaattttccacaggaccaagatccgaatcaccttcatgcccccggcggttgagccggcgcaggaaccgaaaaagtacagggcgagcaaaatgcatttactgaagcccggccattgatcgtagtcggaagaagcgaagcccgatgtggaaataatgctggtcacttgaaaaagggattctctcagccccaggcccggggtcatcttcttcgacaaaattaaatttaaagcgattaaaatcacggcaccggccacgatttttaaatagaggcggtattcttcatctaaaaacatctcccgccagcggccgccgacggcccgggagtagaggctgaagttggtgccgcagatcaccataaaaacggacatgatgattaaaatggcggaattgtcgatgtaggcggcgcaggaattggcatgggaggaaaagcccccggtgcctacgacgcccagagtatgtaccaccgcgtcaaaaacattcatgccggcaataaccaaaagcacgaagagcacgagggtaatcagtaaatagattttgtacagggccttggccgtgtctttcatgcggggctccactttccccgccacgggacctggggtctccgccttgaagatgcgaaagccgttgcttcccactctgggcaaaagggccagggtgaagaccaaaatccccatgccgccgatccagtgggtcatgctgcgccacaggacgatgctcttgtcgacggcctccacattgggaatgaccgaggctccggtggtggtaaagcccgacaccgtttcaaagagggcgtcgatgtagttgggggtgccgccgcctaagtaaatgggcacggcgccgatgagggaggcgcagatccatcccacggccacgataaacaggccgtcgcggccgcgaatgcgttcatgttttcgcggcatgaaaaacaacaccgcgccgacgacgagcgccacggcgatggcgatgagaaaggcttggatgctgccctctccccggtaaatgccgtagagaaggggcggcatgagaaacgccccttccaccattaaaagggcgcctaaaacattaaacgccgctccaaagttcattaaataggcctcctgattccgcattgtagaagtaatttttcatgacgtggacactttcatgcttgcagaagacgatgatccggtcgccctttctcaagcaggagcgaccgtttggaataatcacatcttggccgcggacgatgacggcaattaaaatgcccttgggcagagacagctcggccagcggcgtatccaacacctttaaatcctcgtccagctgaatttccgccacttccatgttgccgtcgtacatgagattaatggccagggcgtcttttccgcgaatcaattttaagatcaacgacgcggtaataaagctgggattaaaggtggcatcgagattcaagcggtccaagacgccgatgaaattcacccgggaaattttggccacggattttgtaatgccctcttctttcatggacagggccattaaaatattggtttcgtcaatgcccgtggcgccgataaaggcgtcgtaggaatgaatcacttcttcttccagcacattaaagtccgtgccgtcgccgtgaataaccacggcatcgggatggcgctctttcaaagaaatggccttgccgtgatctttttcgatgaccaagacgtcgatgttgtcttttaacaaaaggctgcacaaatagtccccgagcttgccgcctcctaagatcatgacgcttttcgtgggcttcaccgccgtcaccttggagtgatcccggtcgaaggcgtcgatgtttttccgcgcgccgatgaccaaaatcacgtcattttccttgagcatggtgtccccggcggggataaaggtgtagcccctgcgggagacggcggcgatgaggagattgtctaaattgtttaagtccatgagctttttgttcacgaactctttttcctgacccacgttaaattccacgagctttaccttgccgccggcaaattcgtcggtcatgagagagtattttttcagcaaatacttttcgatggccatggccgccgcccgctccggattgatgacatagtcgatgtccagctcctctttaatgaggcggatttgggagtgatacttcgggtttcgaatgcgggcgatggcctttttgcagcccagctttttggcgatgctcgttaccaatacattggactcgtcgctggtgaccgtgccgatgattaaatcgtagttttgaatgtccaattccctgagaatagtaaagtccagggcattgcccaacaccgtcaacacgtccaactcgttgttgatcttttgaatcacccgcgggtcgttgtccagcacggtaatctcgatgttttcttccactaaagagcgggcgaggcgcatgcctaatttgccgccgcccacgataagtgcgcgcatgtcattgaccgtccttttcctcggaagatttttgtgccgctttggctcgctttaatttttccggggtaatgtcgttgccctcttcatctaaaacggtcgtatttaaaagctgttgtcgaaagccttcgcgaaagagctttaaataggcttttctcaagcgatctctctccgccacctcttcttcggtgagctcccgtactttggcttctcgcgccaattcattaatacgctttaaaagttcatccatcttttccaaggcgacctccttatacagattcttgttttttcgatgcggtatagtacaataaacgggaaggatgtgacaccatgattcgatgcactatgcgagctaccgccggtccgccggctgccatggcctacgctttttacgacgcggacggcctaatgattttacaaaacaaggacgatgctctcgtcgatcaattcgactacatcctccgcgaacttcccatgataccctatactctatcactaattgatgccgatggaaacgagcgatttcgcctggagcgaaaaacgccgcctccctttcaaacccatgccttccgcctgtctttcggcggcgaggtggtggactttttcgaagataaaacccgcttttcgcttcccaacctcagctttaactacagggaaaagaaatacgacatcgtgggctttataaggaacagggaatttttcatcgaagcagatgaattaaagcttatgtctatgaaggcgagccccattgccggcggtaaagaatacgccgtagccatttacgaggacgcccttcccctggcggtgtatttcgccgccgtcatcgtcatggacatttgctttcataattactaaagaaacgaggctggaatgacagatatggaaaaagaccgcatcatcattaaaacaggggccgtagtggatcccgcggcgaaaattacggccacagcagattttcccgccgtcatcggcgaatacaccatcgtcgcggccggtgcggaaattaagggcgcatccatcggcgcctacgccaccgtgaaaagcggtgcatccgtcggcgaaggggtctatgtaggcgactttgccgtgcttaacgaaaacacccgcctccccgacggcgccaaggtgccttcccgcgccgtagccgagggcgatcccttttccatcgtgcggggcctcaccaaagaagaattggatgcggccaaggcacgggctagcgaaggtctttaaaaaaagattgcatcagcgcccggcacgcttcgcctaacacgccctcttccaccttgactcggtggttaaaggcgcgaaaggccgcaaggtttaccacgctgcctgccgcaccgaagcggggattgtccgtgccgattataagcctgtcgatgcgactgtttaatatggcgcccatgcacatggggcagggctccacggtgacgtaaaggtcgccgccgatgcgccagccttctgtggctttgtcggcctctttcagagccagaatctctgcgtgatgcgtggcgctttcgtcggtctccgtgcggttgtggctacggccgataatcacgccgtctcttacgatgacgcaaccgatgggcacttccccaatagcgtaggccttcttcgcctctttcaaggcttcgttcatgtaatacgaatccattcccattcccctttctttcttctatcctaccacggaaaggagcctttaatgaatatctatatttccttcgacatggaaggcatcggcggcatcgaccgcttcagcgacgaattcaaacgcaccgccgcctattcgcaggccattcacgcccactttaaggcggtcatcgacggcattcaccaaagccggaaaaataaagacatcgaaaccattaccgtcgccgacagccacggagacggcaaaaatctggattacctcgccctttcggagatggacgagcgcatcgagctgatctccggctacccccgtggcgaatacatgatgagcggtttggatcgccacgacgtggtgatttttctcggctaccacgcctcctgcggccagcaccgggccaatatggaccactgctattccacggcctttcaccgggtgagcattaacggcattaaatgctccgaagctatgattaatcaaatttacgccaaggaaaagcacattcccgtgggcctgattatcggcgacagcggcctttacagccaattgattctcgaaggctatatgccctatgtggaatacgtggtgacgaaagaaagcctggggcacaatgccgtcgtccaccgcaattttcaaaaggtgcgggcggaaattacggaaaaggtggccctggttttggacaaggatctctctaccttgcccctcggcgatttaaccgccccctacaatgtcaccatcgaaacagacaccaccctcacggcggacatggcggaaatgctccccggcgtggtgcgcctggacggctaccgcatcggcatgagtttcgattcgggcaaggatttactcaacggccttatggcgctggaagtgctcgcacgcaaataaatgcaacaaacagaaaggaacgctatgaaagccatcgcattcgacttcgacggaaccttaatcgactccatggggatgtggcgcaatttaggccgcaatttcgtggagtccaagggcaaggaatacaccgacgccattcacgatcaaattaccaccatgagcttaaaccaatccagcgccttttttaagcgggagctggagcttgaggagacgccggaggaaatttttaacgaaatgggcgccattttgctggacggctacggcaaaacccttcccttaaaagaaggcgccttagaagccattgaaaaggcgcggcgcctgggcccggtggttcttgccacggccacaaacgaagagcttttaatgcccgccttgcatcgctttaaattggatcgtgccttcgatttcatccaaacctgcgacggcgtgggcatagagaaaagcgacatcacctactaccacatcttggcgaagcgcctcgaggtggcgcccaatgaaatcatcctcgtggacgacgcccactacgcgctggccgccgccaaagaagcggggctttacgtcgtggccgtaaaagacacctacaaccttccctaccgggatgccatcgtcaaagaaagcgacgtgctcctggacagcttactggattttgaaccggagaggtatttttgatttactatgtactgaagatgacccctgtggtggtcttcctttccttctgttccttttcactgattcgcgcccaacttttttccagacaaaaaaagaagagcaatcgcaaacgggagcgactgctcatcgccttttccacctactgtttgtggctgttgtcttttcttttcgtcggcaacgagcgcctggaaatgggcggcgtgatcttgggcatcgacacagccctcgccgattggaagctgaatttaattcccttcgccaccatcaaggccttttggcgctacggctcctttacgggcatgtttttaaatattttcggcaacattctcatcgccgtgcccctgggcttttttaccccggtgctctttcggcgaatgaggggccgccgatccaccctcttgctttacgccggagtctttctcctcgtggaaaccttgcagtatttcaccggcagaagcgccgacatcgacgattggctcttaaatatgctcggggtctttttgggctttctgctttctgaaaaaccgcaccgctttcccccgacgatctaccgccgctagcacctgagggtgctttttttcttgcttcttgtttcttttacgtcctttttttataataagggcgaggaggtttctatgcgaaccctattgacaaaagtgcgggtgaatccggccaatcgtgtgcaggtggtgaatgcctacttggcccaggcggacacggatttcgccctggtcatcgacgtaatcaataacaccgacaaaaccgtcaccctcttaaaggtggacgtgctttttattaatgccttcggcaaatttattttcgacgaaaccgtctttcaccacagctacgagcatctggccttaaagcccaagtccctgtcttaccttccctactggattttagacgagcgccaccacacggccaggggcgtgcgcattcgcatatcggaagtgcattttcaagacggcacgagaaattactacgaccgcaccaaggaaatgtcctataccgtgcccacggtgcccaaggaaaaaaaggacgagctgaaaaagctcttcgggccggacttttacacctacggcgaaaaaaacggcaccatgtggcgctgcatctgcggctttaccaatggcgaggaagacaacatctgtcgccactgcagccgctccaaggacttcgtgctctcggcggtgaccgagcggcaggtcaacaaaaagctctttcagctttacgtcaacaaggaccgagatttcgccaatcgggccacggcctatgaggagaccattcccattcgccccttggatgaaatcgatttggagcggggcctggcctcggcggaaaggccgtcgaagagaaaaggcgccgccctctttctcgtcgccgccgcggcggccattgccctcaccctcttcgcctttcgcatttacgacggggtgaacacgaagcgcaattacgacaaggcccaaagctgtatcgccatgggcgattacgccgccgccgaagccatttacgacgatctgccgcccacggtggacaatgtggacatggccttaaagattcaggagcttgaaaccttaaaggcctccgacgcgtcctacaaaaaggcactggccctttcccgcgcaggggacagcctggccgcctacggtgcctacaaggaagtggtgaaggaagaccgcaccaattacgccaacgccaaggccatgatcgagagcatccaatcggaagccatcgcccgagccaatcgctacgtggaagagggcaacaaaaaagacgccgaggaactcctcgacgccttcctgacgttggatccgaaaaatgtgcggctcttgcaagcgaaagacgctgtccttaccaagtcgcttcttcgggaatcaacagcgcgcaaataatgtagaccaacaggccgctcccgccgcctaaggcgaagagaacccatagaacccgcacaatgttggagtcgatgccgaaatactcgcctaagccgccgcatacgccggcgaaaacgcgatcggtggtgcttcgtctcaattcttttttcataatatcctcctgtctcaatcactatgtgtattatacccgaaaaggcggtgaatcatgaatacaaagcaatacaaagtccccgaaaaaacaaagatccatctaaaagattacgccacaacctacgacgggccgctggataaaaaagaagtgaagaataaacttctgcccgataatcttcgtgccatggccgcgttgcaagacgccctctacgccgaaaacacccggggcatcgtcgtggtccttcaggccatggacgccgcgggaaaagacggcctcattaaacacgtctttacggcccttaatccccaaggcgtaacggtaacgccctttaaagtccccaacagcgaagagctggatcacgattacctgtggcgcatcgcgaaagccttgcctcgccgcggcgaaatcgccattttcaaccgcagccactacgaagacgtattggtcactcgcgtccacgatttattgaaagaatcccccatgccgaaggacttggtggacgaaaacatttgggctcgccgctttaaggagatccgcgccttcgaagattacttaaacgacaacggctttgccgtggtgaagttttttctccatctgtccaaggacgagcagaaagcgcggcttttggagcgaatcaatcgcccggaaaagcactggaaattttccgccgccgatgtgaacgagcgggcctattgggaggattaccaaagggcctacgaggatttaatcgcccacaccgccacggaaaaatccccctggtacattattcccgccgaccgcaagtggtatgcccgctacgcggtgtcggagattatgcttcgccttatgaaagagatgaacccaacctatccggaattggcacgggaggaaaaggaaaatttggccaagtggaaaaagattttagaagaagaataaaaaaggcggcccgcgggccgtctttttctgtgctatttcgctaagtcttctttaaaaaagctattgtcgatgaggcgcgtttttccgatgtagacagccatggcaataaaactgtcttccaccaaggccgcatcccgttcgaaatgggggaagcgaagaatttccacgtagtcgattttcaccagaggctcgccttgaatttctttcgttaccgcatccaagagggcggccacatttttttcgccttcccgaaccatggccttggcctttttgattgagcgggagaggaccacggcggcctttcgctccttagcatttaagtagcggtttctggagcttttcgccaagccgtcgtcttcccgcacgatggggcagggcacgatggtaaggtccatattcagatcgcgaaccatggcttccacaatggccacctgttgcacgtctttttggccgaaataggccttatccggcgttaccaaattgaatagcttggtgagcaccgtggcgacgcctgcaaagtgaatggggcgggtaatgccgcagagaatgtgggtcatggactcggggggcgtcacgcggaagccgaagttttccggatacatttcttccggttccgggtgaaagacgatgtccgcccctaagctttcacaaaaggcgccgtctttgtcgatgtcccgggggtattcttcgtaatcttcccccggtgcaaattgtaggggattaacaaacaccgacaccaccaccgtgtcattttcttcgcggcattttttaatcagggagccgtggccttcgtgtaaggcgcccatggtgggcacgaggcccacactacctttggcttttgccgcttcacaggcggcttttaattcgtctacgcgggtaataatcttcatcgtcttatttgtcctccagtaatcgttcatccatggtaaattcgtgttcctttgtggggaaactgccctctttcaccgcatcgttgtaatctttaaatccttgcaccatggcttcgccgatgtgggcaaattgatgcacgaatttcggcacgaaatcgtcgaacatgcccagcatgtcttgatagaccaaaacctgcccgtcgcagtccacgccggcgccgatgccgatggtgggtatggaaagcatttccgtgagcttcttcgcaagggccgcgggcacacattccataactacggcaaaggcccccgcttcttccacggctttggcatcggcaaagagcttggccacggtggcttcgtcttttccttgaacgcggaagccgccgaaggtgttcaccgattgaggcgtgaggccgatgtgggcgcagacggggatcttcgcatccacaatggctttaatgacctctttcacttccgtgcccccttcgagcttcacggcgtgggcatggccttctgaaatgaggcggccggcgttgatgacgctgtcgcgaatgccggtggagtaggttaaaaagggcatgtcgcaaataatcaaaggatgttttgcacctcgtgccacggcggcggagtggtggatcatgtcctccagggtgacggacagggtgtcttcatagcccaacatggtcatgcccaagctgtcgccgactaaaatggagtcgatccccgattgatccaccagcttcgccgtggaataatcgtagcaggtaatcatggtgagcttttcgcccgtctccttggcctctttaaatgtgcgtaccgttgcttttttcatgcttcttctcctttcaacaatcgacgcaagtcgtcgtagggtcgatccccgtgtttttcctcggcgatgtcggccaaaatcaagctggccgcccggtaaagggcgtcttccttttcgtcgccctttcgcgccaaggcgtctaagtggcggcgaatggtggtcatgtcacaacgctccaccggccccgtaagggcggcggaggggcccacatcgaaaatcttcgccagatttttctcggcgaggggctttaatgccgccttcgcttcggcttcactaaagcctacgtccttcatgaggtcgaaggccatggcgcttacggccacgactaaattgctcataaccgccgtggccaaatggtaggtggccttgtccgcacttgtcatgactttataagggatcttgtgggcatcgaggcagtcttttaaaaccgccaccgccttctcatcgccctctaaagtaaaaaacgcacgaccgacggatgcgtatcccgattccttgtcggcaaaggccaataagggatgcatggatgcggcagaaacgtctttggtagtacgatggaagaaaagggaagaagacaaactgcccgccgtgtggcagagaatctttcccgaaatattcaattgtaaaaggtcgcgccacacaccttcgatcacgtcgtcgggggtggcgattagtatgacgtcgctggcttcgaccaattcatttaaggtctcaaagcacgcgctcgctgtcctttctgcgccgtaggctgcgcttgaaaggctgcggctgtagtagccgctgatttttaggggccccgatgtaaacagggcgatgcctaagctgacgccgacttttccggcgccgataatgcctactcgcttcatgttatcacctcgtttgagtgcaatacacattgtttcgatggttcatgtaaaagtaagtgtatagtttccttcgaatactaccacaaccattgtacgtttcattttgcggattgacaaggttttttcagaaaacgcttgtctgcgcaaacaaaaaacgagagggcttcctctcgcttagttgtctaattgccgctttaaatcttccagttttttcttgttctcttcgtccatggcgaggtaggcgccttttttcgtgcgaatgcgattggcttcttttcgcgtcaaggttttcgaacgcttcaccaaaagctccagctcacgggcgctgatgcgcttgcccccgcgggcgaggatgatctgttgctccacataatcgctggtggccacggtgacatcccgcacccggcccatggcggcgatttcgctttcgatgtagcgatcggcggtgacggtttctttcgtaaagacgatgtccatgtggggctttttttccaagctgcctccgttgccctttacccgataggcatcgaagacgaggatgatgaaaatatgctccgtggcggcgtattcttccaagagatccaccaaaagggcccgcgcctcttccaggtgctcgtcgatgagcccttcgaaatcggaccaatagttgatgatgttgtagccgtcgacgaataaatagcggccgtctcgtctatagcgccgatgccttgccatgtcgctgtctcttgatgtcgtagaggaaaatcgaggcggccacggaggcgtttagggaatcgaagcccccgtccatgggaatggagagcaggctgtccacgtgttccttcgttttctccgccaggcccttgccctcgtttccgatgaccacggcgatggggccggtgagatccgcatcgtagagggggccctttccgccgtcggcgccgtagacccaaatgtttttcgcctttaaatcgtcgatggtgcggttcatgtttgtgaccttcgccacgatcatgtggtccaccgccccggcggaggtcttatacaccgtggcgtttacggcggcggcccgatgtttcggaatcaccacgccgtgggcgcccatggcgtaggcggagcgaataatggcgccgaggttgtggggatcttcgatgccgtctaagagcacgatcagtggatcctcgcttttttcttcggccagggccaacatagcctccacgctgccgtaggtgaagtcggaaataaaggccacgacgccttggtgattttggcctcccgtcatttcatcgaggcgggatttttcccgctcctgaacgtagatgcccagctccttggcgcggccgcgaatttttttcatggagccgtctttggcgcccttttgaatgtaaactttatcgggcattttatccagggcttccaagaccgggtttcggccgtagatcatggtcgtttccatagttcctccttgtaaaaggcgcggatttccttgatttttccgcaggtcatggccccttccgggcagggccccgtgacacaggcaggccccgcttgtctgaacacttcaggggccacggcgatgacttcttttaacatggcgagggccatgtcgcgaatttcccactgagcccgcatacacagccgcatggtgaaaaagtgcatcaggcttctggcattcatggtgacgacgattttcgtctcgcaggcattgggaagcacgtagcgggcatcttcgatggcgcgcttttccgctgtgcgggccgctttcttctcgtccatgcccccggcgacaagctctttgatataggtcgtcttcaactgatcgcttaacgcttcgtaggccttgtgggcatcttccatgctttggatgaagcgggctttggcggcttcgtctttttcgatggccttgggaataatgtactcaaactgatccagacgcacgtagcgctgggattgttgggagtagctggccaggcggtggcgcaccagttgatgggtcaaaacccgactcaccccttctacggcaaaggtgaagctgatgtgttccatgggcgaggcgtggcccatgtcggcgagcatggcgacgaagcgagcaatttccgcctcgtctaatttctcttcgatgccgtcgacccccaccggggagtagcaaagtttggccgctttggcgatggtggccgccccgtccggggtgtatgcaatgagtttaaccttcattttcccatatcctctcaatttctttaaagtattccaaaagccgcaccgtgtttcccgaactgtacaaatagccgattaaacactcaaatcccgtggcccgtcggtaatcggccacggaggcatttttcgccgtggtcttcggatgggcgttgcgcccgcggcgaaagacggcggcctcttcttccgtgaaaaaatcctgcaattcttcggcaagggcggactgagccgacgccttggcccgcttcgcgctcgcccgatggaggcgggccaccttttcgtttcggtgaaggatacggcttctgataaagagttcgtaaacgcaatcccctatgtacgcaagaacgaggggattttgccccctcgcctcgtcttccgtccacatgggtgcggaaaaatatcctcttaaatcctcttccacaaagtgccctctctcgtatcttcgatggcaatgcctttttcgaagagttcgtcgcgaatggcatcggcccgggcgaaatctttgttggcgcgggcggccttcctttcttctaacagggcttcgattgcactgtcttcgtcggcttcttcccggcgatacaaaatgcccaagacccctgccagttccataaaggtgtcgtaggccaattgcaagctgtctttcttcggccctttggcgataaaggtgttaatctctctcgccaaggtgaagagggcgccggtggcgcgggccgtgttcaggtcgtcttccatggccgccataaattcttctttttcgcggctgacgacgccgtcgaaatcggcgtctttccccgcttccatgtcgccctttaaaagctgttccatgtggtccctgacgccgtagagccggtccagacccgccttggtttgttccatggcgtcgtaggagtagttaatggggctgcggtagtgggcgcttaaaaggaagaagcgcagcacttccaagtcgaagacattggccacttcacgcaccgtaaagaaattgcccaaggacttgctcatcttcgtgccgtcgacggtaatcatgccgttgtggagccagtaattggcaaaggtcttgcccgttaatgtttccgattgggcgatttcattttcgtggtgcggaaattgcaagtcttccccgccggagtggatatcgatggtttcgcccagcagggtcttggccatgacggagcattcaaggtgccaaccgggacggccgtcgccccaggggctcgcccagaagggttccccttcttttttgcccttccacaggacaaagtcgccgggatttttcttcgcgctgttgacttcgatacgggcgccgctttgcagctcgtcgatgttttttccggagagcttgccgtagcccttggccttggtaatgtcaaagtacacgtcgccgtcggcgggataggccgcgcctttttccacgaggcccgagacaaattccaacatgggctcgataaattccgtggcccggggattaatggtcttgtaggtgtagagattcaacccgttggcatcttgcataaactcgccgatgtagcgatcggccacgtcgaagaccgtggtattctcgtccttggcccgattaatcaacttgtcgtcgatgtccgtaaagttgacgacgaaatccacgtcgtagcctttatatataaagtagcggcgcaaggtatcgaaaaccaccaaggggcgggcattgcccacgtgaatgaaattgtagaccgtggggccgcagttgtacatgcgtacctttttttcttcgagggacttgaattcctctttttgtcgcgtcatggaattaaataatttcacgtctatcccctttctttcgccttaaatgtcgaagtaatagctgttttccaatttgtcgtgaatggcggccaacagattatcgtagtcctcgtcttgaataaagaggacgtccagatcgcgctttcttacgccgtcgcgaatacgcttcacatccgcaggttgcacggaattcagatacaccagcgccaaatccgcgccgtctaaattgctttcgatgctttccttggatacctcgccgacatggaccacgtcacttcccgcatccttcagggcattgatttgctccgtcaccacatcgcctttgccgaagacgctgagctgaaggtgttcgagaaattcatcgtcgtccaccggcgccagatcgttgtcgtaatccgtggtgagcacattctcgccgtccatattgtggatccaaatgacccggcccccttggggatcccgttgccaataagcgtagtccacaatgtcgccttcgcctacatttaaattgcccaggctcacgtcttccaaattgatgcgcaggctgcctccttctccttcgccttcgatgtagaggccgcggaagtcgggatcgtagagcacccgtgcgtagggaatcacccgccgttcgctttccggggtttcttcggctttttgcacaagttcgtaattataaatgtttttcagatggttgttgttatacacctgtttcactactttggcgcgaacttcatcgccttcgccgatgttttgcaggcgcaagactttttccggaataaacacattgtcgtcgcctaaggtgccgccgccgaggcggaggcgaacacggcccacgtagtagtcgtcgtcatttgcggaaatttgcggcgcttccgagtaggtggtgtccgattcgatgtcgtagagaagctccatgaggtcgaagagcttttctatgcggccccggcgctcgaagagattctcgccggtcatgccgtcgatgcaggttttcatttcacttttgatttcgtttaccatatagtttttgttcatttgttctttctccatttctacattttatcttttctattttatcacgtcccgccctttatctccaccgcagggagcattgtctatgctttttatgggaattcacaaatttataatggtttataaaaaaatccccttaccgcggtggtaaagggattttgtgattgagctgattacatcatgcccatgccgccgcccatgccggctgcgcctaaatcgggcatatcttctttaatgttggccacagcggcttccgtggtgagaagcatgctggccacgctggctgcattttgcagggcgcttctcgtaaccttggtgggatccacgatgcctttttcgatcatgttcacgtacgtgccgttgtacgcatcgtagccgacgccgggtttttcgcccttgacgtgttcgacgatgacggagccttcggcaccggcgttttctgcgatttgacgaaggggttcttccagtgcgcggagaataatcatcatgccggttttttcgtcgccttcgcctgcctcggccaatgcttccacgcagctgatgcagtcgacgaggaccacgccgccgccgggaacgatgccttcttcgacggcggcacgggtggctgccagggcatcttcgatgcggagcttgcgttctttcaattcgatttccgtggctgcaccgacttgaatgacggcgacgccgccggaaagtttggccaggcgttcttgcaatttttcccgatcgaattcgctttccgtttcttccacttgggcgcgaatttggccgatgcgttcgtcgatggcgcttcgatcgccggcgccgctgacgatgacggtcttgtctttttccacgcggactttttgtgcccggcccagcatatccacggtggcttctttaatgtccaagcccaagtcttcggtgatcaccgtgccgccggttaaaatggcgatgtcttggagcatgtcttttcttcggtcgccatagcccggtgctttgacaccgaccacatttaaggtgccgcgaagtttgttgaccaccaaagttgccaaggcttctccttcgatgtcgtcagcgattaagaggacggggcgggattcttgaagcacttgttccaagacggggagaatgtcttgaatgttggtgattttcttatcggtaattaaaatgtagggatcgtccaattcggcgacgcgcttttccggatcggtgaccatgtaggggctcaggtagccgcggtcgaattgcatcccttccacgacatccaattgggtgcccatggagcggctttcttccacggtgatgacgccgtctttgcctactttttccatggcttcggcgatgagctcgccgatgcgttcgtcagcagcggaaatagcggccacgcttgcgatggcatcggagttgtctacgggcacggagaatttctttaattcgtccacaatggcgtctacggcctttttaatgcccttttgaaggaccatggggttggcaccggcggccaggttcttcaagccttcgcgaataatggcttgggcaagaagggtggcggtggtggtgccgtcgccggccacgtcgttggtcttggtggccacttcttttaccagttgtgcccccatgttttcgaagcgatcttccaattcgatttcacgggcgatggttacgccgtcgttggtaatgaggggtgcgccgaattctttatcgaggacgacgtttctgcccttgggccccaaggtaacttttaccgtatccgctaatttgttaatgccgccgacgagaccttcacgggcgtctgcgctgaatttaatttcttttgccatagtatctcctactttctattacttagtttaattttgccagcaggtcttggtattttaatacgatgacggtttcgccgtccatttccacttcgttgcctgcgtatttactgtagatgactttgtccccttcggcgacatcgcagtgaatgtcttcggaattttttaattcctcgctcacggcgatgaccgtggccacattggactcttcttttgccgtatcgggcaagacgatgccgcttgccgtgacgttttctttctctattttttgaattacaacacgttcacctaatggtttaatggtcatgatgtgcctcctgaaataatattagcacttgcactaatcgagtgccagctttctctattatgataccacaattttaaaacttgtaaaccatctcaggtgattatttctcctgaccgtcgagcgtccggccggttggcacccattttcacattctcaagtacacactacatatagataattttgccaaacatcttccatttatctcccatatgtagtataatcgtctcgcttgggcgacagcgcccactaatcgtaaatgaacacccgaagggggtgtcgaaaaagcaacagtgatcttattcggaggaaaaaatgagcaatttaaggattattaagcgcaacggcgaatccgtggatttcgacggatcgaaaattgtcgtggccattgaaaaggccatgcactcacctacgggctatttcgtggaaaatcaggccgacttggtggcaaaggaaatcgaagaggaaattttacaccacgatttatcttccacggtgcttcaagtggaaaagcgtgtcttcgaaaaattaatcgagaaaaacaacatcgccacggccaaggcctatgagtcctaccgttcggtgcaatcctttaaacgggaaaacaactccaccgactcctccatcgaaagccttttaacttattccgatgcggatttaatggacgaaaattccaataaaaatgccgtggtggtctccacccagcgggacctcatcgccggggaagtgtcgaaagacatcgcccgccgccgcatcctgcccacagacatcgtcaccgcccacgactccggcgccattcacgtccacgacatggactactacattcaacccatgttcaattgctgcttgattaatcttgaagatatgctgaaaaacggcacggtggtcaacggcaagatgatcgaatcgccgaagagcttccaaacggcctgcaccattaccacgcaaatcatcgcccaagtggcatcgggccaattcggcggccaatccattaacggcatcgaccgcatcttggcgccctatgtgcgccgaagctacgaaaaatacttaagcgctaccatttccgagcagctggacatttacggcatggaaaaagcggacatggccatggcggaaaaggtggcgtggaaccgcacgaagcgggaaattaaatcgggtgtgcaaaccattcaataccaaatcaacaccctcatgaccaccaacggccaagcgcctttcgttaccctgtttatgtacttcgatcccgaaagcgactacgcctacgaggcctccctcattacggaagaaatccttcgccaacgaatcgacggcattaaaaacaaacaaggggtcaaggtcacgccggctttcccgaaactgatctacgtcttagacgaacacaacatccacgaagacagcccctactactaccttacccgcctcgccgccacctgcacggcaaagcgcatgtaccccgactacatttccgccaagaaaatgaaggaaatctacgaaggcaatgtgttctcccccatgggctgccgctccttcctctctccctggaaagacgaagatggcaattacaaattcgacggccgctttaacatgggcgtcgtgagcgtgaacctggcacaaatcggcatcttggcaggccacgacgaagaggcttacttcgagctgttaaacaagcgattggagctggtgaaaaaagcccttttgattcgctacgaacgcctgaaggaagtcaccagcgacgtctcccccattcactggcaagacggcgccatcgcccgcttagagcccggcgaaaaaatcgccgattatttggaaggcggctactccaccttatctttgggctacattggcctttacgaagccaccaaatgcgtcgtcggcacctcccacaccacgaaagaaggccacgccttcgccatgcgcgtcatgcacgccatgcgtgatgccgtggacagctggaaagcggaatccggccttggcttcgccctctacggcacgccggcggaatctttgacccaccgcttctgctccatcgacaaagccaccttcggcgacatcgaagacattacggacaagggctactacaccaacagctaccacgtggacgtacgggaagagatcaacgccttcgacaaattcgatttcgaaagcgaattccaaaaaatctccaccggcggctgcatcagctatgtagaaattcccaacatgaccaacaatatcgacgccgtcatgaccatgatcggctacatttacgatcacatttcctacgcggaatttaacacgaaatccgactactgccacgaatgcggcttcgacggcgaaatcactgtgaacgacgacggcgattgggagtgcccccaatgcggcaacaaagatcgcaccaagcttaccgtcattcgcagaacctgcggctatttaggcgaaaacttctggaatgaaggccgcaccaaagaaatcgacgcccgcgtcctgcatatttaaatggactacggcaattatgcacaaattcggcccctggatgtggcaaacggcccgggcatccgcgtgtcggtcttcgtcaccggctgcagtcgaaaatgcaaaaactgtttcaacgaactctatcaggatcccgcctacggcgaggtttggactgacgagaccactgaaacattaatcaaatatttaagccgcccggaggttgcgggcctcacccttttaggcggcgaacccatggaaaacacctggctacgacgggttttagcggatgtaaaaaaacaaatcccgacctccgtgtggatttactccggctacaccttcgaagagatcctcgacgatcctgaaaaagtgaagctcctcgaatcctgtgacgttctcgtggacgggccctttgtggaggcgaagaaaaatttgaaactcgcctttcggggcagcgaaaaccaacgcatcttggacatccccaagagcctgaaagcccatacagccataaaaaaagagagagacgagtaagtccctctcttttcttatggaaaaaattggttctatgtcaaccattggggagtctagtgaaaactaggctcctttttgttttcctaaaagccattcatcaccggtcgtttgaacaaacgaagagtaatttggtttgaaaatgatgaaagttgcacatcccaaaggcgacacgcttcgtcatctgtttgcccttggcggcaaaggaaaggggggcttcaaagcgcaccccccaatccttgcaatcatagcgtgtcttcttaatccgcagaagcacgtgctttcggcgcatcggtgcatcccgaagcacctgctcccggtgatcatggacccaggcatgggacgaaccgcagtgtggacaaaccaaatcatgaacgggcttacaatcaatggtaatcaggcgcttttcttctgaagcgccggtcacctcgacatcttggattcctaaaagtaatgtggtaatattgttttgcacttgtttggccccctttattttattgtggtgatttaattttaggcgatagggaaaacaagtgctatctttttgcataaaaatatccattgaggaggttactccccaatggatgttatagagccaatttatacaattattttaaagaaaatgatattgagaaagtttctcttgcatttggcgcatcaattggcggagtcgtgttattggaattattaaaatacaaggatataaagatagctaaagccttatttgagggatgtagcctatgtcaaaatgcgagtgttttagagtttattataagaagtatttttctttatgaacgggaaaaagcaattaaaaataatgactcagctaatagaaaaattataagcatatacagagaaacaatgggtcgaatgatggttgaaactttaatcagaatagataaacaaagcattaaaaacatctgtcatgattgtgcatttgtggatcttccaaagttatcagaagccgaacaaaagatgtgcatattctgttatggttttaaagaaattaatttaaaatatgcgaagaaactgacttttaacgaatatccatacgcaacattaaaaatatgggatgggcaaaaccattgtacaaagatgacaacgaatatagaatagtattgccaaatgataaaatctgagattgattaaaacatgttgttgaaagggatgttagcagtgaatgataaaagcaataaaaagttttgggataaattcgccaagctgtacgctccttttatgaagaaggataaaggagtttatgataaagtttgtgagtatattcgtccttacttgaatagaaatatgaacgtacttgaacttgcttgcggttcaggtcaattatcctttaacctttcaaaatatacgaaaagttggaatgggactgatttttcggaacaaatgattttagaagcaaggaagcgtggagaatacgaaaaccttacctttgaagtagccgatgcaacatcattaaattttgtagatggagaatttgattgtgtggtcattgctaatgcacttcatataatgccaaatcctgataaggcaatgatagaaatatacagagtattaaaacctaatggtattttgtttgctcctacttttttatggaaagagggaaagcaaagtaaattcaagaaatggctaatgtccgttgcgggatttaagatgtatcaagaatggaataaaaaacaatttaaagattttattgagaagcatggattttcagtagttgaaatgaatttgatacatggagggcttgcacccataggcgttatgattgcttataaaaagtaatattaaaattgggattttggaggagagttagtgaacatacatgagtttggagctgataaaaataaaataattgtgttgattcatccttcattagtcatgtgggactattttgaatacattttatctatacttaaagaagagtatcatattattgttcctgcacttcccggatatgatgaggaaaatccaaacgaaaattttacaagtgtagaagaaattgccgataatttattaggatggctgaaagaacataaaattgagaaagttgatcttttgtatggttgctctatgggcggctctatcgctttaaaaatgttctccaatcacggaattaaaataaggaacattatttgcgatggagcaataacaccatatcagcttccttggattgttacaagaatgattgccataagagattttcttatgatttctataggtaaaattggaggactaaagcttcttgaaaaatcattttctacagatgaatacagcgaagaggaattgaagtatgttgctaaagtccttaattttattagttataaaacgatatggagaacatttgaatcttgcaacaactatgttatgccaaagaacgtgtcagaacatagcggtcgtattcaatattggtatggtgataaagagtctaaagcccgtgcatgggatatcaaatatatgaaaacttactttccaaatactgagtttattaaatttgaaaacatgggacatggtagcatggcaagtctttatcctgtgaaaatggctaatcaattcagagatttaatggaagttaagaaataaaataatttgccatttttggaattaaggaggtatgcattgtgagtgttaaatataaattaacggaatttttatttcgtcatactgtaaaacctatgatgaaaaaagcaataaaaaatccggatgaatattttgctaaacaagaaaagaaacagaaatctaaactccctcttgaaaaacttcataaatcttatgattttgaagaaaagtgtataagcggaactttgtattatgtcgtcaaaccaaaaaataaagtggcaaataggcttgtattatatttctttggtggtggatataccattccgggagattccggtgattttgagtttgctcaagatatggctaatcaaagtcaggctgaagtttggcttgtatggtatccgctttttccaaaagcaaccggcttgcaaattatcgacgcaggtctaaacgtttatagcgaggcacttaaggtgtttaatgcagatgatatcacattttttggcttatcaagcggagcaagccttgcacaaaatatatgtttgcatattcttgaaaacgacatgagattatcaatgccaaaaagattgattatgcactcgccaacctttcgtattcctccaactaaagaacagatgaaagagatggagagacttgataagtttgattgcattattccggcttgctacatgaaagaacaagatcaagcaatgcaaagaataaatttaaataatgtggaatatatgaaatcgccaattgagtattcatggaaagggctacctgacatgtatattatttatggttctcatgaagtattgatagcagaactgcctgaagcaaaagaaaaagctaaaatggatggcgtggttatgaaaacatacataggagaaagaatgatgcatacttgggcggcggcaggatttttacctgaggcaaaggaagtaagaagaaatatatatgccgtaataaggggagatagaaatgacggctttctcttgtaatattctacaggtagttttcagaagaaaagtggatattgtgtggtgattgataattatgtatatgacgatactgcttgccgttattatgatgattggattgtttttattgctgtgggcaggtgttggatttattcaaaataaaaaattcttttcttcgtgtccgaaagaagtgtttgatgttattaaaccaaagaaaaaacgctttcgtggtcaaaatttagttggatgggtattagctattattgcaatactattcatgggaagtccaattgtcattggtgcattggatggtattcaaaacaactttactttcattcagttttttaatagatttctaatgatgcttcttttgctgaaagcctttgatattgtattttttgattggatacttttgtgcaatcgaggttttagtttttttgaacattattatccggaagtggtagataagcttagtcctaaactctttggatataacaaaaaggaacacattattcaagtgttatttatgattatcggatcgttagtcattgcatggatatgcacattattttaaaaactaaaatcaaattagtaggaggtgtttatacttggaaaaaatagaaatgcaagaaaaaataaaacctgttttgaacggtgctgcggaaacaatgcttcagagtttttatgcaagagcacaatattccaagagcaaaagacataaattttatgatgccaaagcggtggaattggttgaaaaaattgattacgattttactgccgccacaaatgattcccttatgagttatggcgtgattgcaagaacacttgtatttgatgaactggtaaaagagtttattgacgaaaatccaaattgtacagtcgtaaatattgcttgtggacttgacacgagattttatcgaatggataacggaaaaatcacatggtacaaccttgatttgcctgaaaccattgaagtaaggaatcagatttttgcagaatccggcagagtttcaaatatcggtatttcagtaacggattcggcgtgggcaaaagaaataaaagcagatgggaacattctgtttatcattgagggcttgtcaatgtacttgacaagggaagacaatgccaaaatgctcagaattattcgagagaattttgacaatgcttatgttcttatggagtgtctgtcaaaaaggtgggtggcgaaagaaaatgttgaaaagtccatacaaaaaacaggagcaaaatttatatttggagcggattcctttgatgatattaaggatattgcaagaggcttccgtagtgtaaaggatgatgatattacgagagggatgtctgctatatttccagtgcttaagcttattaactggttgccaattgctcacaagctatcacagaaaatcttgatatttgagaaagtgtgatgttgtcgttttggttgccatcatgaagtacacgctgcgatagggaaaacaagtgctatctttttgcataaaattatccattgaggagttactccccaatggatattatagagccttaaaaaacagaccctttcggatctgtccgatgaatcgaggaaggtttgtcgattttttacatgaaaaagcccacgaagccatgaatgacgatgacgacgacaaaggcggggagcatattggccactttcagatctttgatttccaaaatgccgaagccgatggcgagaatcataatgcctccgacggaggttaaatcggcaagcaaaacatcgctgatgaagggttccaaaaaaccggacatgaggaccagggcgccttcgtataaaaagacgggaatggccgacagggcgacgccgatgcccaaggtggagccgaagaccaaggaggtcatgccgtccaacacgctcttgatcatgaaggtttcggtacttccgttcatccccgcctctatggcgccgataatggccatggagccgacgcaaaatagaatcgacgcttgaatggcggcggtcatgggcccttctcccgtcacctcgccgccggatcgcgccgccaggcggctatcgattttttcaccgaagcgattaaatgcgccgtcgatatccatggcggcgccgatgcccgtgccgatggcaagggacatcatgacgatgatgaattcatgggcctttagggccatttgaatccccataatcatgacgcttaagggaagcaccaataatacctgctcctgaacgcgggtagggattcgattgcctatgaatttacccagtatcgccatgatggcaatggccagggcattggtaatgacaccgatcataacttcctcttttctctttcgcttagaaataacaattgctgaatgtagccggcatcgtcgccgaagcggctcgtggcataatccgatgccgcttgtccgtttttgaaatcgccgaagcgcgccatggctctggcgatccacacgtccacgggaaaggcgtctttttttccgtagccaaagagcaaaatgcaatccgccaccttgggccccacccctgaaagctgcatcaggtaggtcttggcttcattatacgctaattcgcggggccgatgtaagtcgaattttcccgcggctaccaagcgggccgtttcgattaaatacttgtcccgatagcccgccccgagggcgcgcatctcatccgaagacaggcctgccatcacttccggtgcaggcaagctgtaggcggtgaggccttccgcctccgccagtttctcgccgtagtttttcgacagatccaagacgcttttttgaatgcgaaagagattgttgttggatgagaggataaagcccacaatggcttcccagggatcctgttttagaatccgaagggacaaatagggcgcgaggtcctttaaatcgtcggcactttgcaccaatcgggcggccctctcgtaatcgtggccttcgtcgaaaaagatgccgcaggccttttcatcgcctcgggtcagctcgccttctttaagaaaaaatgcgtcacttccgttgacggcacagagcgtgccctcggcctcttcccagtggtggaactggccgctttttatggtcatgaccggatcaaacacaggcgcctcctttcaaaaaaataagagcgaggcatttgcccgctcataaaatcgtcgacctaacgctcgctttcggtcaggtagtagcttaatgttaaaaggctgtcggtgagacgaatgttttccacaaccacggtgtccggcgcttccaaatcttccggtgcgaaattccaaatgccgcggattcccgcctcgatcaggcgatcggcaatggcttgggcgccttctttcggtacggttaaaatggcgacttccacttctttatgggcttccataaattgttccagctcgtcgacggagcgaacttcgtgattgcccacggtggtgccgatgacatgctcgtctcggtcgaacatggccacgatttcaaagccgcttttcaaaaagcccttgtaattgctgataaccgagcccaatcgaccggaaccgataaggatggttttgtaaattcttggaattcccaatatgttttctaattccgtctttaaaacggccactttgtatccgtagccttgttgaccgaagccgccgaaattatttaagtcttgacgaatttgcgacgccgtaaatcccgttaaatcacttaattcttgggaggagatgcgatcttcgccacgatcgtctaattcgattaagtatctataatatttcggaagccttcttatgacggtttctgaaaccttacctttacgcatagccaatagtatcacctttcgctctttctatttttaagaatgttacgaatttatctaattctatgaactagtatacaaaaaaaaccatcgcttgaaaagccttattccacgattttcccgactttttctccccgtccttttctgctatgatgtttttatgaaggaggagaggcacttggcaatcgtatcggcacaaggtttggagaagactttttacatcgaccctattttaaaggacgtggggtttttaatcgaagcaggcgaaaaaatcggcctcatcggaaacaacggcagcggaaaaaccaccctcatggccatgttggctggagaactcacgccggacgggggaagtatttccaccaccaaggatttggaggtgggctatttggcccaacacgtggccgtgaccgaaggggccagcatatacgacgagtgcatggcctcctttcaagcggtaatcgaacttgaagaaaagctccgcgccatggaggtggaaatggcccatctggaaggcgaggccctggaagagcacatcgcccgctaccaggtgttggttgatcgctacgaaaaaagcggcggctacagccgggagagtgccgtcaccggcgccctgcgcggcctgggtttttccgaagaggaaatgcatatgccggcggaaaatctttccgggggccaaaaatctcgcctggctctcgccaaactccttctccacgagccggatctccttcttttagacgagcccaccaaccacctggacatggattccatcgcctggttggaaaagtttttaaaggcctttaaaggcgccgtggtggtcatcagccacgaccgctactttttagacgccattgtggatcgcattctctttttaaaagacgctgccctgaaaagctatcagggagactacaccaatttcgtccgccgcagacaggaagaggaagatcaaatgcgccacgcctacgtcatgcagcaaaaggaaattaagcgccaagaagaaatgatcaagcgctacgcctcctggaaccgggaaaaaagtgttcgggccgcaagaagcaagcaaaagcaattggacaaaatggagcgtctggacgatgtgaagggcgaaaaaaatcttctcctctccttcgccccggccacggaaagcggccgcgacgtgctccatatcgagcatctctcgaagtcctttcccacaaagcccttgttcgacgacgtcacctttcccatttacaaaggggaacgggtagggcttatcggccccaacggcatcggaaagagtaccctctttaaaatcatcatgaatgaacttgcccccacatccggcgaggtgcaaatgggaaagggcgtgaccatcgcctatttcgatcaggaaatgaagaccctggacgaaaacaaaaccgtggcggaagagctctgggaccgctacccgaagctggaccgctttcaaattcacgcctacctggcccgcttcctctttaccggcgacgatttggacaagcgcatcggcgatctttccggcggggaaaaggggcgtttgtctcttttaatcattatgctctcaggcgccaatttccttctcctcgacgagcccaccaatcacctggacattgaaagcaaggaatccttggaggcggcgctgaaggactacacgggcaccatccttaccattagccacgaccgctacttcctggaccgggtggctacgaaaatcgtctgcctctccgaggagggcacctttatggtggacggcgactacacctatttcctgaagaagtgggaagatgcccacaaagtggaggaagaggaagaggagattaccaagacccaaatcgtaaaggaaaagaagcggtcgcgggaggaacaaaaagaagcccgccggcgaaaaaaagccctgcgagacacggaggccgagatccacgccctggaggcggaaatcgaagccatggacgccaccttagcggatcccgccacctacgacgaccaccgggaagcactggcgctttcccaaaagcgggacagcgcccaagaggaattagacgccctttacgacgaatggtttgccctctcggcggaagaggaataaaacggcacagatgtgtcgtttttttatttaaatcgaaaaaacagaccctgagcaggagaaaagagaaaaaatttattttaatggtattcactttccctttcttccctttttcttcccgttctcattttcaacatcccgctattttcacgcttcgcctttttaatccacatttccttcacagtatacacagatctatccacacgccaccgcccttattcacgggattttgaaaagttatccaccttatccacaggcttatgcacgttttcccgaaatcaccttccggaatggacataatctctaagatctgtctattttgtgggatttgtcaccattctgcctctttatgcactatttttcgctttccttacttattctcattcccgactttacatgggcaaaacaaaaccgcagcctgtttcgctgcggtcatttttttattccagacccaaattgggatcggcaaacaccgagcccgcctcgccttttaagtggctgtagtagcccaccgaggcgatcatggcggcgttgtcggtgcagaggacaggatccgggtagtaaatggccacgccctctttctcgccccggctttccatggcaccgcgaaggccggaattggcgctgaccccgccggcgaggacgatggtcttctccccgagctttcttgccagacggaaggatttttccacgaggacgtcgatgacggcggcctggaaggaggcagccatgtccgccacgcggatttcttcgcccttttgcttcgcctgatttaattcgtttaacacggcggtcttaaggcccgagaagctgaagtcgtagctgcccgcctcaagcatgacccttggaaggtcgtaggtctcctcgccttctttggccagcttgtcgataattggcccgccggggtagccgatgcccatggcccgggccactttgtcgaaggcctcgcctgcggcgtcgtcccgcgtcttgccgtagagggtaaagtccacgtagtcggtgacgtgaatcaaatagctgtggcccccggagacgatgagcccgacaaagggcggctccagatccttgtgggtcaggtaattggcgcagatgtggccgcgaatgtggttcacccccacaaagggcttgtggttcgccagggccagcccccgcgccgccgtgagcccgacgaggagagcgccgatgagcccggggccgcgagtggcgcagatcaggtccacatcctccatggtaattcccgcctcttccaaggccagatccagcatgggcaaaatggcggagacgtgttttctggatgcgatctccggcaccacgccgccgaaaagcctgtgaatttcaatttgtgatgaaatcatattggacaaaatctctcgtccgtctcgcacgacggccacggaggtttcgtcgcaggaagattccacgcccagtgtcaacatattaccacctcttccaataaatcagcccgtcgcgcttcacgtgggcgtagtaattctttcgtaccccttccaattgaaagcccaaggattcatagagcttaatggcgggaacattgtcgtctctcacttccagagtggcggaggtcatgtccttttcgtagacggcgaaaaggtaatgattcatcatgtagcggccgtagccgtttccgcgaaattcaccgccgatggccacattgccgatgtgggcctgatcccctaaaagccatgcccccacatagccgatgatgacgtcgtggtagaggagcacttcgtaataggtgaggggattgttaagctcccgcttccaactgtctcgggaccagggcacggtaaagctttcctcctcaatggccatgatgtcgtctaaatcctcaactgtcgcttctcgcgtcgagagattctccatgtttcctcctgtattctcgcatggcctgtgtgggccgtaggtaattgggctccagggcatagggattggagggcccttctgcttcaaactgctgagcgccttcaaaggcaatggccgccgccgacacccgggacaggtgatcgggatagaggataaaatcctcccgcgcagaaaatgcctcccgatacttctttaagccgtcgccgattaaaatggcgccttcaggcgcttcttccagaatagatgataccggataggcatcgtcttttttcaggcgcaccagttcctcgccttttttttcgaagacgccggcatagacccgctccctccgcgcatcgaagagggggatcaccacgccctcggtggccacttcccgggccagggcctttaaggtggagacgccgacgacgggaacatttaaggtgtgaccgaagacctttgccaaaaccacggagatcctgagtccggtgaaggagccggggcctacgccggtggcgatgagatccacatcttccatggcccaatccgccgaatcgagcatatgttgaatcatggcaatgagcccttcagaatggctcgctttgctattgaccgacgcttccgccacgaccttttcatcttccaccagggcgcaggtggtttccatggtggccgtatcaaaggcgagaattttcataagccagcacctcctcttccagttcctttccccgcgggccgaagcctgtggctatcacatcccgcgtgacttcgtcgatgcgcctaaattccaggcgtaacacatcctcgggaaggctgtctgcaatgatatctgcccattccacggcacagacggcgccggaatccagcatgtcttcgccgcccatgtcgaaaaattcatcttcatctttcagtcgataaacgtcgaaatggtaaaggggcagttccccttcgtatatatttaaaatggcgaaggtggcgctggtcacctccgaggaaaggcccatgcccttggccagcgccttgacaaaagtggtctttcccgtgcccaaatccccgacgagggccaaaacgtcgtaggcttttaatttttttcctaaatacaaaccgaaggcttcggtttgtgcggtggttttcagtctcatagcttcctcctgcttcttattatagtcaatctatggaaaagagaaaagcggctacggctccggactttgcaaaatcgaaataacgctctcattgtttctcaatttgttcatacttaattgcacgaaaaatcgagtaagcaaaatgcttactcgattttaaagaactacactaaatgctgatttcgatttcgtgaaatttaatgtcaatttttgtgccaagtcattaaaaactagcgtcgtgtgataatgacatcctcgtcaaagcttccatacccggatccttctgtaatcacagtatgtgacggtaattctacgcttttcaatctcttatttagtttaaaggcaccatccccaatttttgttacagaatcgggaattcgcaaaacccataggtcattgtcataaaatgcagtttctccaatctcagttaccgtgttcggtatggttaattcacttaatatattagtactgaatgcacctctctcaataacttcgagattgctcggcaatcttagttcgacaagactgttcttccaaaatgcgaattcccctatacgggtaactgaatccgaaatgtccagacttctcattcttttattaaaggcaaaggctctatccccaatcgttacgattgatctgggaatatacaactctgttagatcattcaactcaaatgcgtaggcaccgatcgcgagctctttcccttccatctccgcatcgtagtcaggcagtgttaacttcgttattccgctctgatagaatgcctccgactcgattctttcaacggaatcagggatggtcagttctcctattgtcgtgtcagaataatcatctcccttaaaggtgtatttttcaattaccgtcatccgatttgaaatttttacctttcttaacgggttataactgaaggcgctatcgcccactctttcaacggaatcaggaagaatcgcctgcgccagtttattttgtcggaatgcaccgtctccaatctcaataaccgattcggggatattaacccgtatcaattgatttcctgcaaaggcatcctctccaatggtatgaaggccattaggcaatccaatcgattgcaacttattctgcctaaatgcatccttttgtatttcttcaactgtttcagggatggtcactgatgtcaacacaggtctctccgtgttccacggagaaaatgcactgtcgccgatgatcctgacctctacacctgctatttgactcgggatgttcacccttgtcttttcgcctatatattgaacgatggttcccgttgaacgatcaaatctataatcgcctacagtgaccacgtccggctctttaggttcatccggattaggtgcgggcggattcggcggtttaggttcgcccggatcaggtacgggcggtgtcggtgggttcggcggcgtgggttcatcttcttgtttgtcttgaattttttgaataatactttccaagctttcaatccatgtattgacctttttatttgatgctgccgccttttcgtcgtttgaccaatccccataattgtttcctatggcatacacgcgggactgcgtttctatttcttttaaagcatccttatccgtctgatcaatcttttggtatgcggccgtccgtctcagcgcctttgcttgctctaacagccgaacaagttcatttagttttgaagttaattgattgtataaaccctttacttgatccagagaaacgtccagttttttcatggtcgcttggtatttgctcggcgttctgtttgccttattttttgcataaagcactgtgtcttttgctctggcttttaacgtatcgatttgcttgatcgacggagacttttgtgtctgtttaaaatccgctctctcttcaatcgcttcgattttagccaagtactcttctatcgccttgatcttcttgtccagttgttctgccttatcggccgttaacgccgtttctctttttagctcatagatttgttcttccaacaatgtgtggtgaccctgataaagtcctgcaagatcgaaatccgcatacatgtaaacccaagccccgtggctcatcattccatacatatcaagatcattcaatttttcttttccattttggtagctttgttttatatcgatgtgtccacgatagatggctttatggcgtaagcctccatcaagccataccggacgtgttcctagcaataatagggagaattccgcaccgagatcagcatttgtttctaattgaccctctaatcttttgtgcttcttttcctctaaatccttttttgtaatagcgatcattttaaatcgcttaccgacatctcgattgcttatatgcacatctttttcttgttgaacctgttggattagatagactgtctcgttctcaaactttttatcgaaaacattgacatttacagatgaactgtccgttaactgactttcactaatcagttccacttctaattctccgtaaacattgatataaactgctgccaataatgccagcatatcgctaacttcgccaatagaaccttttgtagattgctcaattgccacctgccctccggggtacaagggaattttagcataacctaaaaagtatttatccttagaaaaattattcgtttgttttaatttcttcgttataaagtcatttgatttttcttgacccaaactcctgagaaagcgcgtaaaattaaccttttcattgaactttagattcaacttcatgtccatttgttgccgttccgccaaaccggcatgaagtaattttagtccttccctcgaatgctgaatttttacatcggcaagtgtttgcgccaaatagttataaaagatctccccatttaaagtcgtttgggctgagtctccgtccatcgcgttgttgatgtttgtgccgccggctacattcagcgccacctcggaataagcctcatggctgacgtcttttcccatcacccaattgaatgctttttgtgcccattcccagtattcctttggcaattcttttaattttaccgaattggccattccaccatggatcgatccccagtagctaactttggtgtcattcagttttttctcgtgttcaaaaccttttccttttaattgcagtttgccaccgtgcagagaattgacatcaatagtttcttttcccttaggagacggcggcaattggatgaaatcttctgcgttactcttttccacgagctgtgctgtcttttgaccttccgcgtccattaacttatcagcggggctacccactagctggttgcttgcaaagtcaacatgtgccaaggcctcctgaatgccttcttgatcaataaaaagctcaatctctccggcattagtattggaagtagcgctaatgtttagcgctttatccgctaacaactcgtcaaacttggcgtccgtcaccgcataaaatactttgtcaacttggatcggatcgttgtacttattatcgttcttaacatcccggtgcgcgacggtatttttatccgaaatcttaaatgactgtttcacgccaaaatctaccatgacaatggggtgggcgtctgtttttaaagattcctgaatcttcttaaaaacatccgatgtctggttaacacccaaataatattttcctttagttttagaaaatatcatctgaatatctttcggttgattgcttcctttctcttttggaacaacgaccaagctgtcttttaccgtaatttttttcgactctttttctaagaagaaggttttccgaacaagttcattgcggtctgtaacagcataaacatcgactttgtttgaaccgatggcgtaatccttaagattcaaagtaaagtttttcccgtttaccgttacatcgacctctttcgcctctttttttgacggatcgatgattcttgctcgaaccgactttaattcgtctctggaaattaacttccctttcgcctgaacggcatcttcttgcgtcttcaaagtgtatgaagtatcgagattttcaataacgatctgcgactcattcaactttttaccaatgtcttttaagctatcgggttctttttctcgtttaatctcttcttcaattttttgttcaggtgagcccggctttttccccggattcggttgaggatttggagtatttctcccattggattcatcacccggagtaattattacattaggcacaaattcaggaaccttcgatgtgccctttccgtagcgacttaaagcattgtaaagtgccacaaaagcatcttgtcttgttgccggctcattaggaagtatgctcttgttaattccactattatatccaatgatttttaactccagcgcccatcgaatccaatcaaaaggccattgtgccttggcgacatcttcgggttttagatcttccttcgttaaagcaaccaacatcttcaatacttcagcattggatatgttcttttcaggcttgaatgttttgtccggatacccattcaccatggtgacatcattctttgcattcttatttttagctgcaaattgaataacaccttttgcccaatggttttcgatatcactgaagagagcaggttcttgctccatgagcttagctgcatctttttttcctaagctataaacgatgatcttagtaatttcactccgcttaatcgggcgttccaaagccaaatcgccattttcatagccctcaataatgccttcatgtttcaaatagttaattttttcctgaacgcttttctgctcactatccgaagggaaagctaaagccagtgcattgcttgacgagaccgcaagcatgagaaaagctaaaaacaatgaaagtatttttttcatttcatactcctttctttaatttagataacgaaaatacccacgctcttttaacatcctgattaactttttggtcaattcatgggcaaagagcgcttttttattccctctttcgcttagcgtagcacattaccccccctcgtcaatactttaacgtaatacagcaggcttctttttaatttgtctgcttatccgaacgatgacatgaaaaaagaccttgccgaaacaaggtctcttgcttagttgttcagtccgggtatgagtcgccgcaggccttcttcttggcccaccacggggacacgatagtccgtaaaggtgagcttcaggctttccttcttgccgtttctcgacacgacgacgtccacggtgtcgccggctttgtatttgtaaagctcccgccggagttggctcatgctttgaatgtccgcatcccccattttcaaaataatgtcgttgaccttcaggcccgctgcggcagccggggattcggcttccacgccgccgacgatgacgccttttccgccggtgcctaaatcgtagccgctccgttccacggcgctcacggtgtagccgctcatccccagggccacggatttaaagtcgccggtcttcatgacctgttccacaatgggtttcgccgtgttaatgggaatggaaaagcccagcccttccgccgaggagatcttcacggagttaatgccgatgacttgcccttcgctgtttaaaaggggcccgccggagttgcccgcgttaatggaggcgtcggtttggatcaggccgtccatgtatttgccctgcacttcgccgatgtttcggttcagaccggagatgacgccggaggtgacggagcgttggaaatcaaggcccaggggattaccgatggccacggcggtttcgccgatattgatgctgtcgctatcacccataggaaggggcgtaaggccctttttgtcgatctttaccagacccaggtccaaggtttcgtcggaccagaccactttgccctcggcttccgattgatcgtttaaaagcaccttaaccttgttgcccttggcgccgaccacgtgggcatttgaaagaatgtagccgtcttcggaaataataaagccgctgccgcttccctgaacggccatagggcccattaaggtgtttttcgtcgtggaggtggtaatgcctaccacagaaggcatggcgtatcgagccacgctttccacgacgcctgcttcgtgttttctcgtcttgtccgccggcgcctcaatttggggcctaaggcccgcagacaccgcgggcttgggcatgaatttataggtgacgacactgcccactgtcccgccgatcaaagaaaagatcagcgcccacaggatgagaaagccgccccgtttcttttttcttctgtcgcgataggtttcggggatttcaccgccgtaatctctatttggttccatggtgttcctttctattttcaactgttcatttttacatcctttagttactacgactatacccacttaatttgaacttcttgtgaaacctttacaaagatatttattgggtataagtaagaaagatagaaactattatttacgcgagctttttcgcgaaaaggaggttatactatggattttaaagaaatggtgaagaaaagacgctccatgcgcaagtacaaacaagatcaaaaaatggacgacgaggctttattggaactgtttacctacgcgtccatgggtccgagtaaatccaacgcccatccggtagaatttctcgtggtggaagatcccgaaaagaaaaaagccctggcggaattaaaacgctacggcacgaagtatttggccgatgcgccgcaaatcattgtggtcatgggcaacgacacctcggaacccacctggatcgaagaagccaccattacctcggcttatttgggcctcttgctccattccgaaggctacgcgtccagctggatcaacattcgcgaacaaaccaattcggcaggggaaagctccgaagaaatcgtgaaaaagctcttcaatattcccgaaaactacggcattttgtgtttgattcccttcggcattcccgacgaatggattcaaagcagaaaatacttcgatatctcctccaaggtacacaaagacactttctaaagaaaaagcggccacgaagcctttcgcttccggccgctattttaatgcccttctttaaaggtgatctgttgactttccgaatcgatggctgcgatgcgcacaatggaatagacatcaagccccgcctcttcaagccgtgccctgcccggctgaaaggatttttccacgcaaatgccaacgcctgctaccgtggctccggcctgtcttacaatatccaccaggcccagggaggcttcgccgttggcgagaaaatcgtcgataatcaagacggaatcctccgccgttaaataggatttattcaccatgaccttggatgtgatttttttcgtgtaggaatacacgtcggtaataaaggcatcttcggccaataatgtggcgggccgcgcctttttggcaaagagcatgggcacgtcgaaatgggccgccaccataatggccggcgcaatgcccgaagcctccacggtgagcaccttcgtcacctttcggtccttaaaataatcgtaaaattccgcctcgatttccttcatcaccttcggatcgatttgatgattgagaaaagaatcgatcttcaacacattccccgggtagatcaccccgtcggcttcgatacgcttttgtaaataacccatggctcctcctcgaaagtatttattaaacagtgtaacacatgcggggcttcatccacaaaaaaatcacggcccgtcggaaaaattttttatcagcgactttaaggtggcgagcccctctctcagcttctccacgctcatatttccgtagcccacgatgaggcggggatcgccttcctgtgcttggtctttcgaaaaatccgaaagccccttcatgtagatgcgatgttcttttaaataggccagaagatccgcctcgcttccattcaccttgcaggtcagaataaagtgcatcccggcccgcttgtcgtctacggaaaaaaggtcgtcgcctaaaaaggcctccacggcgatttttcttcgctcgtcgtaaattttccgttggcgattgagccggcgctccaagtggccctcccgcatatacttggccagcgccagctgcacgagattggggatggggcagttcatcaccgggctcaggcggcggtagcgggccatcaaaggccgcggcagcaccataaaagacacccgcaacgtcggcgaaagggatttagagaaattggacatatagatcacccggtccacgccgtctaagctctttaaggcgggaatgggccggccgtaatacttgtattcgctgtcgtaatcgtcttcgataatgtagctgtccgtggccttgacgtggtttaaaagcttcacgcgccggtccacccgcaaaatgctccccgtgggaaattgatgggagggcgtcacgaggtaaatgctcttttcatcggccagggcgtcgggatccacgccggatgcatccacgtccatgaaatcgtaagggatgttgttctgctcaaaaatcttcttcaggcgaatgtagcccgggttttccaggcgaaagacggcgtctgtcggcaaaagggcaaagagaatcaagagcaaatactccatgcccgcacttaaaataatgtcctccgccgccacgtccacgccgcgagaggccttaaggtaatcggccacggcacttctcagctcctgaagcccttccttttcccttcgattcaaaggcgcctcctcttccgccgcccactgaaggcattttttaaaatgattgtcggggaagcggtagtcggcatttttatttaagtcgaaatcataatcgtaagccggcgcctcttcgacgggaaccgccgatgtcgaggcgatttttttgtggagattttctatctccgctacgaaatagcccactcgctccttggcgataaggtagccctcatccaccaattgatcgtaggcggcggtcaccgtgttcacggacaagcccaagtggcgggccaaattccgcttcgacggcagcttctccccctccttcatggcgcctgtggccacagcctctttcatatattcgtacagggcctcgtaaaggggcgcctccccgttaaaatgcatggtaaacaatctggtccctccaaattttatttgtttgatccttttgatgataccaaattcaacgtacaatgtcactgtaaagatgacacgaatcacaaggaggaaacatgaacgacgcatttattaagctcaccgattccctgaaaggcggcgtcattatggacgtcaccacccccgaacaagcgaagatcgcagaagaagccggcgccgtcgccgttatggccctggagcgaatccccgccgacattcgcgccgccggcggcgtgagccgcatgagcgatccgaaaatgattaaagaaattcaaaagacggtgaagatccccgtcatggccaaagtgcgcatcggccactttgtagaagcttcggtcctggaagccatcggcatcgactacatcgacgaatcggaagtccttaccccggcagacaatagccaccacatcgaaaagaaaacatttaacacccccttcgtctgcggcgccaggaacctctccgaagccttaaggcggattcaagagggggcagccatgatccgcaccaagggcgaagccggcaccggcgacgtgtcccaagccgtggatcacatgcgggccattatgggcgaaatcgcctacgtgaaaagtgcgaaaaccgacgagctctacaccctggccaaggacatgggcgtaagctacgagctgctcctctacgtccacgaaaacggcaagctccccgtggccaacttctccgccggcggcgtcgccacccccgccgatgccgcccttatgcgccgcctcggtgtcgaaggcgtcttcgtgggaagcggtatctttaaatccaacaatcccgaaaagcgagccaaggccattgtgcgggccgtggaaaactacatggacgatcgcgtcatcgccgaagtgagtgaagacatcggcgaagccatggtaggcatcaatcccgacgaaatcgaaaccattatggcggaacggtaagacgaaaccttactctctattacacgatgaaacagaaaaagacaaaccccgctttcgaggtttgtcttttttaattacagggctttaaatactgcttctttttcactattcggaccggagatgggttttaaatccaccactttaaagcgcagggccggccatccttccacttcaaagctgatgacttcattcagttttaaatgtctgaagctcacccgcaaatacttttcagggttttccaaatagtaaccccgctcgtcgccgctagatttctccttgcgcaggagcacttcgccgtttgccttgacgacgcctttctcgtacagggccttgtaccatgcaagggtgttggcgtcgggggatgtgttattcaggacattggcctgtccgttaaaaggcgtgcccagtttcggcatgggcttctcttgagggaccggggcctcggattcggagaagtctttgatttgtacgagcttgcaggcattccctccggcggcttccgccttcaggtacaggtcttcaaagccgggaacggaaatctttaccttatcgcccgcctttagaccggtaaaggtgagagatttcgtcgagttcttattgtagacgctgactgaatttttgtccatgtccgtgactttctcaccctgtttcttttggatggttcccttttctgtgaagccttccatccacagcttgctgtcgggatccttgggatcgatgcgcatctttgtgcctaggatctccgtgatccgcactttcttcaaaatcattttgtctttaaagcaggcctcgatcttcagcccatggttttcgcctaaggcagctttcgtaatcaccatttcttttaagtccgcggtttttacgagatcgccttttccgttgatcttccagcccagaaattctttgttttccaccacgggatcggcaaagacataggcttgatcgccttttttcaactgactcagcttatctcctatggcagctttcagcgtgtctacggcgccgcctttatggacgcttacggtcacttcgatgagcttaagtccctttacggcctcgtccacggcccgggttgccgcttccagggcttctttcgtggcgtcggcgtagtcgtagttttcgtactttttcaagaggttcagaagagcttctttgctttcgtcggtgtagcgatcatcggcggccttctgcttggcttcgtcgatttttgccttcagagccgctccgtcgcccttaggcgtgaggtttttcatcgccgccttcagcgcatccaatgcccccttcagctccgccttgtcctttgatttttgcttcgccttcgcctctttcagggcaaggttcaacgcgtcgacactgcttttcgtgtaggcggcggtatcctttgcctcggcttcttttatgctttcggcgaggtccttttgcaattgcatgagctcctcttgaggggccggggcctcggattcggagaagtctttgatttgtacgagcttgcaggcattccctccggcggcttccgccttcaggtacaggtcttcaaagccgggaacggaaatctttaccttatcgcccgcctttagaccggtaaaggtgagagatttcgtcgagttcttattgtagacgctgactgaatttttgtccatgtccgtgactttctcaccctgtttcttttggatggttcccttttctgtgaagccttccatccacagcttgctgtcgggatccttgggatcgatgcgcatctttgtgcctaggatctccgtgatccgcactttcttcaaaatcattttgtctttaaagcaggcctcgatcttcagcccatggttttcgcctaaggcagctttcgtaatcaccatttcttttaagtccgcggtttttacgagatcgccttttccgttgatcttccagcccagaaattctttgttttccaccacgggatcggcaaagacataggtttgatcgccttttttcaactgactcagcttatctcctatggcagctttcagcgtgtctacggcgccgcctttatggacgcttacagtcacttcgatgagcttaagtccctttacggcctcgtccacggcccgggttgccgcttccagggcttctttcgtggcgtcggcgtagtcgtagttttcgtactttttcaagaggttcagaagagcttctttgctttcgtcggtgtagcgatcatcggcggccttctgcttggcttcgtcgatttttgccttcagagccgctccgtcgcccttaggcgtgaggtttttcatcgccgccttcagcgcatccaatgcccccttcagctccgccttgtcctttgatttttgcttcgccttcgcctctttcagggcaaggttcaacgcgtcgacactgcttttcgtgtaggcggcggtatcctttgcctcggcttcttttatgctttcggcgaggtccttttgcaattgaaggagggcttcgtctaccttgtctctttcaacaatcaccgcaaagggagaaaggctctttactttgcacgtcacccggccactctctactgtggccttataggtctttacaccttccgccgtcaagtgcttgatcagggcagggcggccattaaagacggcatccacgggcaggcttaattccaactcgccctcgaactcgcctatgagcttcacgtcgtaggaggcgacgatgtcgtaggattttccttccggcggcaccagttttttgtagtctttcaaaatgctttcggcgacgatgatctgtagtacgccgtcttttattttcgtcttattcgtgacttccaggcgagcgcctttggtcaattttccctttagagagatctttgtatccttgccttcgagggactgcgaagtaaattcttttttcgcctccggctttttttcgggggtctttttgtcttctacccacactctgtcccattggctttcgtagcgggtctgtatccaatcgaaggtttccacccgctttttcaaatcgggatagttgacggcggacatgatttccaaataagcccaatggctttcgggtacgtcgcggaagcttttaatcttctctctgtgagccgccagttcgcctcgggtcagatagtgtttatagagacgattcatcatggcgacggcttcggccctggtgattttgttttcgggcttaaagctcttgtcgggataaccgacgacgatgccgttgagataggcttgctcgatggccgcctcaaagggatgcttcgccgcatcggcaaaggaatgcttgccttcttttttcggaagaatcggggcgagcatgcgagcaaattcgccgcgagtcataggctcgtcggggcgaatggcgccgtttttcgaaaggagcatgtctttttttacggcgaagttaatggcttcgttgtaccacgcgtctttcgcgtccttaaaggccggccgatccttcgatgcggatccggcttccatcttaaataccatttgcgccgattccgcccgcgtcacccatgccgagggtttgaagcttccgtcgggatagccttccacaaagcgttgaggggcgacggttctttcgcccttgttccggtaggaaactgggcgcttggtaaggcggtattcgtaatggcccttgggcttttctttttgctcggggtctttttgcttgggatcttttccttccggatccttttcgcccaccaaatccttgtcttttttcttgggcttgttggtttctttgcccaggaagacgaagtccgcgttttccacggctacgccattggccacttccatggaaaagacgatttttaccagagccgtattcggaaaagctttcttcagctccttttcctttacggaaacatgatagcagccatccacttgcttcacgtcgtaatacttttcgtccaagggtgcttcttcaaatttcggcgtggcgccggtttgggcatcggcctcgtatttttctttgtcgatgcgatagagcttgaccttgggattgcccgctttcgataaattttccaaagcggaagtgtagacgacttctccgccggagaggacggcgtggaggcgtgtgtcgtcgtggcgattggccacggttttcgacgactccaatttcatgtcgactaggatgtttttggtgtagtctttaaatttgctttcggcgagcttgaccaagacgttcttctccgccgggctcagattccctttcgccgccagggccttggcatcctttacggcctttttaaattcagtaatagtggatgagttgcgacctgtgttgacgccgggggcagccaaggcgctttcgtccaagaccagttcctttatgaatttttttgccgcttctacgcgttcttccgtgatttctttttcatcctcggggacatagggcttgtcttcttcttcggcccccgccttttccaggcgatagagcactcggggattgtccgtagctacggccttaagctttaccggaacaaatccttcgacttttatatccgcttcatcccctaccttgagtccgtagatgtaaagggtggtaccttcgactttaaagcccttgctttcgtcggcgacgggcttgaaggcttcgcctttgaccgtgacggtgccttggccctgtttcagcttttcgagccacagcttcgaatcgtcgctcttgccctctacttggatggagtagcgatggaattgattggtcacgaactcgacccgcttggttttatttttcggtttctcctcctcgggcagaggcgacggtctgccttcttccggtttggcaccggcgggatcgatacactcgctgccgatggtttttttatctaattttttcggaatggaggaatggctccaatactcgggatagtcgcctcggccgccgtcgatggtttttcccaccacattgttggcgatggcgacgcttctttcttttgccggggtttcaccggcgccgtttccgcctcttaggtaggcgacggcagtggaaataagtcccttgcccgaaacggccatgccgccttcttgggaatggccgctgccgcccagggcgatgagctcgcctttgccgagaactttcccgtcgtttgccaaggtgagggcgtggccgccgcgggatgtggtggccgaggtacccccgccatagaggtaaattgcggagcgatccaacaccgtcagggagccgccgtcgatggtcatggcgttttgcccgcggtaaggcttgccgtcggcttcattgcctgtcggcgattcatcgcctttgacaaagacattccctttgataaaggcgtggcccttgacgagaaccacgggccgcgtgttttgtatggcgcgaccggcgtcggttaggttattggtgttggaatagatgtaggaatcttccaagacggcaccgtcatttaaaatgatttgcccctgtatcgacgagccggagaccactttttctcccgtaggctttttaaaatcgccgatcatttttccctcggggtcgtaattgatgcgcagtcgcccgccgttgacagtgattttcccgtaaatcgaggaatcgtgaacggtgagggtggctcctttgttgacgacgatgttcacgccggaaaagaccttcatgttgaccagggtcagattcgtgccttcgtttaaaacgagattctgtatgggcaggcggtcttcgtcgggtctgtactcgtgcttttgtcgattgggtcgatcctttacggggaggaccaagcctaattgaccgtaggtcccgctttcgtgggatccttgccacagattgatatttttcggcaccgtataggattggccggcgccgcgattcttctcgttaaagtaggcgatgtaccagggctcttgattaaagagcaccttcccgttggcagtggtcttcagccgcgtgtttacatttttcataatcgaatccagatagaccgactcgatatccgaaacggagaaccacgcctcgttactggtggcctttcgtccgtaaatatccaccagttccacgcgaaccgggtattcacctaccttatccggcgtacccgccaaggtaatggatgaatccgaggcgttaaaggacgccttcatgcccgacttcgggtccagggtgattttcgtcttgcccttgtccacttccacatcggacttcgagagttctttccaggccgaggccttgggcttttctccctcttccgtcacttgggcgtatactttaatatcggaatttttattgtccgtcacggagccggtggcgccgctggtggcgtcgtattttctctggcccaccaaggccccttcgaaatagccttccagcttgacgtggatttttcccttaggcggatgggccacatcgatgggttcaaattttccgtccttgaaaatgtagtggagggtcttgtccttgaactgtaggctcaaggtatgtttatttttcagaggattgatcgcaagctttccgttttcaactgaaaactgcttcccctgcacccatccgatttgattcttgcttccgattttgtcgtgtttaaaaacggaatccgtggtgacgccgatgatgtttccggcctcttccttgggttcgacggcaatctctatgtaactccctgtcgtattttccaattgtagcttcagaccgcctgtctcggcagtcatggcaaaggccgctgatccgttaaagatcatcagcagacttaagagcaatgctcccaatcgtttgatcattcaaatacctccttttaattgatactgcttattattttattatagcaacgtcttttctcagacacaattattttttcagggggaatatggcaacaaaaaaagcggctctccctccatggaaatccgctttttcttgttttatcgtcccgcggcgctttctttgtgtttcttcgccagggcgtcgttttcgaatttatttttctccgcttgggccatcatgagcttgatgcggttggtttggtttaccgccgaggcggaggcgtcgtagtcgatggggatgatgttggccgtggggtaggcttcccgcacggattttatcacgcctttgcccgtaatgtgattgggcaaacagccgaagggctgcacgcagacgatgttgccggcgccggagcgaatgagttccaccatttccgccgtcagcagccagccttcgccgtattgattccccagatccacaaattcttccgcataggccatgagggtttccacggtttcgggcccgtcgaagggggaatccgccagggcgtctcgaatgatgcggcgatagctttccacgtagcggatcatgagttccgcgaggaatctgccttttttcgacgtgccgtagcgttgttccttaatgccggcgtttttaaaggaatagatcataaagtcggtgagatccggcaccaccacttccgccccttcttcttccagttggcgttggacgtggttgttggcctcgggcaaatacttcacgaggatttccccgacgatgcccaccttgggccgcacttcatcccgcgtttccacggcagtgaagtcggcgatcatgtggcggacattttccctgaattcttttcgggcgtagcggcgagctccctcgtttagcttgtcgagccacttcgccgtcaaggccgctgacgtgcctgccaccacttcgtagggccgggtggcgttcgcgaggcgcataattaaatcgccgtagagcatattttgcacagcttttttgccgaggcgcaccatttgcgctttggtgagattgaatcccgggtgtcgctcgatgccctgaagggatgcacctaagacgggaatgtggccgtagcccgcatcttttaaggccttacgaataaagcccacgtagttgctcgcccgacaggcgccgccggtttggctcataagcagggtcaagttgtcggtatcgtagcggccgcttttcaccgcttccataaattggcccacgacaaagatggaagggtagcaggcgtcgttgttgacatacttaagcccttcatccaccacgtgattggaaagatccggcaacacctccacattgaagccctcgctcttcatcatgggcgccagaagactgaagtggatcggcgccatttggggaatgaggatggtgtgggtcttgcgcatggcttccgtaaagaggacgggatctttgtacatggactccgcttctttgtccaaggtgcggttttcgacggcttgaatcaaggagcgcaggcggattttcgccgcccctaaattgttgacctcgtcgatttttaagacggtgtagatcttgtggtaggcctccaggatttcgttgacctgatccgtggtgacggcatccaggccgcagccgaaggaattgagctgcaccatttccagatgctcgctttctcccacaattttcgccgcccggtacagacgggagtggtagttccactgatccagcacccgaagcgtgccgtcgatattttcttcatcgacgatggcatcttccgacaagacggcaaggcccaggcccgtaatcatctccgccatgccgtgattgatctcgggatccacgtggtaggggcgcccggcgaggacgatgcccacggtgtccgtttcctcgagaaaatccatggcgcgcttgcctgccgcccgcacgtcgtcgcgatagcgggcctgttcgtcgtaggcggcggccacggcttctttcaccgcctttttgtcctgctcgggaaagacttccgaaagccgctgggcaagtttctcccgattgtcgaaggagaggaagggattcaggtagcgaatgccgcttttttctatgctctccacattgtttttaatgacttcgctgtagcccgccaccaccgggcagtttaaggtgttgtccgcatgggccattttcttttcttcgtagaagatggccgggtagaagatcgtgtccacgcctttttccaccaggttttcgatgtggccgtgggtgatcttcgccggataacaggccgtctccgaggtgatcgactccagtcctttttcgtagagggcgcgggaagacctatcggagaggacgacgcggtagcccagcttcgtaaagaaggtgtgccagaaggggtagttttcgtacatattcaacacccggggaatgcccacggtgggcgcaccttcgggaaggctttcgtaatcgaagatgcgctttagtttataggcgtagagattgggcagggcttcgtcttcgccacgcacaatgcccgcgcctcgctcgcagcgattgccggtaatgtagcggctgccgtctttaaagatattcacggaaagggcgcagttgttggcgcattggccgcagcgggcgtgttttgtggtgtaggtaaattcgtccagtgcctcgcgggaaagaagggtgctcgcatcgcccccttcttccttggcgataagggccatgccgatggcgcccatggtgccgctcattttcggccgcaccacgtctctgcccgtaatcttttcgaaggcccggagcacggcgtcgctgtagaaggtgcccccttgtaccacgatgtgctcgcctaattttttcgggtcgcgaatttttatgactttttgaatggcgtttcgaatgacggaataggcgaggcccgcggaaatatccgccacactcgccccttctttttgagcctgcttcaccttggaattcataaacacggtgcagcggctgcccagatccaccggcgcagcgctttcgagggccacggcggcaaaatcctgtacgctcaagtccacgccgccggcgaaggtttgaaggaaggagccacagcccgaagaacaggcttcattaagaagaatggattcgatgacatcgcccttcaccttcatggccttcatgtcttggccgccgatgtccaaaataaagtctacattgggctcgaagtagcgggcggcgcggaagtgggcgatggtttccacttccccccggtccaccttgagagccgctttaataaagtcttcgccgtagcccgttacccccgatgacgccacgtaggcatcggctcccatggcatcgtaaagatccatgaggtaggccttcaccctgtccagaggcgagccgttgttagggccgtaagcttcgtacaagacctcgcctttatcggaaagggccaccattttcgtcgtggtgcttccggcgtcgattcccacgtaaaggggaccggcgtaggtttcaagatcccgcctgggcaaatcgcagccggcgtggcgggcgcgaaaggcttcaagttccgcctcgtctttaaaaaggggcgccagaaggtcgtcggcctctacatgcacttcttctttcttctccagccgacggtataggtcttccaccttaacgggctcgtgatccacgctctttaaggcggcgcctaaggccacgaagatctggccgttttccggcgccaaaatctcgtcgtctgtgaggcccaaggtttcgatgaagcgctttttcaattcatccaggaacgtaagagggccgcctaaaaaggcgaccttcccccgaatggggcgtccgcaggccaaattggaaatggtctgattgaccacggattgaaacaccgacacggcgatgtccgctttcgtggccccttgatttaacagggcctgcacgtcggttttcgcaaagacaccgcagcgggatgcgatgggatagattttcgtgtgttccttggccagttcattgaggcccgaggcatcggtcttcaagagcgaggccatttgatcgataaaggccccggtgccgccggcgcaaatgctgttcatgcgctgttccaaactgccgcgcaggtaggtgattttcgaatcctccccgcccagctcgatggccacgtccgtatcgggcaaataggcctcgatggcggcggtgcctgccaccacttcctgaacaaaaggtacctctaaaaattccgccacggcaatgccgccggaaccggtgacgctaatggtggtctcgtcttttttaaactgatggtagaccgtcgtcaaaatttcggtgacggtttttttcatatcggaaaaatgtcgtcgataagtggagtacaagatctccttcttatcgttgagtgccacaagttttaccgtggtggagcccacgtccaagcccatgtgcagcaacattttactaccttctttcttatatatatactgttcgcttttgtcgttggagtaaattataacatcttttttatgaaaaggcagtaattgttttgatctcagtccacattctttttcaccctaaattacgcttcatctcccacggtaatgccgataccgtaggcccctacgcctgtatgggcgccgacgctggcgggcagggaatcgtagcgcacattggccaaaggaaaggcattggtcgcaagttccagccaccgttctttttcctcctcgtcgatgccgaagcccgccacgccgatgcgaatgtgcttcggatccacgttggcataacggcgatccacatccttgtgcagggcgtcgatcatctttagttgcgcccggtacatgctcccccgcaccttgtcgtatgcgtcaaacttttcgccacggtaggtaagcaccggcttaatgctcagcaccgtggcaatggttgccgccgaggcgctgattcttccgcctcttttcagctgttctaaggtggagacggaaaggtagatagtgcagttcatgctgtcttcttccaggatgcgggcaatcttctttccgctcgctttcttcttcgccaggcgaagggcatccatgacggaatctttttgcgtcacggaaatgcgatgattgtccaccacgtgcactttccccccgtattcctttgccaccatgatcgccgagtggcaggagctgcttaagctggaagacatgggaatgtagaccacttcatcaaatccttccgccaaaatcgtgtccagcttatccattaaaaggccgatgggcggttgggaggtcgtgactttttccccgctttccaaaaatcggcaaagttccttttcggttaaattttctccttcgtaataggttttgtctccgatgacaatgggcatgggcaacgtgaaaaggccggcacgttcatcgggggtcatgatgccgctattggtatcggttaaaatggcaactttcatctttcactcctttttatttgctgattttcttttttatttaaacacgctacggcgccgacggatgatcccaaaagggatgccccgaggtagacgggatggggcgtcgccccggcaccgaagtaaaaacttagtatatcacaaggaacctctcataggccgaacaataaaattagagaaaattcgtttttctccacggccttgcgcttttcctctttggggtccgcgtcaaaatagtcgatgcctgcgcctgtcttcctctttataccctttcatcgcaaatccctttccattcttcttcctcttcggtcaatttcaaatggagcaagcttttttgcgtaccttgtgttccgaatcgcccccaagccacggcgatggccttgatctgcacgtccgccttcctcattttccgacaaacaaaaaagcaataaggccgcgccctattgcttctgtttgcgtaatgtctcgagggatcgtcgctcccgtcgattagctttcgcttacggcggcgctcactttcggcaccaattgcttctttcgggacaaaaggccctctgccgtaaatttgtctccgtgaaggtcttttccgaattggcgggccagggcttctttaaagtccccgacgacgatcacttccgagcgttctctgaaaatatcggtaatcattaaaataaacgacgccaccggttctttttccaggtaggcttccatggcctctttcagggatgcttccacggcggcaatgctgtctgtatccatggtgaagatctgacaaatacgcacggcgcgcccgtcgaaggtaaagttttttacatcggtgtttaaaagctcttccggcttcttcccttccagactggtgccggctttaaacatttttgcggcgaaatcctccacgtccatggcggcgattttgctcattttgtccaagatgtagcgatccgtggccgtggatgtaggggagcggaacaggagcgtgtcggaaataatggcggcgcacaaaagcccggccacatttttcgagggcataatgccgctttcgaaatacatttttgacacaatggtggccgtggagcccaccggttcgtttctgaaataaatcggcgatgaggtggccacattggcgacccggtgatggtccacaatttgcaggatttccgcgctgtccaaatcctcgatggattggttgcgctcgttgtgatccacgagaatgattttcttcttaatgtccgtaatcaggtggtagcgggagatgctccccacgacccggtccttgtcgtctaagacaggataggagcggaagcgggattccgccattttctctcgcacctcgtcgattaaatcgtctttgtgaaagaccaccaggttttccttcgtcatgacgtggccgacgggcacggcttgaggcagaatccgcgccaccataaaggtggacaggcccgtggagatcaccgtcacgtttcgttctttggcaagcttcagcaagcgatcgtctaattgggtggtcatggtaaggatcaggagagagacatttttcttaatcgtcgcctcctgatcgtccacgtcgtcgccgacgatgaccacgtccccttcttcgatgaggttttggttttttatggctttaatcgccatttttcccgagagaggccgaggcgatgccggcaagtggatccattggcctcgcaacacatctttaatgttttccaaaccggtgtcggagcggcccatgatacggtcgtcccaaatttccatataggacgcggcgatgtttgaaaggctcacaatgccgattattttttcctccccgttgaccacaggcagggacgtgatgttgtttttctgcatgatctccatggcccccgccatggaaagctccgggttcacgcagtaggcgccgtcgatttccaaatcgcggatttgcggcgtaatggatgtcttaagccgcggcacctccataccgaaataattcagcacaaattccgtttcccgattgatttcccctaagcgaatggcttccgcgtgaaagcccgttttgttttttaattcggccaaggcgatggctgagcagatgctgtccgtgtccggattcttgtgtccggtaatgtaaatcttattcttcataaaccctccaagctcggctattataccacgattttttctcccttcgccgcaaaaatccccttggcgggaaaaatttccccaacaaaaaagcccgacccggcaccgggagcgcgtgatcaataaagccgttattcgttaatgtatagtataattgaaaaataaggatgtatatcacccgttaaattagcgtcccgtcaacttttcatggaacattcggaggttttcgatgaaaaaaaagttttttcttgccggcgtcattctttctgcccttttattgatcctcgtggaaagtaatccaaataaaagagtgcgcatgaaagaggtcaggcaatttacagagaccatgtgccgttccgatgaacatataaaagatttaaagttctactttcaaagacccggtttgagagcggagatggtctatgagggtcccttggaaaaagaaaaactgatttccatcacggaagattttaaggcattggtcgatgtggaatttatgcaaaaaatcggcgataactattggggcggcgctcgacccagcggttttgagttatacatttattgcgatagggataaagagggaaataattacgattatctgattgacagtcgatacaataagacgtacatagtcgatgaaaatcccgacaatattgacggctacaagacttggacgatctccggtgcagaaaatgaaggggtactatataaggattaagtaatcagaaccaccgccatccggtggttttttcatggaaaagtgcactaaaaaagcccgaccccgaaggatcggacttttaatctaaaatttatgctttggcttgttccttttcttctttaattttttcgaaggattcgataatggaatcggccagagcgtctaattctttttccgtggagtcgttcagggaagaagtcacggtgacttcgccgcccaggacgtccatgagtttcatgttgtcgtccaggaattcttccatgcgggtgccggcttggggtgcccaggtgccgttttcgataatgcccacggtgcggttttgcaaattcagcatgcgaatttcgtttaagaattgatgcatgacgggatagatttccagattataggttaccgaagccaatacaatgtggctcaggcggaaagcttccgataccaggtagctgacgtgggttttggacacgtcgtacatgtggacattggtcatgccccgttcgcaaagcttggtggccaagcattgtgcggcgtattccgtgttgccgtacatggaggcgtaaaccaagagcacgccgtcttcttccggttcgtagcgagaccatttgtcgtatttttcgatgaagtagcccagatcttttctccagaccggtccgtgcaaggggcagatcatcttaatgtcgatggtgccggcttttttcagaaggtcttgaacgtgggggccgtatttgccaacgatgttggtcaggtagcggcgggcgtcgtcgagccaatcgcgatcgaagttcacttcatcggcaaagagcttgccgtctaatgcgccgaaggaaccgaaagcgtcggcggagaagagaacgccgtttgtaacatcgaagctgaccatggcttcaggccagtgaaccatgggggcttctacccaggtgatttcgtgtttaccgaagctcatggcgtcgccttcagccacttcgatttctctgccgtcgacgtgaaaaccgaattggtgcatcatcatgaaggcgcggttgttggaaatgactttggcattggggtagcgaatcaacacttcgtctaaggaagcggcgtggtccggttctaagtgattgataatgacatagtccagatcccggccgcctaagacgtgttcaatgttgttcaggaattcacggcatacagcccagtccaccgtatcgaagaggacggttttttcgtccatcaacagataggagttgtagctgacgccacggggaatcgggtgaatattttcaaacaggtgcaggcggtgttcgttggcacctacccagtataaatcatcggttacttttcttacggtatacattacttacctcctaaggcttatttaaaggtacggtcttcagggaaatcgactttaatgaaattgtctttttcttcgccgcatttcgggcagatgtattcttcaggcaatttgtcgaaaggtgttccttcttcgatttcgctttcttcgtcgccccgttcgggattgtattcgtagccgcagccttggcagacgtagatgtcttctttcggtgcggtctttctcggtttggagcgtttcatcttgaccatttcaggtgcttcgcccttaccttccgtacctaatgcttcaataatcagaggtgcaacttcttcgatgtcgccgacaataccgtagtcacagtttttgaagatcatggcattgggcgcattgttaatggccacgatggtggctgcatctttaatgccctttaagtgttggccggcaccggagataccgcaggcgacgtagagattgccgcggaatttttgaccggacataccgacgtagcgttcaatgggaaggaccttgtccgtttctgcaacgggacgagaagaaccgatggcggcgccgaaagcacgtgccaattcttcggccaaatctctgttgccgttaaagcctttacccatggaaacgacgcgttccgcatcgacgatgggcgtcaataaatcgatgccgacgctgaagtcgtagccgtctttttgaagggcggcgatgaggttcttgacattttcttcttgattgtcgctgtcgaagatttctctcttgcgaatgccggtgatgggtcctttacccgctttcttcttgctgccgccggtggagcgagcggccttgccgataatattggctgcgatgacgacccgttgaatttcgttggtgccttcgtagatcgtggtgatctttgcatctctgtaggcgcgttccacttccatgcccttcatgtagccgctgccgccgtaaatttgcagggcgtcgttgacgacttcaagggccatgtcggatgcaaacatctttgcttccgctgcttgcagaccgtagcgttcgccgttggtcttcatttccgctgcacgataaactaagaggcgtgcggcgtcgatcttagtgtacatatcggcgagcttaaaggaaatgccttgattggctgccaagggttggccgaattgaatccgttcctttgcataagccagggcatgttcataagccccttgtgcgatacctaaagcttgtgcggcgatgccgatgcggccgccgtccaaggtggacatggcgatgttaaagcccttgccttctttgcccaagaggttttctttcggaacgcgaacattgttgaagtggagttccgccgtagtggaggaacggatgcccaatttgtcgtagtgatcggagaaggtgaagccttcgaaatctttttctacgataaaagcactaatgccgtgggtaccgatgtccggcgtggtgacggcaaatacgacataagtgtctgccgccggtgcattggtgatgaaaatcttttgtccgtttaaaatgtagtgatccccgtctaaaacagcggtggtttccgtttcaccggcgtcggaaccggcgttggtttccgtcaaaccgaaggcgccgagattttcgcccttggccaagggaatcaggtatttttgtttttgttcttccgtaccgaagtgatcgatgggataagtgcccaaggaggtgtgcgccgataaaataacgccgacgccgccgtccacgcgggccaactcttctacggcaatggcgtaagagataacatccgcccctgcgccgccgtattcttcggcagtgggaaggcccataatacctaaatcagccatttgcgcgacgatatcttccgggaatttgttttcgcggtcgagttcaaaagcgaccggcgcgacaacggtttccgcgaactcgcgaactttctttctaagcgcctcgtgcgcttcggtggttttaaataacatatttcctccttgcaatcaatgatacagactacaatgcatatgaacggccgacagtgaagccggtacaacaatctacacctctcgtgtatagatttactatagcacaggcttttatcgttgtaaaggcatcaggtcttttgttttttcgaaaaaatacaaaatttctcgattattttcgcccgtcctcatttgatacattaagatgttaccccgacccattgaatttatgcgacttttttaaataaaaacaaaaagaatacacaatctacgagaaaacttttttcacacccccaagctttcctttcaccttgattgcactttctccgcccgcacattgcgattttttaaaaatacctgcttttgtattttgcatttttcctttatcttgcgacattattacccattttttatttattattttgtcgaccttattctttcgcctgaaaagcaaatatttatgtttttcacttccctttttgcctttcaccgtctataataagaatcgtttgaatagataataacgattctggaggtaacacaatgagcaatatgattcaaaacccgaatgcaaaagtcattctcgtcggcgacggttccgtcggctcttctttcgcctttgccatgaccttaaaaggtttaggccgcgaactgggcattatcgacgtaaacacccgcaaggcacaaggcgacgccatggacttaaccgccgctttgacctacaactccgcaaaaaccatttacgctgccgaatacagcgactgctccgatgctgacatcgtcgtcatcaccgcaggcgcaccccaaaagcccggcgaaagccgcttagacttggttcataaaaacctggccatcgtcaaagacgtcgtcgaacaaatcatggaatccggcttcaacggcatcttcctcgtcgccgccaacccggtagacatcctgacctacgccgtattaaaaatctccggcttcccgaaagaacgggtcatctcttccggtacgtccttagactccgcgcgcttctgcgacgaaatctcccgctacctggatttggatccccgcgacgtttccgccagcatcatgggcgaacacggtgatacctccttccccgtatggagccaagcttccatcggcggccgccacatcgacgaatggctcgccgaaagaaccgatgacatcgaacgcgcaaaagaaaaaatctacaccgatgtccgcgacaaggcttaccacatcatcgacgccaaaggcgcaacctactacggcgtcgccacggtcctcgcaaaaatctgccgcatcatcatcgaagactcccactccattattaccgtgggcgcattcctcgacggcgaatacggctgccacgacatctacatgggcacccccgttgtcttgagccgcagcggcatccaaaaagtcatcgaagtacccttgaacgaaaaagaaaaagaacaaatggaaatttcctacaaagcattgaaggaagttcaagatcaaggtatggcgaagctcggtttctaatcgagccacatacaactccttagaaaatgaaaaaagcgtcccgcggggcgctttttttgcgtgcaatcatgccaaataaaaatgcgcacccgcaggtacgcattttctttaaaagtcccaaagcctaacggcgcgcatcgccatttagctgaatccatgtttcgcttttgccgtcggaatttctcgtgtagtcgtggccgttggtggcctctacaacgggatagaacgcccagtggctttcgtctatatccgtaaagttcacgatgacttggcggtgggcttgaacccatttttcgtcggcgtagcgattcaacacccgattggtcatggtcgccacttccgagcgcttaatcttttcagcgggacggaaggtgttgtcttcgtagcctgtgatccatcccttgccgaaggcggcagcgatggcgtcataagcccagtaatccctcgctacgtcggtaaaggtgatgggcgccgggttaagcttgtcgaatcgtgtggcgatggccgcaaattccgcccgggtgatttcgccttggggacggaagctgccgtcttcgtagccctttaatatgcccgccgcttctgccttggcgatgtagtcgtaataccaagcgtcgggggccacgtcattaaaggacgcggcggaggcattgggcgccttttccatgaggcgaacaaacatggccgccacttctgcccgcgtcatggatttgtcgggacggaaggtgctgtccggatagccgaagaggtaggcgaagtgatcctcggtgttcagcttaacttcaggcataatcatggatccgcctttgtaatgagttcccggcgtaggaggcgtgggttttttgatcaacaggttgtcgccgagcattgctgtaatggcttttttgctttcatctttttcttcgataaagccaaagctcttcttctgctctttcagctttctgccgtaggagaggaagttcagcttcatgggcgcatctttggcgtaaagcttatagcccgccacgtcgatgggcgtcgctccgtccaccgtggcgtctacataattatctccgtcttgatagaaaacgcggtagaggggcgtggacttgtcgttgtagcgaaggccacggctatcgtctgctttatcgacgggcgtgaaggtgttcacttcgttatccttaaagatgtccacgtggtaacgaccgccttccactaagttcgaaagaggcgttgccgcttccacctttccttttcctaaaataaacgttccgttgtctccctcgagcttcactgccggagctgataacgcaatataatcagagaaatgtgatttcaataccggctgtttgtccgttccgtcgacgaggaccaagcccttggcgtgaatagctacggcatcagaagaaatgccggggaaattcttgtcctgggtaaaaggatgcatcctatttttcatgtagggatagtcgttttgaaagacgtggttccccgcttctacgatgccgccggtgacggtaacgtcggtaccatcgtaaatgccgctccctgcaggtgcaccgtcaaccagttctcggcaagcaccgccggaaatatgggcgttttcagcgacttcaatcttatccgaaccgacaatgccgtggccgcctttctttccactgttgccgccgtaaaccttggcagagtcggagatattaacgacgtcattttgtatgccactattgtcaatgccgtgacccgcttcgagtcgaccgaaaaagttgatacctctccaggttttttcggaaccggagccgccggtgacaaggctatcgcctttgattacaacttttggtacatttttaattccgctacccgccgtaccattacctactaagcagacaatatttgggccacagtaagtgcctgtagcactggtatcgccgccgtgaacgtagccgccgtcgacgataagttcttcaactttttccacaccgtgtccacaagaaagattggtggcgaaatatttatagtcttcttctaatgcgcccgttttgtaggtccattggccatccccctggacgatagcaccattggaaatggtaaccttcttggcaccgacgatgccggagccggtgcggtagcggtcttttttagacgcgtcattcacctgtacattggaaatggttcctcccttgacgcgagcgccatcggtgacaatgacctcagtcgatgtcttaatgcctgcagcaccactctcgggtccatcggctttggcgtaaccgtctgaaggctgtatgttcccaaaattcggtccttctacggagaccttattacctgaaagatagacgtcaccttgagagagaatcatggcttctaaatttccgaaggtcacatttccgccatctactttagtctcggcctttttcgattgaatcgtcaactttcccgttcccatttcgatgacggcgcgaggcgcgaggtggtattggccttttcccgggttccccaaggaccctatcacggtgccgccgtaaatatttacctgggcatttcccttggcgagaatggtgggcccgtaaaagaaactttgatcgaagccccccaaattgctttgcttgctgtcgtcgattccctcaccaaggtccagcttaccaccttcattgacctccacgacgccgacgtaatggtcgcttcccggttcaatgccgggatttggcttagtgcctgcaccggggcgaatgccggtagtataatcagggcttccgctaccgacgatgtctaattttgtccctcgaatggcccctcccgggtagcgtccgtcgccaccttttataagaagattcggaacggtccgttgtgcttggcgaatatctattttgacattgtcggcgagaatggcaaaggcgccttcgccatccttactacttccgcctttgatctgaaaaccttggttgttcgtatcgtccatcacaaagctcttggcgataatggcttcgccgcccttggtgtttccgtcgccggcgccgccgaggattttattgacattctctatattttttctgttgacataaagatagccaaaattcgtcacaccactttctttgaccttatctattatctctttgtaatctgtgcgttcattctttatccccttaatttccttcacctctacggtgccggcgggaaggtcgacggcagccttgccctttgcggcaaagattccggaaaggttggtgactgtcagattcccttgtccatgaataggtgacaccccttcatttccgtaaagccttacggcagacagagctaatgtctttccctcggcgacattaaagctaaggtttcttaatatcgctacctcccacacctggatatttgttttgataggtctaaccatacttttttcagtcttgtactccaactctgccttaatggtcagattcttatcaattgtgattttctcatttttaaagtctttttcctgctttaagcccttcacgacgatggtatccccatctgccgcagctttgacggcctgtttaaattcatcgaccgtgcttaccgtatgactcgttgcaaacaccacacgaggtgccatgacaaataaagacaggcagatcaccgcgagcaatctccactttctcatttttacctcctttactgttcacttcattccatgtatctagtatagtaaataattttggtatttactatgattcttataatttcttttccatcaaaaaacggacacccgtcgatgtccgtttatccttcttttctattccaaggcttcgtatttgctgttgcctaaaaagtctgtgctacgcttgatttttccctcctccgccaattgatccaaggcgctgatgaggccttctcgcgtaaaggacaagccccgtttttccagctccggcaagacggagagaatattgctcgccgcggagatggggaagaaatctgccgccgctttcaggagctgatcttgggaggcggtcttcacttttttcagctcgtcgaaggggttttccgtgtgaggggaggtggttctcgccatgcgtatgcgagcgaaggtggtgcggcccagatgggaggaggagatgaacacgtcgccggtttgcaaatagggcaggcggcgggattcttccacgctaatatccgtctcgccctgaatggtgtcgatgtcctgggcccgcacggtgcggtagatcattttgcagttgagctgggcggtgatggtgtcgtctaaaagggtgggccgctgggtggcgaggattaaaaacacgccgtacttccgcccttcctgggcgatttcacgaagcacgctcttggacggggcggggatgcccttgggggcgaaggtgtggctttcgtcggtgacgacgaaaaagggcgggaagtaatcgccgcctgcgggctgcacgaattgggcgtctttaaagtctcggcgctttttgtagagattgcgaatgaggtaggtggcatacatttgaataagcttcaccgagccttggatcacggcgagcttgccttcaaagatcgcatcttccacgggcctcgaatcgccgcggaaaaggccgtctcgctccacgcttttgagccgccacaaaattccccgcagagaggaaatgttggtggctttgccgaagcgctcatagcgaccttgaatccgctgccattttttctgatccggcgagggcaccatggtcatttcccgaattttatccacggagccggcttcgtgtccctcgattaaatcttcgagcaccgtcgtaaaacccgtaaggcctttgtcgattttaaacaagagatccacagtgctcttcatggcttcggaaagttccgatacggcgtttaggatggtttttaaatcgccgccgtttaaggacgaaaagtcgatgccgatgtccacgccgatttgaaagcgtcggtggcttttctcgtagctcttgcccccttccgcagggtttgaaaagtccatttcgtagtggggatccagtaccacgccggggacgtttttctccataagctcttctaaaagcacccgcatgccgaaggatttcccgctgccgctgccgccgaagatccccatgtgggggtactgatgcatggcccgaaggtccagaacatagggcacgtctttttgaggcgattgcgccccctcttcgtaaagggcaaaaaggcccttgagattgtcttccatggcatcgtaaaggtaatccgtatggcgaatggcgccgaggactaagccttcatcgggagatgtgggcacgagaaggctcttgatttctgtaaattccggccgccgtgcgtcggagcccgtcagcggcggatagggggtctcgtgcaaaaagcgcaccttggccacgtaaatggtttcgttgtgaatgtcgtagcccaattggcgcaaggaggccaacacaccgtcgtcgacgaaatcgccgcctacatccatgggaataaagcggttgtaggtttcggcttccaccacttccccgagaatcgccccctgcacgggatcttcgatcattaaaaattccgccacgcgaaaattgtggtccctgctgccgacggtgacctctctgggattggtcagtcccactacttttatttgcattacactctccgatctctttccgatacgaaaaatcgctccatcatctcacggtccatggcctcttccagtatcaggcgcacttccttttgcctgactttcacttccctgtctacgatgtcgatccaaaagggcacgccgcggccgtttttcggcgtcagggtatagagcaggcgggcgaggaaattcagcgcctctttttgctgagaaagcacgtccatccccaccacctcccagtggcgggtggggcggtaaaatgcccccacgaggcctgcggcggtcttgcccttttcctcctcgtcttcatcttctgcgagaatcaagagctcccctacatccagctttccggctaagtattcccggtcgtagaaatcgtggccgcggcccatgcgccgggcgatgtctcgggtctttatgtctttaatggcgccgacgaggagggtattctcggcgaggcacaggtctctgagcgcctcccacttggcgggggagttaatggcgtagcgcaaaaggcccccgtccatcatgaggaccgccacctcttcctcttccaccaaggccgtggcggcctccagctccacttcggccaggtagcggtcgtggagcttttccgcgctcgcggcgtcgtcgcctgcgagaaagggggtgtagatgcggcgaatgcgccgctcctttttctccatgctaagcgccagtccctgataaaattccacatagtggggataggcgccgccctggcgaatcaccgagccgtctacgcctgccacagcgcccaccgccctgagctcctcctcgcttaagggcatcagttgttccacggtccccacatcttcggtgagggcttttttaaactccagccccgacttttgaaacaggggatcgtacttcgtctttaatgcctcgttcagcgcgccgatttcccggcgaaaggccagcagatcttcttgattcaaagcttcaaactctccttatacaccacattcttcggcaaattccactccttggccaccaccttcgccgccttggaggggctcatgccttcgtcgattttttccttcagggcggagagaatgtccacgatctcttcctcttttttaggcagaagcaccacggcaaattcccctttaatcgtgtagtcctcgatattggcgaggaaatcttcggcggtggtttcgatgcgctcctcgtacatcttggaaatctcccgcacaaaaatcagcccccgattgcccaaagcttccataacatcttggcagaatttttcgatgcggtggggcgcttcgtagaaaatcacggggacgggaaggtcctttaaactttccagagtcttcacccgggcgccgtgtttttgcggcaaaaagccccaaaaaaggtagcgcccttcttctatattggcgatgaccgacgcgcttacgtgggcgcaggcgccggggagaacctcgtagggcctgccttcttttaaaagggccgcgagaagcacggcaccggggtcggacaccccgggcatccccgcatcggatataaccgccacatcttcccccgcatcgagccgcgccaagacggcggcgattttttccgcctcgttaaacttgtggtagctttccatggccgtggcaatggcgtagtgattcaataggggccgggagtggcgagtgtcctccgccaaaatcacgtccgcttccttcagcaccctgagggttcttaatgtaatatcttccaaattgccgatgggcgtgggacaaaaatataccttacctgccataatagcctgccacctcctcgctgtaggcgcccttctcgtaaacataaagggccgcctcaagaaccataaaacagccgccgcctgagacgccttcaaaaagaatgcggcgggccgcctcgccttttttccaatacacgggccgcatccgcttcactgccaccttcgccgcggtcagatccgccacgacctcctgaaagcgggccacgtccacgatgccgtagatctttccgccgggctttaaaaagcgggcagcttcgtaaaaccagtgcatgtccgaatccaaatgcttcgccgcggatatagacgggtcgtcgttttttatgccgtctctgtaaaagggcgggttcgtaaaaatcacatcacatggcgcgagatccaagtctctgaaatcccctaccactgttttgatttcgacgccgtttgccgcggcgcttttttccaccagctccacggcctccttggatcgatccacggccaccacctcgtcggcatccttcgcagccattaaagccagatagccgctgccgcagcccagatccagcacgcggcccctgctctttccgtatgcggcgagaagcacggaatccatgctgaaagaaaagacgcctttcttctgaaaaatacgcatcccgtttgcgggaatataatcactgcccataagccctccttacttgtattataccctatgtggcatgaagagggcgtcacacccaaccaagaaaaaagccgtgagcagctcgcgccgatcacagcttttatttggctctataatatccgttggggagtaactccttaatggatatttttatgcaaaaagatagcacttgttttcccaatcacctaaaattaaatcaccacaaattaataaagggggcaaacaagtgcaaaacaatattaccacattacttttaggaatccaagatgtcgaggtcaccggtgtttcagaagaaagacgcctgattaccattgattgtaagcccgttcatgatcgggtatgtcctcactgtggctcatcccacgcctgggtccacgatcaccgggagcaagtccttcgggacgcaccgatgcggcgcaagcacgtgtttcttcgcgtcaagaagacacgctatgattgcaaggattgcggcgcgcgctttgaagcacctctctcctttgccgccaagggcaagcagatgacaaagcgcttaattgcctatgtagtgg

SEQ ID NO: 35 - DNA, 83051 bp, Peptoniphilus rachelemmaiella
  source 1..83051: mol_type = genomic DNA
tgtcattattccctcctgattgtgattggttggcagacctttcttatcataccattctgggaataacgggtgattatcgctaaagctaaacggaacccccggtctaaccgggggttttctaatgcaacaaaatcgagtaagcgaaatgcttactcgattaagtccaactttatggggtcactctaccattgtcgcgagggctttttcatggaatcaaatcgactccacaaacatattgtccagcaataataaattggtcaggcttccgacgccgccgggcacggaagtcacgagatgtgccttgtccaccacctcatcgaaatccacatcgccggttaatttccccttctcgtcaaaggcgatgccgcagtcgatgatgcattgtccttcgccgacaaaatccgccgttacccagcgagactgcccggtgccgtaaaccaccacgtcgtaatccttcgccagttgagggatgtttttcgtacgagaatgacccaaggtcaccgtggcgtttttatctagaagcatcatggccagaggctttccgatgaccatggagcggttaataatcaacacccgcttgccttctaaatcccccatggcttcggcgatcattaaagcgcttttcgccgtggcaggcatcattttaccctgccccgtgaaaatcttccattgattcaaggggctcaagcagtcgatgtctttttccgacacaatggcgcggtcaatggcctcggcgtcaaaatgcttcggcagcggatgaaagatcagaattccgccgatgcgcccatccttgttgcctcgttccacttcccgtaggagatcgccctccgaagcgccttcgtcgaatacggtcaccgccacatccatgccgacactatccgccgatttcttaatggcgttttcgtaactgatgtccgcctttttatcgccgatgcgaagaatcaaaagtttatcgccgatttctctttctttggcaagggccacttttttctttaaatcctcgagaagcttctcccgcaaggggctcacgtcaaatttcattagttcctcctcattaaaaaagagcggcgaaccgctcttcgtgtttccgacttattataacacgcgcgttgcattgacaaaacgggagtcataatatttttcagataatttattttgtttaacccgtccgctgccgctgttggcgtggatgaaggtatcgttgccgatgtaaatgcctacgtggctaacgcccttgcccgtggtgttgaagaagatcagatcacccggttgcaattgcgaacgatccacttgattgcccacttgggattgtgcggaagacgttctgggaagggagatgcccaattcgttgacataaatggcatagacgagaccggagcagtcgtaaccgccgttgccggtagcgccccatacatagggggagcccattttgccaaatgccgagtcgattacgcgttgcgccttggcgccgtctactttcggcggtgcggcaatgggttcgaccacttttttgaccggtgcttgcttttgaatcacttcgcgttttacggccttcacgccgccttcgccgaagtctaagtagttgggatcgatttggaaatccttgccttcatcgttaagaataatgaagaggccgtctttatagctgacgacatttaccgtttgatctttggccaattggtaagcgccgttggcattttcaagtcttaagttttgctttaccttcgccggggtcgtgtggggcccttcgatggcttcgatgtaagcattttctacggatccgaaaagaccgtcttccgtatttaccgccacggtgttggggtagtgtttcactgtttgaagtgtttcaccgataaaaaggtttctgacaaccttgccgtcttttttcaggatggcatttttctttaccgtgtaatattggggcttgctttcggttaccaggatcttttccttgggaacggtgaccttggcattgcccttttggactatgtagccgcgatcattggtatctacgatgttcgcttgttcttctacggcgaatttcaattcgctgccgctgtacaatgtggtgttatgatcctgcacgaaaacgccggtatctcgaagacctactaccgaaatgattgccaatgcagtcgttccgatggcaagcttgaacttttgattcatgtaaaaacaacactccttattaatacttctcctcgaacgatccctaaggatcattccattcgaaattagatttttcttaatgatcttttgaaattataacacagatggttacagaatgtaacaatttgagaggtcatttatgttacttctctgttacagttctatgacttattatttcttttttaacaacccaccttccacctcgggctgacttttaattgatttcaatggtatactgttaatgtaatcgaatcggaggtgacggccattggaatatgaaaccgactatgacttattaaaagagaaaatcgatgcctgcattgcaaacggcagcatcaatgacggcaaggagatcttcaatacctatcactccgtggacatcgacgatgtgctggaggatttggatacgacggatctgcagtatttcctttttatgctggatccggaggagattgccaatctcatcgaaaatgcccgagaagagcttcaagttcgaatggctcatttctattcgacaaaagaattaatcgatattttcagttacatgaccaacgcggatgtggcggacttgttggggctgttgcctaccagcaagcgcaaagacgtcctgaattacatgaagaaaagcgaatcgaatattcttcaaatgatcttgtcttacgacgacgacagcgccgcagggatcatgacaacggaatttatttccctgaaacagtccctcaccgtgcgtgaagccctgttaaagatcaaagaaatcgcgccgacgacggaaatcatcgaatcgatttttattacggacaatttgcaccgcttgcaggggatcgtcgacttaagggaaattctcgtggccccgggctttaagcctttggcggatctcgtggaaagccatcctttcttcgtctatgcggatcaggaccaggaagaggccgccaatttaatttataaatacgacttaaagtatttgcccgtcgtgaacaaaaacgaagccattctcggcgttattacctcagacgacattatcgacgttatggaagaggaacataacgaagatatcttggccattggtggggtttccaaagacgaagaatacgactccaacttccttcactccgtgaaaagccgcctgccttggctcgttatcaatctctttacggcctttatggcttcggcggtagttgccatgtttgaagacaccatcagccaagtggtggcccttgccgccgccatgcccattgtaacgggcatgggcggaaacgccggcaatcaggcactttccatcgtcttaaccagtttagcccgagacgaaatcagtttggaagaagacctgcctttggttttaaaagagatcggtctcggcattttcgacggcgccgtcatcggctttttcgccggcatcgtcttgtatctgaagtaccacaatgtgtatttggggctgattatttttgccgccatgattttaaacatggttatcgcaggcatcgtgggctttttactgccccttttattcgacaagttaaagatcgacccggccatttcatcgccgatttttctcaccacatttaccgatgtgtgcgggttctttatttttctcggcttggcctctgccctcttggcaaaattagtttaatccctacaaacgacatagatgcaaaaaccgaaggttatgtgccttcggttttctttttccctaaacaggtttattttgcaattgtcgtatagatgcgctgagccagtaccacggcctgttctctggaggcgtgggtcttgggcctaaacgcattgtcttgatacccgtccatcagtcccatggatcggagtgtgtagacggattcacgtgcataggggctgattttattgtgatcgccaaagggcgcgccgcttgttgcgttttctttcacgcctacgctcttaataaagcgcgccagaatcgtcgccatatcttcccgagtaatcttggcattcggcgcaaattttccgttgcctacgccgttgaccaggcctaaacgggatgcgatgaccacggattcgtttttcgtgtctttaaaggggctcttgcccgccaccaaatggacccgttccactttttcatagaggcgaaccatgacttccgtaaactcttcccgggtaatgtcttttttcatgtcagccttcaccgaaggcggaatcaatccgtttttcccggcatcccttaattcctctacagaccaattgctggaattgttaaataccgggcgatagcctacggataccgcattggtgtacccgctttcgcccgcaccgatgtagcggacgcggaagctgtagagattgctctccaaagcgggattcgctaaattcgaaaattgcgctccggaaagcttcacttccgcgcggtccttgtcctttgccgtgagttcgcctttaaagctttggccctttgttgaagaccagggattttgattgactgagctgtcgatttcaaaggccacggtcttgcccgatgccaattgcttcttcacccaatcgggattgatccaactgagcgtaaaggcatcgtaatttccgctttcactttgtgccaaggccaaggccaaatttttcgggctttcgacgccttgggcgaagacgcctgttgcggggagtaagatggacgcacataaaaaaagtgccaataaccgtttcaatgtgtatttcaatggtaacatcctttctttgcttctaaagctcctaaaactatagcaaaaggatggggccccttgaagacttccaccggatttgtaacggaattgtcacttttatttgatttctatgatttgaaaattgtccaacttgtattggaaaaaggaccggacgtcgccttttatggccgaaagcaccaagcgcatgaagccgtcgtggctcacgtagagggtgtcgtcttttgccctctttaaaaaggtttcagcccgcacaaaggcctctttcaggctttcgccccgaggcggcccgtaattaaagggatcgtcgatccaaggcgcgagagcttcgccgtataaatcgtaggcatcgtaaaagctgcggccttccaaaacgcccagattcacttcccgaatcagcgcctcttctgccaccggccctcgatcccataccagggccgccgtcgcctttgcccgcaaataggggctggagacgacggatgttacgcaaagggcgcccaccgcttccttcaatttcttcgccgtggcaggatccacgggaagcaagggttccgtcgacgtggcgtagtatttcttttcattggccaaggtctttccgtggcgcatcatataaatgctcatgagaaaaacaccccgaagaggagcaacatgaaaagctccccagtctctgttatggcgccgtaaacatcgcccgtaaggccgccgatttttcttacggagagtcgagagaagaccacgccccataggcagccggccacgggaaagagaagaaaggatttgcccctcgtaaagagaatgatcgcagaaaggatcagccactgcaggtagtagctgtttttcgacgcgccatgtttaaagaaatttcccatggacgaggcgggtgccgaagggaaaaagtgaatggcggtcagtacgcccatgcgcgccgaggcgaagaatattcccatctccaaaggctgaatggccaccgatgccagcacggaaaatttccccaagagcaccagcaccaaggccaagacggcaaagacgccgatggtggaatcgtgcatgatttccacgacccgatctctgtctcgattagacaaaaagccgtccgccgtgtccatgagcccgtccatgtgcaggccgccgtttaataagtaccaggtgagcagaccgaaaaaggcggcgaaaagagggccgacgtcgtagaagaaattgttgacgaaaccgacgaccacccccatgaaaagcgcaatccagggaaaccagaaaaggctcttccccgcttctttttcgttaaattccgtctcctgcggaaggggcagtcgcgttaaaaattggatggctaaaagtaaactgttcatttgatcttcaccggaattcccgaaatacaggcgtagacttcatcggccgccagtgccagtcgctgattcacgcgcccctgaatgtctctaaatgccctggagacgggatgcatgggtacgatgccgcttcccacctcgttggtgacgatccacagatcgcaggacgtgcgccgcgccgcggcaattaaagccccaagctccttcatgcaggcctcttcgattttctcctcgtccactgcatcctccgctgcggaatacttccacaggtaattggaaagcatcaccgtgacgcagtccaagagggcggcgtccgctccctcgatcgcttccgccaagcggtgatcccgctccaccgtgcgccatgaggcgggccgcctctttttatgggcttcgatgcggcgaatcatttccccatcatctgcggtctgcgccgtggcgatgtagacgacgcgctcgtagcgactcaatcgagattccgcatagccgctttttccgctcctggcgccgccggtcactaatgtaatcatagagactccttttctatattcactaacaggcccggatcgatggcattgtcttccatggagcccatgtttttcatggcgtaaagagctccctccatcaattgaaaaaagagaggacagccgctcccttcccccagtcgcatggcgagatccagtggtggtgtcatgcctaaatgtgtgtttacacgttccgatgctttctcacaactcttatgggagagaaaaatatagtcgcttgcattcggtgccaattgtaccgccgcaagggccgccacgccggtgacgaagccgtcaaccaccgccgccaccttttcttctccgcatgccaaaaacacgccgacgaggcctgcgagatccaacccgcccacttgggcgattttgtgaatcacatcgccgtctccggcgcgggccacggcttttttcaccaccgccacttttttcgccagctgcgctttggtaatgccggcgccgtagcctacgcaatcttcggcggactccccggttaatgcgctgagcagggccgccgaggtggtggtgtttccgatgcccagctccccggtgccgatcatggaggcgccattttttatggccgccttcgccaccgccatgccccgctttatggcttctatggcctcttcccggctcatggcagcctcttcggcaatattgccagtgccgcagcgaatgggcgcatcgataatcgatgcctcccgcgccacatctttcttcatgcctatgtctacgatataaagctctgaatccgcccaacgactcaatgtcgccacgccggtttcccctcgggccatggcattggcgagcatttgcgtaaagacctgaggcgaggagctcacatcttccgccaccacgccgttgtcggcacaaaagacgacgatggcctttttctccacagaaggaatgacccgccgctgaatccccgccaggcgaatggtcattccttccaaggcgccgaaggagcccgtagggtgggtgcgattgtcccaatattccttggcccgtttcatgtacgccttatccgccccttcaatggatccaacaagcttatccttcatggcgttctttccttttatttatttcttcccgaaggcgattgttaatgtaatcgtagcccttggggcgatggggaatggtgcaattggagcagtcttttacgccgcctgcgtaggaaaaatttccgccgcagtcctcgtccagcaaataaagggggcagtaacagaacatgcagttaaaatccccttccatggtgtggcagggaaagtatttgcaatctttattggtgtaaaagcgataagagaattccattcgatatcctttctacgacggccttggtttcggaaaaattcagcccctcttcgccttctgtgcgaatcaccagactcgtcatgcccaaacggcgggcggcgtcgattttttcgtgaaagcccgagccggcgccgctgtttttcgtcaccagaaagtcggctttggcatgtttaaaaagcgccaggttcatatccaaatcaaagggcccgagcatggccaccatgtcttccatggcgacaccggcatcgtgcaacgtatcgatgcttttcgacgagggaataatccgatagatgtggcggctttctccctttaccgactcaaaaagatcgcaatgtttcgatcccgtggtaaagaaaaaggtgccgtttttttcttttatatactcggcgcaagatgggtaatcgtcgaagatcacatcccccgcctcatcctccacgggccggttaaagcggtagtagtcgatgcccgcatccgcggcggcccctttcgcctctttggagacgatcttcgcgaaaggatggctcatgtccacgacggcgacgatgcttttcttgcgaataaaatccaccatggctccgcgatccatgggccccacgtgaacttccgtatcttccggcaggcggtctttgccttcttccccggcgacgctcacgacgagggcgcgtcgatccacgctttttacgagccgcaccgattccgaggtgccgccgatgatccagagcttcataatttatagcccctgggcgtaattatgaagccgttttttacataggtctctttgtttcccacgatgaccatggtgttcatgtcgcagaagttgtcgtccagagccccgattgtggtgaggattttttcttccccgtctcgccgggcgtgtttcaccaaagccacgggcctggtatcctcgtagccttcttcttttaaaatccccatggctttttttaaataatcgggtcgccccttggagcggggattgtaaaagcaaatgacgaaatccccctgtgccgcgaggcgtatccgctttttaattaaatccaagggcgtcattaaatcggagaggctgatggtggccatatcgtgcatgatcggcgcaccgacgcacgatgcggcggcgaaattggcgctgatgccaggaatgacttcaatggcaatgtctttgtctgccgccagttccaacaagggccctgccatgccgtagaggcccgcatcgccggtggagaccatggccgtggtctttcccgcctccgccgaggtcagtgccattttgcaccgctcgatctccgacttcatgcccgtggtgtggatttcttttccctttgtgtaatttttaatgtagtttaaatagggcttgtagcccacgatcacttccgaggcctccaaagcccgaatcatgcccagggtgaaatcctcttcgccaccggggccgatgccaataataaataatttcttcatcttgtttcctttgttatgctcagggttaaacccgcttcagcaattttttccgcaatcatctcttccccgcccataaaggccgccgtgcaggagacgctggagacgccgacggtggctttgacaaagtcgctgcccgaacagcgatcgtcgtttttcgataattcctccgcggtgtaaatcttcaggggaaggttaagctgcttcgccgcataaaggatagcggcctcctctttttttatgtcgatggtgtggatggcagaaagagccatgggatgaatggcataagttttcaatgtcttttttattaaagccaccaaagcctccggatccgtgttcttttttgaaccgatacccaagtgaatccgccgaggcaccagttgaaggccccttttaatttccacgtcttttgtcgtaaccacgacgccctcttttacatccgccgcctcgatggattccacccgctttatatgggggtagctcggcaatgcatcttcttcggagtaccaagggatctcccgcccggccaccatggcggcggccacttctttcatggccaccatatcctcgaatgcgtagttttctttctgcgcaaaaacgtcgatggcttcgaagcccaagctgtctgacgccgtggtgagtaccgcttcggcgcccatggccttcgccagctttacggcataaccattaccgccgcctaagtggccgcttaagataggaatcacgtagcgccccgtgggatcgatgaccaccacggcgggatcctttcgcttgtcctcaacaaagggcgccatgtagcgcacggcgatgcctgcggcgccgataaagacgatgcgatcgtatccgctaaaaatggatccgaactcctctttcttcgccggccgttgaaaatccttgccgaagagatccgcatcggaaaaatactgcttcgccaacgcggccccctgaggcgaaaaacacaataccgccgtcttcaccgctccgcctttctgtattccgtggagaaatgtttgtcgtagagcttgctcttttcgtaatcgctatcgagaaaatctcccacgaggatttgggcgtgtttataaatatcccgcccctccatgtctttaacaatgtctttcaatgtggagcgcacgacgatttcatcggcccaagtggccttataaaccacggccatgggcgtatcgtcggaatagccctttttcaaatcttccaccaaggcctccaattgcccggcggataaaaagatggccatggaggcgccgtgggccgccagcttgtctatggactcgccctccggcaccggggtgcgaccggcgcggcgggtgaggattaccgtttggctcacgccgggtagggtgaattcccgcttcaagcttgccgccgccgcggaaaaagagcttacgccggggatcacttcgtagtcgatgccccattcatccaaggcgtccatttgctcctgaatggctccataaacggagggatcgccggtatggaggcgcaccagatttttccccgcctcggcgctttttttcatcacatccagcacgtcgtctaaatgcatggtggcgctgttgtagatctcggcgccttctttcgccgaatccatgtggcgcgcatccaccaaactgccggcgtaaataatcacgtcagcttcttccaaaagccgcctgccctttaccgtaattaagtccacatccccgggaccggcgccgacaaatgaaatcatctttttctcccctttaatataaacacgccgttttccgcccgcaacaggcccagtcgatcttccctcgagacggccacatacttcaggctccggtcgtagccttctttcttcaaaaaagccttcatggcttcggcgtggctcatggtaatgaaattacctgccaagatgccgccgggctttaaatgatcgtgagcataacgtaatataccgtccaactgccctctgctgccgccgataaaaatgcggtcgtagctttcatctttcaagcaatccggtgcctttccccggattacgtcgatgcctacaccaaaggcttcggcgtttttctcgattaatcccacggcctcgtccttcacttccgccgcagtaaccgcacagcccaaggccgccgcggcaacggaaatggacccggtgcctgcgccgatgtcgagaaatgaaaggccaggggctaattcaaggcccgccacggttaaaatacgcacgtcttcttttgtcatgggcacgtcgccgcgaataaaatcggaatcattcatccagttcaagttcaatcaccgccaatgctaattcttcgtcgatggaaatttcctcgccgatggatgcggagaggatcttttctttctcgtaggaaaggtagctcgcaccgtggatccggcccttggcccccttcgccgccaaagctttcgacagatcactcgccgtgaagtgtttgtctaaaagcacgcagcttaagggttcttttaaaaggagctccacctccggttctctgccgtgaaaggaaaaggcacacatcttctgccaaggaagattcagcaccgccgccgcacattgcatgctgctcaagccgggaatcactttatccacgtgaatgcccctttcacgaaaggtgcctgccagtccgaagaacaggggatcgccgctcacgacaacggccacatgaagggcaggatccatgttctcctccgcctcgctcaggcgctttaccgccacaatatcttctcgaatgggcgttagcttttccgccaagcgcgagaaggccacgacgcgatccgcccctttgatggcttccacggcttcgtaggtcattttctttaaatcgccgggtccggcgccgactatggtaatcatcgctcctcctacatggtgtaaataatggcgtggatttttatatcctcggtttttaagtacaggggcactcgcttttcaatgccccgctccatggcttccataagattttcatagcccatggccgccgctttttttatggcctgatcggcggttttttccgcctccaccgcgtccatttccgccacactcgcccccgccttagccatgtaatagacgatggcttccatgcgcccgtcggcagtggctgagtgggtttggtaaatgccgatagccaccttggccattttgcccacatggcccattaaggtgatttcctgaaaacctaaatccctcgcaagacacagggcgtcgccgaagtaattggataccttcaccacggccacgtccaggcccaatgccgccgcccgctcttcgccgtaattgcccggcgttaaaatcacggcatcggcgccggatcttctcagtttctttaattccaaatcgatggtggccacataggcgcttttgctcatgggaaccacgaggcccgaggtccctaaaatagacaggccgccgacgatgcccaggcggggattaaaggttcttttcgccaatgactccccttcgggaatgtcgattctaatggcgatgccttcatccatattggcgcgaagcaagttctcgatctcccgacggggcacgggattgacggccagctccccggccttgcccataagcccgtcttcggtgaaggtgcctacgccgacgcccttctcccagcgcacatcccctgtgtcggtctttgtaatggtgacgaaaatttccatgccgttcgtaatgtcgggatcgtcgccgctgtctttaatgacgctgtaggtggccgccttctcgctccgcttctgttcatagacgtcgatgatgagcacgtcccccgccggcaccctgacctcgacgacatggatcgtctctcttcttttcagggcttcaatggccgccttcgtcgccgccaccacacaggtcccggtggtaaagcccaatcgcatgtgcttgccgtccacgacggtggtcttgttcatcgtctgaagtcctcgtacaaaagggcgttaaaaatcgatgccgccacattgcttccacccttggtgccgatggtgcgaatgtagggcacggcgtattccgccactttttccttggactccgccgcgccgacaaagcccacgggaacggcgatgataaatttcggatccgccttcttctcgtccacaagttccaacaggcggaagagggctgtgggggcattgccgataataaatccttcgcatccccttttgacggcctcttccatggccacaatggagcgggtggtctttcgctcggcggcggttttcgccacttcgtcgtctgagatcaaggtgatgagttccacccccgatgccgccagggcttttttgttgatccccgcccgcaccatgttcgtgtccgtgtacactttgccgccgctttttatcacggcccgggccgccgccatgaaatcgtcgtgaatgtcgataatgtggcggtattccacgtcgccggtggtgtgaatcatgcggcgcaccacgggcaactcgtcctttttgaaatccacatcgtctaaatattcgtcgatgatttccatggacgtcttttcaatggccatgggctttttttcatacatgccggcaactcctttcaaattgtgtccatcgttctcgaaaccgtgcgttttctttttcgtcgcgaatggccatacggaagtaatgatcttttaagggcgcttccgaaaacgttctgagcaaaatgccttctcttaaaaagaaatcaaaacaagcttcgacatggatatctttcaggcgaatcaaaagaaaattcgccttcccgggcagggcctcggcgatcgtcgattcttcaaaaagggccagtagtttctcacgctccgacgcgataaattcgcgggacttcgccatgtactcgtcgcagtcctttaagcgcagaccgcaggcttccgccacggcgttcaccgaccagggcagctgccgctttaaaaagcgctcccgtattccgtcgtttatcaccgcccagcccaagcgcaagccgggaagggcgtggctcttcgtggcggcccgcacggtgatctgcttcggacgatacagccccttcttctgcgccgcttccccgcccgttacaaaagagaggaaggtctcatcggcgagcaaatacccgccccgggcgacgcaggcttcgtaaattgccgccacctcatctcccgaaagggtatagcccgtgggattgtggggattggtgataatgatgagggcgccctcaggcatgtgggcgataaaatcgtcgacattcaaccgaaagggatggctcatgggataagtgacgatttctttcttcagatcctttgcaatactttcgtattcgccgaaggccggcgtaggcaaataaattgtctcaaagagagaaatgcagatagcgatgatttccatggcgccgtttcccacgacgaggcgatctgcctcaacgcccatccaatcacctaacgaccggcgcagatcccggtaaaagcgatccggatagcgaggcgccccttcgagccctcgtgtcatggcgtccttcaaaatttcaggcacacccaaggggttgatgttggcgctgaaatccgctaaaggatgcgcactcttcccttcgtatgtttttgtatcgccgccatgttccaaggccgtctccttcccacaatcatgctcatgtactgctttctgccggcgaaacgggcgggatctgaagcgaccacccagcgatccgtttcaatcgcttcgaaataaagcaggtgataccccgccgcttgcaaacgggcggcgctctcctcggcgcgggtggtctttaaaagggcgatggtgtccgccgttggaatggcctcgtctaaatgatccgtcaaaagaaaggactcgccctttttcgtcaaactctccacgacgccgtttatgcccgcaacaaaggcgggtatgcccggcaccaattctacgacaaaatccgactcacctgcctccaatacctcgattaaggtggcgtagatggtgccgtcgcctaaagtcagaacgcaggtcaactctccctcttgcgtcacggcgtcaatctgttcaaaggccttttggtagcggccggtcatgtcctcggtcatagggaagtcgagaaaaatcaccttttcgtcatcgacaaatgtttttaccgcctcataggcccgtgattttcccttgttcaggggaatgaaaatgtgatccgcttcctgcaaatagcgcaaagcccgcagggttaaaagatcttccgcaccggggcccacgccgatgcccactaattttcgcatggtctcgcctccaaataggtgcggagtttttccgcataaatggcgcggacaaaatcccagctgcccatgccgcctgccaccggcgcgacggagatgcccgccgcctcgaagcgagtctttacggaatcgtcgtcgccgaaaatatcgtttttcgcgtgatccccggcaagaagcaataagggcgccagctgcacctctttatagccccgccctttcatgtaatccaggggcagactgtcgtcgacggatccttcgatggtacacacccggtggggcagattattttcttcaaacaagcggtttagctcgtcgtaatccttatccgctgccgtgtggctgccgtggcccacgaagaccgtgggctcgtcgaaccgctcgcctgcttcattaacgaagcgaatcaaatccgcctcctcgtggaaaagggcttcgcccacggccacgccgcggcttcttagatcggcaagcttgtcgtattcaaagccttcgatgatgtgaaggggttgaataaaaatctcttccggctgaaacccttcatttaaaaacccttccaccgcttccacttcgttttcgtagcgaatgccggtctttttctcgtagcggccgatgaccatgcgggaagtaaatgccacccgcacaggcacaacggccaacgcttttaattcatccacaacgggatccaaatcccgacgaagggcatcttcgtgggtggagccgaaggtggcgataatcaatgctttcatgcactctcctaaactaaaaaatcaatgatgatgtaaataactaaataaaaaaccgtgctgcgccacatgagcgttgtcacatcgtcgatggcaccgggcgctacgggatgaatcccccgtccgatggtgggcttataaacatactcgccgaagtaatcgtggccgccgccgagggcgatacctaaaatgcccgccgccgccgcttcgcaccagcccgcgttggggcttaaatgggcgccgtgaaattcctttaccgttaaaaaagcccgcttcataagggagaccgagcccgccgaaagacacatgagtagggccgtaaggcgggcggggatcaaattcgccaagtcgtccagcttcgccgccccgtagcccgccaacagataggtttcgttgcgatagcccaccatggaatccatggtgttgatcattttataggccatggccccggcgggaccgaagagggcgccgtaaaacagcggcgcgataatgccgtcggaggtgttttccgccacggtctccaccgtcgccttaatgatcgcctcttcatctaaagacgccgtgtcccttcccacaatgcgagacaactgttttcttcccttttccacagatgtggccaaggcccttttcacgccatgggcttctttgtgcaaggtctttgccgccacggcggtgtaaagcaaatagacggacaggattgctttcacaggcccgctgaaaagccctaaaaggccgcgaatcaaaagaaacaccgccgccgtattcgccagggcgcaggcgatgcccaagggctttttccacccatccctcacttttaaaatcattttatattccgctgcgatgatctttcccatgcccaccacgggatggggcagccactcaggatccgcaaagataaaatccagcacacaagcgattaataattccatggcccgtcctttctgttttcagtttatcatgggcgatggtacgaaacaatagaaccgaaagaactcccgtaaaaacctgtttcttcatggattttcctcgactaaagcggtataatagagccattataattaccaaggaggtcattatggagaaaagaaagtttaagcgcattctcgtcgccaaccgcggcgaaatcgccatccgtattttccgagcttgtcgtgaactcggcatacgatccgttgctatatattcgaaagaagacagcctttccctgttccgaacaaaggccgacgaatcctatgaaatcggcaaagggaaaaatcccgtcgacgcctatttggacatcgacgagatcattcatctcgccaagaacaaaggcgtcgacgccattcacccgggctacggctttttagctgaaaaccccgatttcgctcaaaagtgcgaagaagcgggcatcgcctttatcggcccgagagcggaaaccatgcgccaattaggggataaaatttcctcgaagatcatcgccagagaagccggcgttcaaaccattcccggcgtcgacgatgccattcactccgacgcagaggctctggaatttgccgaagaagcgggctatcccgtcatgattaaggcggcagccggcggcggcggacgcggcatgcgcgtggtcaacagcaaagaagagcttttggatcaattccactccgccaagagcgaagcgaaaaaagccttcggcaacgactccatgtttattgaaaaatatttggaccgcccgaagcacatcgaagtccaagtattaggcgatgtctacggcaatgtggtacacctctttgaacgggactgctccattcaacgacgccaccaaaaggtcatcgagtttacgccggccttctccatttccgacaaactgcgccaagacatttgtaacgacgcattgaagatcacaaaaaatcttggctaccgctccgccggtaccgtggaatttctcgtcgacagcgccggcaaccactacttcatcgaggtcaacccccgtattcaagtagaacacacggttaccgaaatggttacaggcatcgacatcattcaagcccaaatccaaatcgcccaaggctacgccctttccgatgcgcccatcgacattccgtctcaagaaagcatcgaacgccgcggcttctcgattcaatgccgcgtcaccaccgaagacccgctgaacaattttgcaccggacacgggacaaatcaccttgtaccgctcctcctccggcttcggcgtgcgtcttgacggcggcaacggcttccaaggtgccgtcatcagcccctactacgattccctcctggtcaaggtcattacccaaggccgcacctgggaagacacggtaaacaaatccattcgctcccttcgtgaattaaaagtcggcggcgtcaaaaccaatatcggctttttgctcaatgtattgaacacgaaggaattcagagaaggcacctgcgacacgggctttatcgccgaacatccggagctcttcgacattaacacgtctacggacaaagaactccgcgttatggaacacatcggaaacatcgtggtcaacgataattccgacgcgaaaaaatctttcgacgtgccggtggttcccccgtttaaagaagaaagctacaaaggctccaaacaaatcttcgacgaacttggcgccaagaagctttcccaatggattttggatcaagaccgcctgctcttaacggacaccaccatgcgggatgcacaccaatccttaatggccacccgcatgcgcaccatcgaccttttgaaggtcgccaagtccatgaactacaacattcgcgaaatcttcagtatggaaatgtggggcggggccaccttcgacgtcgcctatcgcttcctccacgaagatccctgggaacggttggatctcttgcgcgaagccatgcccaaccttctcatgcaaatgttggttcgcggcaacaacaccgtcggctacaaaaactaccccgacaatgtggtcaaaaaattcattaaagaatcggcggaaggcggcatcgacctgttccgcatcttcgactccctgaactggatcgaaggcatgcgcctggccatcgaagaaaccattgccaacggcaaaatcgccgaaggcaccatgtgctacaccggcgacatcttagacgaaagccgcgacaagtacaccttggaatactatgtcaagctggcaaaacaattagaagatgtgggctgccacattatcggcatcaaggacatgagcggcctcttaaaaccctacgccgccagcaaattagtccgcgcactgaaaaatgaaatctccatccccatccatctccacacccacgacaccaccggcaacggcgtcgccaccgtcttaatggcggcagaagccggcgtagacattgccgatacggccattaactccatgagcggactgacctcgcaaccggccttaaactccgtcgtggcggcgctggaaaacacctccagaagcacaggcatcgacctggatgccattgaccgcatctccgcctactgggctgccgttcgccccgtttacgaacaattcgaatcggatcttaagagcggtaccacggaaatttacaaatacgaaattcccggcggccaatactccaacttgaaaccccaagtcgaaagcttcggcctgggccacaagttcaaggaagtaaaggaaatgtacaaagacgtcaaccaaatggtcggcgacatcattaaggttaccccttcctcgaaaatggtcggcgatatgtcgattttcatggttcaaaacgatttgacccctgaaaatatttacgaaaaaggcgccaatctggactaccccgattccgtcgtcacctactttaaaggcatgatgggccaaccctacggcggcttcccggaaaaactgcaaaagatcgtcttaaaagacgaaaaacccattaccgttcgcccgggcaaacttctggatccggaagactacgaagcggacagagcccacttaaaagacattatggatcgcgaacctacagagcgcgacattaccagctacgccctctaccccaaggtatttgacgaatacgccaagaatttcagcaaatacgatcaactctggcgcatgggctcggacattttcttccacggcttacaagaaggcgaaaccgccgaagtggccgtcggcgaaggcaagaaaatgatcgtcaccttagtcgaagtgggccgtttgaaagaagacggcacccgcaacgtgaccttcgacattaacggctccagacgcagcatcgacattacggacaacacccgccccatgcccaccaccggcggcagcggcaccttaatggccgatgaaaacaatccgctggaagtcggcgcttccatccccggcaccgtggcgaaaatcaacgtggccgtcggcgacgaagtaaaagaatcccaacccctcttggttcttgaagccatgaaaatggaaaccaacattatctcccccatggacggcattgtggaacacatctccgtcaaagaaggcgacagcgtggaaagcggccaattggttttggaattaaaagaaaaataacatcggatagaagaaatgcaacaagcccccgtaaaaccgggggcttttcatatgaaaaagcagcgacgattcagccgctgcttttttatacttcttcgtttctcttcgggcacttaaagtagaaggtgctgccttcgccaagtttcgacttcacgccgtaggaaaagccgtgtaactctaaaatgtttttacagataaacagacccaggcccgtgcccaccacttgccgctcgtgattgtcgcggccgcggtagaatctttcccaaatcttgtcccgatccccatcggccatgcctcgtccgtagtcgcggacgcagtaggtgattttatctttctgctcgataatgtaaatatcgatctgttttttgtccgtggagtagttcacggcattggtgatgaaattataaataacctggcgaattttattttcgtcgcataccgcccgcccctcgccgtgaatggcgaaggtgtagccggtgcgctccagatttttaaagcggcaaagcacatcttccgtgagcgcctttagatccaccgcatctaaattcaactgccccagccccgattccacgcgggatagatccaacaggtcgttgacgaagtgggtgaggtaatccgcttcttcgataatggtctgcacgtgtttgtcccgcaaggttttgttgtcgccggaaatatcccgaatcatttcgccgtaggatttaatgaccgtcaggggcgttttaaaatcgtggctcacattggcgatgaggtcttttcgcatttccagggcgtcggttaattcgccggtggcgtagtttaaggtgcgggccaaatcgttgatctccgtgtagtcctgctccttaaattgtacatcgtaattgccctggcctagggctctcgccgttttcgccatgtccgacaaggggcgggccaggcgggagcttaggtacagcgacagaataaatgccagtatgagggaaataatgcttacgatgataagctgatctttcagtatttccaccgtggaatccacgggatccacattggtggacacggcgaggaaatacttctgccccgcctcttcccctaagtacgacacatataaaatcgtggaggcattttcgtttttgtaatccgccacataggtttcctctgtcttattgtcttttaacagaggctgaaaataagtaaaaaagtcgtcgccgctaatggcgggttggtaaatgtaatccagtggattcaagggaaagaccaatccgccccgctcgttgtagacctgaaggctcagatttttctcgaagctgtagcgcaggagcgtatcttcgaaatcgtctttgccgaacaggcgggtcacggcgcggccgactttttccgtgtcgcgaattttcatggatttgtaaaaggagttgatgaacacgatttgcaaaagccataaaagaagcaagataaataaggccatgacggaaaagtacagccaaaatttcacgcgtatgctcttttgatccacgatactctcccgggtcacgattgatcctcgccgacaaatttatagcccacgccgcgcacggtgacgatgtagtggcggtaaggctcgatgctgtttctcagcattttaatgtgggtatccacggtgcggtcgtcgccgtaaaaatcgtagccccatactttattgaggagcttttcacgactcaaggcgatgttttcgttttcggcaataaagaccaacagatcgaattccttcggcgtcatatccaccggcttgccgtctacatagacttccctgccgtcgagatccacggaaagccccttaaattccagcacgtgattttccttgacgctgctgtttcgcttggcgataaccgagaggcgggccatgagctctttcggcgaaaagggcttcaccacgtaatcgtcgatgccgatttcaaagccgtaaagcttatcgtactcttctcctcgggcactgagcattaaaaccggaatgtctttgtctttttttatttctttataggcgctgaaaccgtctaatcggggcatcatcacgtccatgacgatgacgtcgaaatcttcgcgcttgcaaatttccacagcctccatgccgtcgacggcttccgctacttcgtagccttcaaattccgcgtaggttcgaatcacttcccgaatctttgcttcgtcgtctacgattaatagtttatacataggcacctctttccgatacctattatactatagatccacctttatgactttgcggaatagatgccctttttcggaaagctgaggcggaaggtgctgccgtgatgaagctggctcttcacctcgatggtgccctttaggctgtccacattgtgcttgacaatggcgagacccagccccgtggatttttcgttgtagctgcgggatttatccgccatgtaaaagcgctcgaagatgcgccgttgatcgtcgtaggagatgccgatgcccgtgtcctgtatggtgacgacgaaagtcgatgcatcgtctccgtctaagacgatgcgcacattgccgccttttacattgtaggcgatggcgttgtccaccaaattgcttataagctcccgcataaggtccggatgggtgtagaggcgattgtcccgatccggttgaaagcccaaatggatcgccttctgagcagcatcgggcgcgtaggatttcaacacatccgtcaacaaggcctccatgtccacgacgcggtattcttccggccgattcttctcttccaatcggctcatgctgatcacggcgtcgataagttcaaaaagctttttcgattcgtcgagaataatatccagaaacttctcctgatcctcctccgccaccatgcccgaacgcaaaagctccgcgtagccggagatggaggtgaggggcgtttttaactcgtgggtcacattggatgtaaattcccggcggctgcgctcggccaaactctgttgggtttcatcgatcattagaatcagcatgccgtaaaaggctccggcgtcgttaaatatgggatcgaagaaaaacttaatgaccacgccgtccatggcgattttctgtacatcgtctttttgattgtcgaaggcgcgggaaaaggcgtcgtaaaaatcccgttcccgacacaagtaaaggaggtccttgccctgaaaatgaatgtagagggaagcgtttaagagcttcaccgccgcctcgtttatggagacgatctttcgatcttcgccgacgaggatcactccctcggtcatgttctccaccatgtcgtttaagcccgtgagccttgaggttaagctttccagttgatggcgctggcgcaaggcttcttttttcagggcctcttcgtaggttttgtggagggggctcagcgccatcttgtattccggatcccgaatgtagcggcgaaagttttgtatgagaaaaaccccttcctcttcttcccgctccatccaatagatcaaaagcaaataaagagccatacctcctgccgccgcggcgatgactgcgtagggcaggtagtggaaggtggaggccatcatgctgtcgtgggccatgacctcgatcaacatgctaccgccttcaaataccgtggtgcgaatgtattgggtttcgagaaagcctttcgaatacaccgcccagccggcgctctcctgctccttgagggagctttgtttcgcatagtcgaccaaggcatcggtgcgctcggaaaggctgttggtataaagcacctttccttcgccgcttaggtagacgatgccgtcgtctttgtcgacgcttcggttttttaaaaggcggaggcgttcggattcatctgccgtatgtatcaggcgatttgccaataggtcgaggcgattgacattagaacgaatccctcgattatggtagtcgagggatgcggctatttgaaatataaaggcgatcataaacgccatgaaaaaactgaatcgacgtatctttttgttcattccttatatcctactttgtaaccgatgtttcgaacggtttcaatcagcgaggccttctccttcaacttgtgacgcaaagaagcgatgtgcacatccacggtgcgggactccccttcgaaatcgtagccccatactcgggccataatactctcccgatttaagacgatatctttgttcctgaaaaggtagtaaagaagctcaaattccttgtaggtcaggttaatgggctcgccgtctacaagcaccgtgcgcttcttcttgtcgatgacaacgccgtcgatggcgatggacccgtcgtcctcttccttcggggtggtgcggcgcaaaacggccttcacccgcgccaccaattccagcacgctgaagggcttgacgatgtaatcatccgcccccttgtccagacccacgattttgtccagctccgaagacttcgccgtcagcataatgacggggatcttttccgtggcgggatttcggcggatcttgctcaatagtgagagcccgtcttctccgggaagcataatgtccagaagcacgagagacggcactttttcgcccatggcttcaaagagttcctcgccggaagcgaatccctgcacatcgaaatcgctgtttttcagggcatagacgattaaatcgcgaatgttgccctcgtcttccacacaataaatcatattacaccccgaaagtttctacgcctaggtaatctttgtggtgaccggtcagggagaatatgacccactcgccgatgttttgcgcgtgatccccgacccgctccaggtacttagcgatttgcaaaaggtccaccaattcctcgggatcttcttttccactttgcaaattgccgatgagttttttccgcacttgcacaaagagatcgtctaccacgtcgtcgtgattgatgcactgggtggccaagtcttcgtcttttgtgatgaaggcgtctaccgccattttaatcatggccgtggattcttcaaacatacgagtgattaaatccgtggttacggaaaggggcttatcgtccatggtaagagaaatttcgcagatgtcctgagcgtgatcgccgatgcgttccaagtccgtaataatctttaaagccgcggagataaagcgtaaatccccggccacaggctgttgcttcaaaagtagcatgaggcacatatcctcgatctgccgctccatgcgatccacgtcacggtcgttttcggatacggcatcggcaagctttttgtctcgctcttttaatgccttcatggcatcggccacggcttgttccaccgcagcagccatttttatcaactgggtatttaattcgtttaattccaaatcgtattgttttctcatgccatccccctattaaccgaaacgaccggtaatgtaatcttccgtgcgcgtatcttgcggattagaaaacattctttccgtcgtatccatttcaatgacttctcccgtaaggaaaaatgccgtcttgtccgatacccgcgccgcctgttgcatattgtgcgtgaccataacaatagtataatcctttttcaaatcctgtaccagttcctcaatttttaatgtggaaatcgggtccagcgccgaggtgggctcatccattaaaagcacttccggttccacggccaaggctcgggcgatgcaaatccgctgttgctgtccaccggatacctccgtggcccgttggtggagcttgtctttcacttcatcccaaatggcggcgccctttaaggatcgctccacaatttcgttcaaatcgtttttattttttatgccgtgggtcctgggaccataggcgatgttgtcgtaaatgctcatgggaaaggggttggggctttgaaataccatgcccacccgcttcctcagaaggttcacatcgtagccgggcgcgtaaatatcttccccgtctaagagcatatggccttcgatgcggcaatcttccaccaaatcgttcatgcggttaaggctctttaacatggtggatttcccgcaacccgacgggccgataaacgccgtgatttcattactctttatatccaaattgatcttttttaacgcttgaaagtcgccataccacaaatccacgtcgctgacgaatagttttgtctcactcatttaattgcctcctgctaatttcgatccgataaaggaactgaacgcgttaattaatagggttaatacgattagaataaagcccgtggcaaatgcctgatccacaaacagcccttccgtggaaaggacgtacatgtgaagggacaaggtgcggcccgaggataaaaggcttttgggcatgtcggtggtcgtccctaaggtaaacatgagggccgccgtctcgccgacgcagcggccgatggccaaaatgacgccggacaaaatccccggcacggccacgggaaggacgacgcgaataatggtgcgaagttttcccgcccctaaggcgagggagccgctacgtaaactgtcgttgacggccattaaggcttcttccgtggagcggatgattaagggcaggatcataatggacagagtaaagaccccggaaagaatggaataacccagcttcaaagcgatggagaaaaacaacataccgaagagtccgtagagaatggagggaattccggagagggtttccgtggtgaggcgaatcacttccacgatgcggctgcctttttttgcatattccaccaaataaaagccggtgaagacgccgagcggcgtggcaattaaaagagagagtgccacgacgatgagggtggtaataatggcgggaaacatggacacgttctccgtggtgtaggttttttcaaacatggctccgtttaaatggggtgcccctttgaatacgatatagccgacgagaatcattaagacggcgaaggtcgtaaaggccgccgcgaggataaggccgcgaacaatggccgagcgcgttttcatcagtccatcctcctttttacaacattaaagacaagattaatcagcaagataaatatgaagagcaccacgccggttgcgattaaggcttctcggtgggcgccgctcgcgtaggccatttccaagacgatgttggccgtcatggtccgggtgcccatttttatgctctcgggcacgatgggctgattgcctgcaatcataatgaccgccatggtttcgccgatggagcggccgatgccgagaatgatcgccgccaaaatccccgacttcgccgccggcaccaccacccgcatcaagctgcgttcgtgggtcgccccgagggcgatggagccttgatagtaggatgtgggcacggaacgcagagacgactcagagaggccgatgatcgtgggaagaatcatgatccccaaaagcaccgacgccgtaaagaccgtcatccccgtgccgccccaccaaccgcgcaccatgggcacgaagaccatgaggccgaagaaaccgtagataatcgaagggatccctgccatgaggttcacagcgggcttcaaaattttgtaaagccgactcgggcaataaaatgccatgaacacggcagttaagaccccgatgggcacgccgacgataatcgatccgatggtgacgtaaacagagcctacgatcatgggcagaattccgaaagacggcggcgaggccgtgggcttccaatccgttcccattaaaaacttcgcaatccccgtctgtaaaataaagggcaggccgtttttaaaaataaagtaacaaataacaataatcgagaaaaccgagatgagggagcaaagcagaaatatatactcccacgtcttttcaaaaccttttgaatgcattctcctcctccttttcacggctactttatcaaggtattcttaggaaaagatatggcttatgtaaaatccatgtaaacaaaaaacaggcgtccgaagacacctgctttgatttgtttattttgccagatcgccccatgcggtcatgtcgcctttaaagatgcttttgatttgttccaaggtaatgtctttcgccggattgtctttgttgacgatgacggcgatgccgtcttgtgccaagaccgttccttgaactttgcctttttcttcatctttgagttcgcgggagctcatgccgatttgtgccgttccttcggcggctgcggtgatccctgcagacgaaccgttggattgaatttgaatattggcgccgctgttcactttcttgtaggcttcaactaatttttccattaagggggtgacggaggtggagcctgccacggtgatttcgccgctgacattgccgggggtgtaatcgcccgcttgttcgttctttacatagcctgcttcttcggcaatggcttggccgtctttcgacagagcaaacttgataaagtcggcttctaaggagccttccttcggttcgcctttggtgaccaagaggaaaggacgagccaatttgtagtcgccgcttaaaatattggccggcgtcgcttccacgccttccaaagtgagggccttgaccgtgtcgtttaaagagccaagggaaatgtagccgatggccgaggggttgcctgctacggtggtcataacgccgttggtggagttttgtaccgtcgccgatgccgtggtgttgtccacttcttgttcgccgttcttttccaaaagaccggtaatttcagtaaaggcgccgcgggtaccggagccgtcttcccgggtgatgacggcgatttgacccagcttatccaagtcgccgctttccgcgcccttggacgcgttggcggtgtttttagaattatttgtcgcctgatcgttgccgcccttaccattgttgccggagcctgcgcatgcgacaagactcagtgccaagagggaggccccgatggccagttttacatttttaaatttcatcctttgattcctcctataaaaatcttcatcaactaaatgcattgtatcggccacctattaaaccgatatgatttcaatgtaaagaggatgtaaatcttttcggagcaggatttacaatagctcgtcgatatcgtggatcatgtctcgcggttcccgatccgatgggaaatggctacgcaagtggccgtcgcgatcgatgagaaatttctcaaaattccaatgaatgggatcgtcgccttcgtttaaggcgacaaacagcggatgggcctcctctcctatgaccttgacctttgaaaacatgggaaaggtgacgccgaattgagattgtacaaattcctcgattgccgcctcatcttccggctcctggcccccgaattgattgcagggaaagcccaagacgacaaagccgtcgtcattgtagcgctcgtaaatgcgctgaagcccttcatactgatgggtgcatccacaaagactggccgtgtttaccacaagcaccactttgccctcgtagtcgctgaaatcgacggtgtgtccgtgaatgtctttggcggaaaattcgtaaaaattcatctaatccctccctttccattagtatacgataaaataatatctttctcaattaaaacggcaaacattttccggataagcgtctccattgaaacgcccatggcgaaacatagcggaaacgcgatttcgcccatcaaaaaaggaccaagtcaatgacctggtcctttgtttgttttaagaaattagccgtttaaacgttcgtagttttcgaagcgttctttggcgtttctttctgctgcttcgtaaagtgcttctgcacgttcggggaacagcttcttcaaggacgtgtaacgaacttcgccttcgaggaattctctgtagggtttcgtcggagccttggagtctaagctgaaggggttcttgccttcatctttgagggtcgggttgtatctgtacaggtgccagtaaccggtatccactgctttcttttcttcagcgatggaaacgcccataccttggcgaatgccgtggttgatacagggagcgtaagcgattactaaggaaggtccgttgtaagcttcagcttctttaatggccttgagggcttggttcttgtcggcgccgatggcgatttgtgcgacgtaaacgtagccgtagctggtcatcatgagacctaagtctttcttgcgaacttccttaccgttggatgcgaattttgcaactgcagccgtcggggtagccttggacgattgaccaccggtgttggagtaaacttcggtatcgacaaccatgacgttgatgttttcgccgctggccaatacgtggtctaatccgccgtagccgatgtcgtatgcccaaccgtcaccgccgaagatccattgcgacggtttgattaagacgcgtttcatgctgttgatggaagccaagagcttgtcagcttcagcattgccggtcttcttgtcgagcaagggaagaatcttggccgtagcagccttggtaacttcgtagctgtcggagtcttccaaccaagcgtcgaatgctttggcgatttcttcgtcagcacctaattccttgaattcttccatgtgtttcttaatggttgctctttgttgatcaactgcaaccttcatgccgtagccgtattctgcgttatcttcgaacaaggagttagcccaagagggaccttggcccttgtcgttggtgcagtaaggcatactcggtgcggaaccgccccagatcgagctacaacccgttgcgtttgcaatcatcatgtgatcaccgaagagttgcgtaactaatttgatgtagggggtttcaccacagcctgcacaagcgccggagaattccaggtgaggcatgtggaattgcgagttcttaacattgtctgcaggaatttgatcttgcttggaagatacggtttctgcaaacttccagttgtcagcttgtttttcgaattcgttttcgaaaggtaccatgacaagtgctttttcctttgcggggcaaacttgtgcacagttaccgcaaccggtacagtcgaggggagaaacttgaatgcggtattcaaagccttccaagcctttaccgttgggtttcttcgtttcgaaggatgccggtttcttcgctgcttcttcttcgtctaacaagaatggacgaataacagcgtgggggcaaacgaaggaacattggttacattggatacagttttcaattttccattcgggaatgttaactgcgataccacgtttttcgtatctggaagtaccggacatgaaggtaccgtcttccatgccgacgaatgcgctgacgggaaggtcattaccttcttggcgagtcatgggaacgaggatgtcgttaatgaatgccggtgcgccttcgatttcgtgggattcggtttcgcttaagtttgcccatgccttcgggtagtcaaccttgtgagcagcgttcatacctgcgtcaactgcagcgtagttcatgttgacgatgtcttcgcccttgtgaccgtagtctttaacgatggcttcttttaatttttctgctgcaacttcttcgggaagaacttcggaaagtttgaagaatgctgcttgcataaccatgttggtacggttacctaagccgacttcgcctgcgatcttcgttgcgttgatgatgtagaagtctacgtcgtttgcagcgatggaacgcttcaagcttgcgggaagattttcttctaattcagcttcatcccaggtggtgttcaataagaaggtaccgccttttttgatgccgcgaagcaagtcgtattggtgtacgtaggattgcttggagcaggagatgaagtttgcggaagttaacaagtaggtagaagtaatcttgttgtgaccgaaacgcaagtgagacatggtaacgccgccggatttcttcgagtcatagtcgaagtaaccttgtgcatacatgtcggtgccgtcgccgatgatcttaatggcgctcttgtttgcaccgacggtaccgtcggaaccgaagccccagaatttacaaccgatggttccttccggttcggtgagaatttcttcatcgatggaaagggacaggttggtaacatcatcgacaataccgatggtgaatccgtttttcggttcgcttgcacgcaggttcttgaagactgcgagaatttgagacggggtggtgtccttgctgcctaagccgtagcggccgccgataataacgggacgatcgtcgcggtcatagtacatgtctttgacgtcgagcattaagggttcagcagttgcgcctttttccttggtgcggtctaagacagccactctcttgacactcttcggcatggcgtcgaggaagtgtttcttggagaagggacgatagaggtgaactttcagtaaaccgactttttcgcccttagcgtttaagtagtctacaacttcttcaatggtttcggttacagaacccatagctacgatgacgtcttctgcattttcgtcgccatagtagttaaacagttcgtagtttctgccggttaattcggagatttgcttcatgtaatcttcggtgataccgatgatgtcggtgtagaagtggttggcagcttctacttcttggaagtaaatgtccgggttttgtgcagtaccgcgaacttcgggatcttggggagccaaagcgcgtgctctaaatgcattcactgcgtccatgtcgacgagttttgccaagtcgtcgtattcgaggacttcgatcttttggatttcgtgggaagtacggaaaccgtcgaagaagtgaacgaagggaacgcggcctttaatggcggctaagtgagcaacaccggctaagtccatggcctcttgtacggaaccggaagcgagtaatgcaaaaccggatgcacgagcggccataacgtcttggtggtcaccgaaaatgctcagtgcgtggctagctaatgcacgagctgcaacgtggaatacgccgggaagtaattcccctgcgatcttgtacatgttcgggagcatcaagaggagaccttgagatgcggtgtaggtcgtggtcaaagcacctgcttgaagtgcaccgtgtacggcacctgcggcgccggcttcggattgcatttcctttacagatacttcgttgccgaaaatattctttctgtgattactggcccaggcatcaatatgttctgccatcggggatgagggcgtgatcgggtagatgcacgctaagtcagagaacgcataagccacgtgcgcggcggctgtgttcccgtccattgttttcatcgtctttgccatttcaacctcctaatataacaacattatcctatgactcaattatatcagtcattaattgaatttcaagtcgttgaccgaagtattcaatatttcaatctgttaaaaaacgaacatgctactgccacggatttttttgtcgttatggcgcacaatctttaatggttgagtttatttctttcgatggattccagcacccgttggttcaatgcctccgccgcgttgtagcccattaatttctgtttaaagtttctggtggcgatttcaataatcatggaggtgttcctgccggtgcgcatgggaatttcgatcttgggcacagactttccgaggatgtcgattttatcgtcttccatgcccaagcggttgtagtcggcaaagtcgtcccattgtgttaactcgatgaccagttccacttctttttcttccataatgcagccgatgccgaagaggcgctccacgtcgatgatgccgatgccgcgaatttccataaagtggcgggtgatgctcggcgaggtgccgataaggcgattgtccaacatgcggatcaggacggaatcgtcggcgatgagtttgtggccgctgacgataagatccaaggccgtctccgatttaccgatgccgctttccccggtgattaagaccccgacgccgtagatgtcgagtaggatgccgtgttttctgatggagggggccaatgcccgttgcatgtacgtaatgagtttgtacagggcgacgcttgtggaatcgggggtgcgcaggatggtgcagttgttttctttggcgtacgtgcgcatttccgggaagatctcttgatttttcgtaatgatcagcaccgtaatcaagtgttcaaaaaaggtcttcagccgcaagtcccgcactttcggatccagcccttttaaatagcaccactcggcgccgccgatgacttggatgcggtcggcgacaaattttgtgtaaaagccacaaagttgaaggcccggtcgattgcattccgacgagtagaggcgaacggcgcgggtgttgtccgcctgttggatgacttcgtaatcgttgtctgcgatcagttgttgtacgctgatacttctttttttattgttcatctttacctccgtgaaagtgatcgaccaatgattgtgccgcggcttttgtcatgccgtccaccgatgccagtgtctctacatcggcacttttgattttcgacagggactgaaaggcctgcatcagggcttgtttccgcttgggcccgatgccggggatgccgtcaagttccgactgaaagctcgacttggaccgaaggctcctgtgataggtgatggcgaagcggtgagcctcttcctgaatttgatagataaggcggtagacaggcgaatttttcgccacgcgaatttctttcttattataataaatgcctcgggttttgtggaagtcgtctttcaccaggccggctacggggatgtttagatttaattcttccaaaaccgttaatgcctgggttacctgtccttttcccccgtccattaagataagatcggggaatttggcgaagcctttgctttcgccgaggcccgcttgctctctcaggcctcgtttaaagcggcggctaagcacttctcttaaggatgcgtagtcgtcgggtccctccacgtctttgatgcggaagcggcggtagtcggttttcttcggcagaccgtcttcgaagaccaccatggagcccacggattccacgccggagatgttggagatgtcgtaggcttcgatgcgacggatggattcccccatggccaaggcgtcctgcaatgtttccagcgtgttttccacggttttttgtttcgtacgcatttgatcggcgtgcttgtccagcatgtcgatggcgttttttcgcaccatggtcatgatctgcttcttctcgccgattttcggcacggcaatgtgcacattggcgccctttttctccgtaagcatggcctcgacgagttcccgctcatcgaagtagtcgtggacgtaaagtttccccggaatgtaggcagtgccgtggtaaaactgggcgataaaggcttttaacagttgacccgggctgtcgccgtagggattttccataaagaaatgctccctgcccatgttttttccccggcggaagaagaagatttggatgcacgcatcccgcccctgagccgcgaggccgatgacgtcaaattcgtcgtctttgcccgccgccgtaatgcgctgcttttccgttaaagtataaagggcttgaagcttatcccgaatggccgctgccctttcaaattccagggccttgctcgccgcttgcatctcctcttccaattcgtcgagaaaaggcactttcttgccgtcgagaaaatcttcgatgccttgaatgtagccggcatactcttcggcggatatggcgccgatgcaggggccggcgcagcggtggatgtggtagtttaagcagggcctcaccacgggattgggcttcgataaatccagtttgcagtttctcaaagggaagcgctcgtggagaatgtcgatggcggaatttaccgccaagacgtcggggaaggggccgtagtatcgaccgccgtcttttacgatgcgccgcgtcttcataagccggggaaagggctcattggtgatttttatataggggtactgcttgtcgtctcgaagtaagatgttgtatttcggcaaatactctttaattaaattggattccagaatcaaagactccaattcgctggagacgatgatgtattcgaagtcttcgatgtgggagaccatgctccgcactttcttgtctttttttccgtaggagccgaagtactgccgcacccgtttttttaaatttttcgccttgcccacgtaaataatttgatccagtttgtttttcattaagtagacgccgggatcgtcgggcaaggtctttaatttttctcttatggccaattgactcatgacacgctcctcttggctagtaaaaaactgaccccgtcggtcagttttaaagttggatattattttttaagctttcgaaggttttatcgccgatgcccggcacttcctttaaatcctccaaggtggtaaagggatgggccgtgcggtattcgataattttatcggcggtcttttcaccgacgccgggcaagcgcatcaggtcatctttcgacccgttttgtatgctcaccggcccggtttgagcaggtgacggcccgccggcggaggcggccggcgcctgttcgccgactttgggaatataaagtttttcctcgtcgttaagctttttcgctaaattaatttgcgaggtgtcggcattgcctacgatgccccctgccgccgtaatgccgtctttgacgcgggcgcctttttccagctcgtagagcccgggattttttacggcgccgccgatgtccacgtagatggcggagccgatgccttcctcttccgcaggttgtgtctctttaaaatcgctcttcgccacgtccccgttttcgattacgaaggaaggttcctcggcccccgccgccttcaaacgataatggtagtaggacacggtgagaaccaagaggcacagggatgcgaaggccagaatcttttcccgatcggtaagcttcatacaacctccgaagatgctattttacgcgcgcaatggcttccgcttcgatgaccacatttttcggaagggcggtgacggcgacgcagctgcgggccggcttgtgttccgtaaaaaattccccatagacttcgttgatcgccgaaaattgatccatgtccaaaataaagagattcaccttcatgacgtggtttaagtcggagccggcggcttccaggagattctttacattcgtaaggcattggcgcgtggcttctttgatgtcggtcttgacttccccggttttcggatccacgggaatttgaccggataagtacacgacgccgccgtcttccaccgcttgggaatagggaccaatggccgccacggttttatccgtttgaatcattttcattggtctgcctcgctttcttccttgtctttgctccacagccgttccaaattgtagaactcacgcatatccctatggaaaatatgcacgatgacgtcgccgtaatccaaaatgatccagcgggattggccgttgccttcgtgatggtaggtgtgatagcccgcctcggccattttatcttccacttcttcggcgatggcatttaattgaggtgtcgagccgccactgatgatgacaaagtaatcggcaatggccgtcatgtcgcgaatatccaaggtttgaatatccgcacctcctctggcatcggcgcttttttcgataatgtctaacatggcttgaatcgtgtctttgctcataataacctcctctttttatttgtaccctattatttttgctttacgttcattttgtagaataattggtctgtcccatcgaagtccacgatgtaatagctcaggccgccgatcatgtccgccgtgcccggaaccgtcgccgtttggagattttcctcgccgatggagaccatggtcaggcccatgcgggatactttcgacaggggcatattgctcgtggtgttatccatgtagctcaccaagagagagggcgcatgaagcacccctttggagcttttcactttttgtacaaaggcggacataaatgcctgttgcgccttcacgcggtctaggtcggcatttttgtagcccttcctgaagcgcaaaaactgcatggcctgatccccgttcaggtgttgatggccttttttcagatgaatagacaaaggcggatccgccgagggatcttcgtagtccatgtccatgggcacatagacgtcgatgccgtcgacgatgtttaccacgtctttcacgaaggcgtagtccacgacgatgtaataaggaatatttaagtcgaagtttttatttacggtttccagggccaaatcggccttgccgaaggcataggcgtgatttaatttcgtcttgccgtgatccttgattttcacacgggaatcccgcggcagggaaatcaaggatgccgtcttattttctccgtccacatccagaaccatcatgacgtcgctacgggtattttgtgcttttttagaatctaaactgtccacgccaattaagaggacctgaaatttttcattgctgttttttaaatcgctgatccaggtcttcgcctcggaatcatcgcccatattcgtgtaaaaattcagggctgcgacggcgacaaagacgattaacagcgtgaggaaaaatcctcgaaagaagcttttcatcttaatttctccatgtaatcattgtaacagcggacggtatctaaatgaatggtggtgccgcgctcaatcagaaagagcaaattgccctgcaccgaagcggccatggcctcagtcaagtcggcttcggcttttttccgcaaatcttccacgccgtcgaagtttcgcatgggctccaggtagtcggctaaaaataccacctcttccaccggcgacatgttttccgtccccgtggtgtggtagcgaatggcccgaaggatttcctcatcgtcgatgccgtagtcgactcgcgccgcctccgccgccacataagcgtggagcacttgtggaaaggccttaaaactgtccaggtccttcacctgaaggcgccgggcctcttgccacaagcggtccttgtccttgaatttacaaatatcgtgaaacaaagccgccgtcttcgctttttctacatcgacgccgtgaatttttgcgagcatctccgccatttccgtgacgcgcaaaatatgtttgtatcgtttttcgcctatggcttcgacgatttgatcaaatgctggccctttcaatagatgtaaaacctcttcttcctgatataggccatgacgtcgtcgggaatgaaatacttcaccgacttgccttggcgtatgcgatttcttaagcccgtggaagatatttccaataggggcgtatcgattaacacaacatctgcatcgtaggtggttttgaggtggcgaatttcctcgcgaatggcttctttcgtaatcgccccgtccccgggacgcacggccacggcaaattgtgtcaacttcgccagggcgtcgaagcgcttccaggtctttaagtcctgtaaaatgtcggagcctaagaagaagtaaaattccgcttccggatagattttcttcagcgccgtcaaggtgtccacggaataggtggtggtggttttcgttacttccagatccgacgtttcgaaatagtaatttcccgctacggcaatgtccaccatcttgaggcgctccttggcggtgacggagtaatcccgtttgtggggggcgttgcccgtaggaataaacaagaccttgtttaagcccaagtgggcacgcatgtactcgctcatcattaagtggcccatgtgaatgggattaaaggagccgcccatgatcccgattttcatacttactccagaacaatgacggggtcttctttggcggggcggtagagggtgagcttgctgccgatgccttggacgaactccgcattcaatgcttcggtgagggtggccgccgcctcatttaattccaccgccgtgttttgcagaagggcgatcttcaccaattcgtggtcttcaagcaaatgatcgatttgctcgatcacccccggcgttatgccgttttttccgatttgcatcaacggcttcatgccgtgtgaaagacgcttcagttgcgcccgttgttttcctgtaatcataaactccctactcgaaaaattcaaattcataatccgcaataaaaacggattggccttcttctatgcccagctcccgaagcttgtcgatgacgccgtttttcctgaggttttcttggaaataacgcagggaatccctatcatcgaagaaggtggagcccaaaaggcgctcgatgtacgggccgtcgacaatgtagcggccgccttcttttctcaccgaaatgcccggttctctctcttcttcttccacataatagtcctcgtccaagctgtcgtattcgatgtccgtgttttgaagcacctcatagactttgtagagcatgggctgaatatctttggtggtggcggcggatccggaaaagaccgtgtagccccgttcttccagttcgctgcgcagtgccgcttccctttcctgcgcctcgggcaggtccattttattaataaagacgatttgcgccttgtcctttaatgcaatgttgtagtcttcaagctcccgattaatggcctcgaaatcctccaggggatcccgataataggcgccgcttccgtccagaacgtggatcaatacgccgctacgctccacgtgtcgcaaaaagtcgtggcccaagcccacgccatcggaggccccttcgatgaggcctggaatgtccgcacagacgaagctcttccccgggcccaaatagaccacgcctaaattcggcgaaagggtggtaaattcgtaattggcgattttcggcttcgcactggaaatgacggagagcaaggtggatttacctacattgggaaaacccacgagccccacatcggcgagaagcttcagctccaagacaatggtgcgctcttggcccttaaagcccatttgcgcaaaggtcggtgcctggcgggtgctggttgtatagcgtgcgttgcccttgccgccgccgcccccttgggcgatgacgaagcgttggcccgcttctttcatatcgacgatgattttattcgtcttctcatcccgcaccaaggtgcctacgggaactttcaacagtatgtcttcggcatcggcgccgaattgttttttgctgcggccgttttctccgttttccgctttataaacccgcttgtagcgaaaatccataagcgtccgcatgttttcgtcggcgacgagtacgacacttccgccgcgcccgccatcgccgcctgccggccctccggcgggaacgtatttctctcttcgccaagccacagcgccgtcaccgccgttgccggcttttaccgtaatggtacacaaatcgacaaacatctcacacccccagtatgattggtattatatcacagtccgatttatgaaaagatctcccatctctaaactatgtataagaaaaaataaaccgcagatttctctgcggtttttcttatgctaattcttctacgggaagaacgttaactacttttttctttttaccacgacgttcaaaggaaacgcgtccgtcggcggtggcaaacaatgtatcgtcgctgccgattcctacgtttaacccgggatgaatcttcgtgcctctttgacgtacgagaatgttgccggctaatacgtgttgaccgtcgcctctctttacgccgagacgtttcgattcggagtcgcgaccgtttttagaactacccattcccttcttcgaagagaagagttcaagtgtaaacagaatcatctaaacctcctgagtctctattttaatgtaattttcgtatgcactttcaatggcctttaagcctacgaccatggaacgaaacaaaagctccgtttcatgggacacgatatcctccggcaggcgaatgctcacataagcttccgactgttcgaaggccatggtgtcttcgtcgatagaaagcaaatcttccatggacaaaacacaggtcaaggtgagggcgctgacgccgtgacagacgatttcgcctacctcgtctccctcgcccgcatgattgttcgccgaaaatccgaggatttttccgcggcggacaaataaagtgaccgttgtcattacgccaaggatccgatttctaccagtgtatacggttgacgatggccacgcttaatgcgttcgtttttcttcgctttgaatttataaacaataacctttttgtctttggcttgttttaaaacttttgcttcgactttggcatcggcgacgtagggcttgcctacattcacactgccgtctttagcgacgagaagcaccttgtcaaaaatgacggcatctccttcgttggcatcgagcttttcaactttcactaagtcgccttcgtgaacggtgtattgctttccgccggtttcaataactgcgtacattgtagcacctcctctttacaagactcgccccgataggtgctatgcttttaacctatagggtgcggttacatcacagtatattaccacatccggcctcgaattacaattctttctcttgttttaatttattttttacggcttctctgtgtcttttttccgccgcctgaagctgttgctcaaagggcaactcttttcgctcccgtgcgatttcgaaaaggcccatggcgctgaagccgtagactgtggtaatcatgggtccttccgacagggcctctttcatgaaagccgtaaggtctgccatttgcgcctcgctcatgccgtgaacgaaatccacgacgatcatgccgcttaaatttctgagatgaatctgcttggcgatttcctttgccgcttctctgttcacttccatgcgcatggcgtcgaaagagcctttctttttcaccgccgccatgttcacatccgccacataggcgccttccgtggcatccatgaccacattgccgccggatgggaggggcagggtcttttgaaaaatagcgttccactggctgcgccatttggccgtggagcgaatgctgaaggacggatccacgacgcagtttaagtatttgggcaagcgggcaatgagcttcttgtcgttgaccaccatgggaaggtctctgtagcgattgagcacatccatgcctcggtcctgagttaacaagagttggctcttcggaagaaaattcacggaggcctcgattttttccattaattcacgcaggtgttcgtactctgcggccatgtggcccggctgacaggcggcggcttccgttcgaataatcatccccgccgaagcctttaggccattggcccaacccgtgaggcgctttcttatctccacatcgtcgatgcgcttcgagatgcgaatccccgaagacttcggcaagaggacgatgttttcgccccgaaggctgtaatccatggaaagcacggcccgcttttgatccagaggcgatttctttacttccacaataatggagtcgcccccttttattttgtcccgataagctttgggatagacgtttttcatgggcaaatacccggtgtcgtcgcctccgaaatccacaaaggcgcagtccatggccggcaagacgtttttcacgtagcctctgtaaatatttcccacttgagaggaattggacaggagatgaatctcccgtatgtcgccgtcggaaatcaggcccatgattttcggctcttccccgtcggcaaacaaatagctactagagccgtacttcatgatcgtcaccgtcccaacttttgattcgacgaatttgaatgtagtcaatgtccacgccccgcgtttcgaataagcccattaaaaagcggtcgggccgcaaatttccgttgccccctgcccgcaagacggcgtaaagggcggcgccatccgcttcttctttccatgccagggaaaagatgccgtctttaatgtcttcttccacgacgatgcgcttcttgccttttttctttcgacgacgaacgaggatctcgtctttttccatggcttcatcggccatttttttcagttcgtcgacgctgccgtagtgggccgcgggaaagaaaaagcggtactctgtcttagcgatgcgttcaaacaccgacttgggatcgaaatccgctgtggcttcgatgatctccatgcccacgggcaaggcagaatttagcgccgctttaatctcttcgggatcggcgccgtcttccacttccatgtccattacttcgaattcgctttccatgcctacgctcaagggctgggcgatggaaagcttttgatggggattaaagccttcggaccagagaatgggcacgccggctcgttgaatggcccgattaaaaaggcggatcgtatctaaatgggaaatgaattttatcatgcccgtctttttaaatgccatgcgcagttgcatgaaattcaccccacatttcgcaattttcgatgccgcaaccgttgcattttttgcggcaatccggcgtggtcatcgccgccttggatttttcgtactctcgccacaaataggccttcttcacgccaatgtcgataaagtcccagggaaggatttcgtctttctcccgcaggcgattggcgtaaaagtcgccgtcgatgcccacttcccccatggacttgacccacacgtcgtagcggaaaaattcgctccagccgtcgaagatctgaccgttttcgtaggcgcgcaagatgagtttgccgattcgccggtcgccgcgggccaaaatcccttccatgcgggaaaggtagggctcgtggtattggaatttcaccttcggatcccgcaccgcccctttcacggcgtggatcttttcgaaaaattcgtcgatggtgtcctgtctttcccactgaaaaggcgtaaagcccttgggcacgaaacaggaagcggaagcggtaacgcggaaattgccctgaatttcttctttgggccgattgaaaaaggcgtctttcaccttataggccaagtgggcgatgcctaagacgtcctccatggtctcgcccggcaggccgatcataaagtagagtttgattcggctccagccttctttaaagacggaattcaccacccgcatcaaatcctcttccgtgacgtttttgttaatcacatcccgcatgcgctggcttcccgcctccggagcaaaggtaagcccgctttttcgcactttctcgatctccttgagcacatcgacgatgaagctgtccaagcgcagagagggcaggctgatccccacgtttttctcctcgtaagtgcggctcaaatcctgcaccagaggcatgaggcgggtgtaatcgcaggaagagagggaggtgagggagatctcgtcgtagcctgtgttttttaagatggattcggccatgtccgttaaggtatcgacgcttcgctcgcgaatggggcgatacatcatccccgcctggcaaaagcgacagccctgggtgcagcctcggaacaattcgatgacggcacggtcgtggactgtctccaaaaaaggcacgatttgccgatccaattggaaggtggcgttcatgtcgtggagtcgcacccgcttaatgacgggcttcgcttcgtccaccatgggcgtgtggctttttattgtgccgtcctcgttgtaggcgacttcgtagagagagggaacgtagaccccttccatggcggccagggaacgaagaatttcttttctggaacgacctgcggcgcggccctctttgatcttgtccatgacctgtatgtttaaatgctccccttcgccgattaaaaagcagtccatgaaatccgccaagggctccggcgttgtggcgcagggtccgccggccatgacgaagggctcgtcttctcttcgcgcttctgcgagcaaggtaatatttcccatgtccaacatatagagaatgttggtgtagctcatttcgtattgcagggtaaagcccaccacgtcgaattccgacaggggccttttcgtctccaaactatagaggggaatcccttcgtttttcatagcttccgccatgtccggccagggcgcaaaggcgcgctcgcaggcgtagtccgtttcgttcatggcaaaatacaaaatctgcatgcccaaatggctcatgcccacttcgtacacgtcgggaaagcagaaacaaaagctgagcgccgcctcgtcttttaccacactatttaattcgccgccaatgtagcgggcgggcttctccactttttttaaacatttttccagtcgttgcgcgtctatcatggaaacctctttctaatcaccgtctctagcgcccttttagaaaagaccaaaaagacttcttttctcctcctccggctgctttgccttgaagggaaaaagacggtgcttgtacttcgttaaaaaacagggcgtcgtcgagatgcaggttttcgatgccttccagtgcttctctgtctccgggctttaggcgattcaacaccacgaccaccttggcggggcatttgttttgccgaaggacaaagcgaatgcggtccaggttgcgaaccgagcccggttcattggtcacgacgcaatagatgacatcggcggccttggcccaattcacgaggtctttttctctgtagcgggacagatccacaaagacatcgtcgtcgcctaagcctttaactgccttgaaaaaagcctcgtcgtcgatttcttccaaatcgtgaaagatgtttccctgaatgaaatcgtagccctctccttcgatcgccacgtcgtgcaggggctttccctgaagaaagtccatatagtcttcgatggcatcggttgcttcttctaaaaacatatcctgcacgcgggtgcggttggaagcctcaattaaaaggcccttcgcctctttggcgaaatctcgggccatggtgctggtgccgcatccgcccaccgttgaaataatgacagtaatcatgcttactccgtttccaatcccgtttccgtcgggagggtttcatctttgatttctttgtagaagccgaaatactgagccaaaacctgttgcataatgggtccgcagttggccccgttgcccccttggaacaagaccacggtcacggcgatctcgggattatccgccggggcgtagcccacttgccaagcgaaagcgtcgtagctttccttggtgtaggggttcacgccggcccgttgggcactcccggtcttcatggccacttccacgggaaacttttcaaacaagttggcattgagacctgacagggccacaagcttcatgccttcgcgaaggtctttataatactcgggctttagacccacttgtttcactgcctcttttttgtgatctttccccgtcaataaagtcaggggataaagattgccgccattggccagggccatggcgtagcgctccatttccaccggcgtataggcattggagccttgcccgataaccacattcatggtatccgccatggtccatttggattgatcgatgtaggtgtattttaagagatcggctaaaggcactcgctggcccttgcccttcttctcaccgtccacatgtaaatcctttaaaaaggtgtagacctcgtcgcgggtcatgggcgtcttgtcgtctaaacaattcaccacggcattgactgccttgtctctttccttgtcggaacgaatgtccgccatatagacggagcggttttcgtttagatggcgacgcaggagggcttttaatgtttttttcttcgactcgggatcgggaatggtgcctttgctttctcgcggtatggcaatttccagccccgtacgatcccctaaaccgtagcgcttggccatggcggcgatttcatggggcttcacttgaatgcctaagtccacattgcgccgttggtctttcccgagacccaatgagtaaaagtaatagttacaggaatcccttaaagcataggccaaggtttcattgccgtgtacctcgcggctctgattccacaaccagcaaccgaaggttctgccgccgatgtccacataaccgccgtcgggaatttccatgtcgggatccaagcctttttcaagggccacggaagccgtaaccattttaaaaatactccccggctgaatcgccgattgcatggcgatattataaagggggcgcggcgccagttgattgtcctcttccttgggctttaagctttcccaagccgagggattgatccctttggcgaagagattggggtcgtaggaaggataattggccagggccaacacctcgcctgtgtgcacatcggccacgaccacggcgccggatgcggcatttttaaaggccgtgcccttttcgcggctggtcaggtaggaataggtgccccaaggcgagacgtagggcgtggcggtgcgaatttgttgaagcaccgtggccaaactttcctccgctttcttttgcaactcgatgtcgatgctcagacgcacgtcgcctcccggctctggcttcacttcccgaatcacgccggtggtgttgcccgaggaatccacggagacggtttttctgccgtcggtgcccttgagccgatcttcgaagacctgttccatgccggtctttccgataaggtcgttgcggttgtagcctcgctttttaatgtacttgtcgatttccttgtcttgggcaatgtttccgatatagcccagcacatgggcgcctaaattcccctcgggataatagcgaatgggctccacggaaatatgaatccccgaacgattggagagtttctcttcgattttcgccacggtttcgtcttgaatttcgtaggcgtagttaatgggcatgtaggcgtaactgccctgactgccgatggcgtcgtagacatttaaaatgccgaagacttcgtaggggctcaggtgcttgtcgatatcgaagcggtccctgcgggcttcgaaaatttcttttgacgaagcggcgccctttaagcccgccccctttgccaggtcgatggcattattcaattgggtgtagtttggcttttctccgctgacggaaatccccgtggccatgccttcgtcaattaagtagctttgcaccgcctcggccatgccgtcgacggcggcaaactcttttctgtatttctttgccgtgatgagtttcaccaattgtgcgttggccaaattgccctttttatccaccaccacggtcttgtcgttttgtttctttagttccagatccgcgccttttttcacagcaaaatccacactgttttttaataccttctcatcggagaggaggaatttttccggattgcgctcctttaaaacggcgattaaatcttccgccgcagtcgaggaccagctgacctcgggggagatgtccatgagccgcactttcgcctgaatgtagccgtcgtagtattcgttgccgtagcttctcaggcccacggaaggcacgtcgtttttcacaatatcataggccagtttacggccgatgggatgagccaatacctcttccacatacatggggtggtcaagcaaaaaagcaattaaatcctcgtcggcaccggtggtttgggcgaatccgtagcgttccttaaagcgggcggccttttgcggatccgaatacgccacccgagtgcctacgcgaaccatgcccccctcttgaaacacccgttggcgaagcaattggtttaatacggaatagccgtaatggctgcggtagggctttttcaggcgactgccgagaaacgcggcgagcttttccttgttcatcaaggcattcaggaccaaagacttgggcgcatcgccgcttttgtagtcgtttaaatcgcgatagaccaagctgtttaaaagaatgggattggccttcatatagcctgccccgtcttcttccaagtagcgactcaaaagtaggtaggcattgtttttctcttcccgcgtgaagcgctccagctcgtcttttcgaatttgcacggcaaaaacggggcggtttcccgccaaaacgacgccgtttcgatcgcgaatctttccccgctgcgccgtaatggcaatgtcttttacccgccgctcgtcggcgagcttgcggtatttgtggccttgaatcaaggtaatatgaaagagttgcagcaaaagaaagataaaaagaacggccatgaccgtggtaaagatcttgtagcgatcccatgccttcgctttttcccaaaaattatgcatcgctatcccttccgagcactctgtaatctgtaacttcctttaaaaaataatggctcatgaccgcgccgtagattcccgtggaaaggggcacggtgaaaaaggtgtaggaatccaccatgctcacctcccagccgaaaatcatcagcaaaatgaaaaagaccaattccgccacagccgccgtcacggcgacaaccactccggtagccacaggcgccggatggggaatgaggtgatcccatccgtaggccgcggcaaaaaacatgccgtggagtagcacatagggcccgatggccgccgctactgccccgtccatgataagggcggatacaaaagcgaaggccaatgcccactttttgttaaggcgaaaaaggataaatagagcggctgccggcaaatagccccgcagaatcgacggcaaactttgaaatagaggcgacatgtaaataaatggcgtgagaaaaagaagcgcgtcgcttactcgtttcatttcccacctgccaatacaaatacccggtagatgttgtggaaattaatgccactgtccaccttaatgtttttcaccattttatcttcgtcggtgctcacttcgctgacggtgccgatgtacatatccggctcgtagccgtcgccgatgcccgtggtaaagagggtatctcccaccacgatgtccgcatacagatcaaaggcatagccctccaagcgtcggtttacgccgcggagcacgccgccgtcggaggtgcggatgcttctaaaactaatggcgttttcttcgtcgatgatgctccgcacctgagcggaaaaaggcgtcaccttggtgacatagccgataaccccttccgccgacgcgtcgtcgcccttggtcatgggagcgatgaccgtgtctcccacatgaatgcccgccttggagcctttgttaatggtaaagcggtggaaatacatccctgaagacttcgccgtcacccgcgcatccacggcgccgagctttcggttgtttcgaatggcgtaggcgttggacaaaaaggtggagcgattgacaatgtcttccaggtttttattttctcttttcagttgggtcagctcttttttcatgcgcttattttcggcgcttaaggaggtaacgtgaatcaggcttctcgccccttctcccacgtagttcagacccgtgcccaaggtgtcggtgacggggcttgcggcggtagacacggcgaaatccaaattgcgcagaatgtcggcgccgtaaggggtaaagccgaaaaacaaaaataataggacgagggccccgcgcttaatccaatttttctttaattctactaagggcttcatagcctataacgctccatcttctaaaaaactgtaaaaactgtgatcgccgacgataatgtggtccacgacgggtatgcctaaaagctcgcccgcccgcttcaagcgctcggtgaggcttctgtcttccgaagaaggcctgggattgcccgccggatgattatgtaccaaggcgatggaatggcatttcttgccgatggccccttgaaagacatcccgcgggtgaaccacagtgcagtccaaggtgcctctggagatgcactccacaaattgcaactccttcttcacgttcaggccgatgacgcgaaactcttcgtgctgaagccccattaaatccggggaaacgaaatccgcaatggctttcggcgtgtttaggggcacggcttggcccatgggccgacgcattctccgcgccatttccaccatgccaacgaggcgggcggctttgctctttccgatgcctttgacggagagaaaatcgtcgtaggtgccggtgaaaagagagctcaggccctgacgagccggagacttgctttccaagctgtcgataatatcctgtgccacctcgatggcggttctgcccatggtgccggtgcgcaaaaaaagagccaaaagttcgctgtcggagagggcttcggcgccgtaagtcatgagcttttcctcaggcagcgtggcgtgatcgtagtccagaagctttttcttttccccattatcgctcatggcccactcctttcaattgcttttcaatggatgccacgtgcatgccgatgaccgtgtccatggctccctctaccgtgatcttaaattcgtcgatgtcctgcacgccataggcccccgccttgtccatgtaggtgtttttgtctaaataggccttcatttgcgcctcggtaaaatcttcaaagtgcacgaaagactgatcgtagtctacgtattttttctcgcctaaaatggcgtaggcgctgataacccggtgcgtccgccccttcatggccaaaagcattttctcggcctcggcgcggtctttcggcttacctaagattgtatcgcccaataccaccaccgtatccacggcgacgaccacatcctccggccgcttttctttcacgcacatggccttttgaagggccaattgcatggtgtagatctccgcaggcgacaaacgcaaatgcctttcatcgtagtccggtttttctatttcgaaagtaaatcctccctccgccaaaagtttttttctgcggggagatgacgaagccaagactaagctcataaacgcactccgatcttttgtaaatgacgactgacataaatggccgcgaggcccacgaaatagcctgtaaataatcctaaaatcaagaggagaggcaaataggtcaaaaggcccatgttatgaaccatgacaatggccgtggtgatctgtcccacattgtggaagaaggatccgataaaactgatgccgatgagtgtggcgctcttaatggtttttaaggataaaatcatggccaaagacgaaagcagggcgccggtgccgctgtagaaaaagcttgtcacattgccggtgacgagcatcaaaagcacgctttttaatatggccacgacgaagccttccttgggcccgaagaccacgatggtcgttaaaatcaccacattggaaaggcccaggcgtgctcccggcaggggcacgggcaagggaatcatggtttccataaagcccaaggccacggccatggcgatcattaatcctaaaaatatttgttttcgactatccatgcttacctcaacaatagatccatggtgggcgtctcgtcgcttttgatttcagcgatgatgcggtggggaaggcagacaatcatctctcccggccgcttaataggcgccatatttaaacaaatgccgtcggggcagtcggactccgtcatctttgccccattttcgtcaatggtcaatttatttgtgccgccgtgcgagtggaaaacatacgtctttcctctgtgggcgtcgtccatgggaattttcttcacttctttgccgtcgatttgcacgctcacataggcgtgggccgcttcttttttcggaatcaactgcgtcgcaccgaggcccaaggcgacgacgagaataacgaaggcgatgatcacatcggttttattcatggctcccccctttttcaacatttaattataccatagataggcagcggaaaaagaaaggctctatgggaaaaacaaaagccccggcatgaactattgccgaggctttggaagtccgttctattttgttgctttctgaaattatcaaaattcgttttccacaacttcatccggtgagtcgtaacccggggtcgtaattctctcccatcttcccgggtcatacttgccgcttttaattaccatcgtcccttttaccttttcgtagtcaatagagaaaattgtttttaaatcttcaatatcaatatagaaaataccatctttcacaaaaggcttatttttaggtctaaagtattcgcgggttcccgggggcgcctcatagagttcatcaatacttataaagatgtttttctcactataatacgcatcgaaatactcatctcccttgccaggccaagcaaccaagaaccaagtctttccatccccggcatccttatagtaggttgccggatcgttgtaatctcccggcaattctcctctcggcgtatcagtaacgggcatgtattttacaaatagcagattcatctcgccaaaaggataataggtaaccccatctttgacgataacatccaccgtccccgcatcttttccttcaatgttcaacggcactatagcgctttctatatttttgtgggccttcttttcagctatcacgaattggcggctcttttgatcgtaatcataggtcatttctcgttccttgcgcacgccgccggcttcagtattttctatataggtttcgttgtttacgaaatgatcgccgactttgtcgaagagatcgatatgagacgaaatgtccggctcgtagacctcgttgtccttgacgccgtagagatagcccatgccgcccgtagtgaacaactttctcagatagagataagcgtcttttccgaccaccaagagatgggggttgtcgtcaaatccgtcttcttccacaccgcgaacttcccggggctgtaaatcttcgtcaatataaataagctttaagccgtcatcctttttcacaatggcataggcggcgagcttgccgttgtcgtcgtagtcgtcaatccacaaacatttttcaccctcgtcggtggtgtaaatggataaattgtcttccgcatatcggcgaatggctttttcattgtatccgccttcattcgcctcacccgttttaggcgcaccgccggtgtcgcgcgaggcgatttcgttgagaatggggcgcggcttggcactgacgcacccggtgagcaaacaggcaatcaaaaaaatggacaaatagcgtttcataaaaacctcctgccgtttttatttatattatatcattttaaataataaaatcagccgtttatttctttcatccgtaaaacagcaggatcattcgtttttttcgcataaattctttcaatttttatcggttcagttgattcttttcatgatcaggcagaaaaaaacggcgatgcacctcttcaaggccctctccttatccctcatcttattactgtctttagccacagaaaaaaatgacgtaccatagagcctttcttcctgaaaatccagtcatggaaatctcggcacaatccgcacttttcagaccttccggaaaacataaaaatagtgccgacgaattcgccgacactatttctgatcttcaaacgacttattgcactttgctgttgtcgtcagcggcgacgactttttctttttcagctgcctgttgagcggcggctgctttctttgcttctgcagcttgcaatttcttttgtttttctttttccttcattttttcgacgcgttcagggtattctacgaagatagcaccggtggggcacttggatgcgcagataccgcagttgatacacttcgaatagtcgatggatgccaagttgtcttcgacgtggattgcgtctttcgggcaattcttttcgcaaagaccgcaggcgatacatccgatggagcagttggtgcgaacaactttgcccggatcgtgggtcgaacatttaacttcggttttttgtttgtagggcatgaggccaataatgtttttcggacaaatgtcgatgcatttcttacaagcgacacatttttccttgtcgacggaagcgatgccgttgataacgtggatggcgtcgaattcacagacgctcacacaggtgccgccgcctaaacaaccggaagcacagcctttggatccgcgcgcatagtcgccgatcaaacggcagtctaccagaccgctgtattcgtatttgttcttggacttttcacagtccccttggcaccgaacgacggcaacttctttttcaacgtcgccggccgcttggcccataatttcggctactttttcagctacttcttgtccgccgatggcacagccgttgaccggtgcgtcacctgctacgatggcatctgccataccggcacagcccgggaacccgcaggccccgcagttggcgccgggaagtgcatcaagtacgtttacgacgcgagggtccatgtctacggcaaagaccttatcggcaaatgccaacacagcaccgaggagaagccccaacacgcctaaaataatgaccgcataaattacgttttgtgcattcacgtgaatcgccccctatactaatccttggaatcccataaaggcgatggccattaaaccggcactgatcagcgcaatcgggacaccttgtaacggtttcggaatcggcatgatttccatacgttcacgaagggcacttaataagagcagtgcgagggtgaaaccgatggatgcacctaaaccgttaatgatggcttcgaaaagattgaattcactttgaatgttcaatacggtaacacctaataccatacagttggtggtaatcaggggtaagaagacgcccatggcagagtacaatgcgggagatgattttttaataaacatttctacaaattgtactaaggacgcgataacgagaatgaacacgatggtttgtaagtattccaagccgaaaacgtctaagacgaaatgttggagtaaccaggtaactgccgatgcgatgacgacgacgaaggtaacggcgacgcccatgcccgtagcagtttcagttttagaggatacgcctaagaaggggcagatcccgaggaacttcgcgaaaatatagttgttaactaaaatggtcgatataagaatcgttaaaatcgttgacatagtctacctccctacgctcttttagccatgatgccgcggtagagggcaatccacagacctaagaggataaatgcaccggcgggggaagtgaagattccgataccgggataagattgagggaagatttgaatatccatcagcgtgccgtgaccgaagagttctctgaccacagccatagccaacatggctaaaagatagccgatacctgtccctaaaccatcgacgatagacggaacgactttgttttgataagcaaaaccttccgcttcacctaagatacagcagttaacgacgatcaagggcaagaagatacccaatgcactgtagatcgcagggctgtatgcgtgcagtaccatttcaactaaggttacaaaggctgcaatgacgacgataaacgcgggaatccgaacattattcggaatgacgtttcttaacatactgacaacggcattggagcagatcaatacgaatgtaactgcaacccccatggcgatggcggaggaaacggccgtactaatggccaataccgaacacaggccgatcatttgcataaagatcggattgtttttgaaaatactattcgtaaaaacttttcctaaactcataactaccccctactttgcgctaatttcttcgtaagcgggaagaatggcattaattcccttgagtacggcggtagatgaaatagtggcaccactgatcatcggaatttcatcttcggcttgcggattcttattccctttgacttcgccattcttaaaggacttgcctacgaattgatcgaagtagggtgcttcggtaatttgcgtaccgataccgggtgtttcggcgttttgaatgtttctaaaaccggcaatggttccgtcatttaaaagaccgatggcattggtcatggaaccgccataacccttgcccgtgtggttgataccgtagccgacaatttcgtcgccttttttcgctacgaaaacatcttgaatttctttgtacttttcgatgagggctgcttttttcgcttcatccaagggttcgaatttatcggccttatcgccgtaaatttcttggtaagcttgaacagacttctcgaattcagcttttgcgataacttcagaggtaaagctgttaactacagctaacagtcctgccgcaattgcggaaataaccaataggacaagacctgtctttaaataattcttcatttacttcgcctccccataagcttccgtttttgtcaaacgttcgatcaaggggcttgctacgttcataagaaggatggagtaggatacaccttcggccatgttgcccttcatacgaatgacggccgttaagataccacagccgatggcgaaaatgattttgcctttatccccttggggcgtagaactgtagtccgtcgccataaagaatgcaccgaggaacaaaccgccgccgagaagttcgtaaggaagtaattccgtaccgataccgaaaaccaagaggaaaacagccgtcgttgcaatgtaaataacggggatcttccagtcgatgactttgcgggcgaataagtagcaggcaccgattaacaagagaagggcggaggtttcaccgataaccccgccgatgttaccgaggaacatatcctttaacggcggaagggcatctaagtgttgaccggccttaatgatggtaaggggcgttgctgccgatgcggcatcggcggtttcagccacttttgccatcgcgggtgcggtgtaggttgccattaatgcgggccaggataacatcgccatggcacgaccggccaatgccgggttaacaaagttgccgccgatgccgccaaaggcttcttttacgatgacgatggcgaagatcgaggcaattgcgggtacataccagggtacgcctgcaggcatgttcatggcgagcaggagcccggttacgacggcggataagtcgccgatttgagattctttcttcgtgattttttggaagaggaattcactgccgacacagcagattacactgatcagataaataataagtgcctgcattccgaagaaatacacactgcctacgacggccggtgccaatgcgatgatgacatcgcgcataatcttggttaccgtgtcgttggaacgaatatggggcgctaattgtacgaagcgtccgtctccttgtaaattaggagattgggcttttacatttttttccatgactacctcctattatttacgagcattggcgcgcacttcgcgtttagcgagttttgtcgattcgcttaaatagcgctttgcgggacatacaaacgagcaaatgccacattccatgcattgatccgcatggtattcctgacatttgtcaattcgatttctcaaaatcgatgcgttaatacgcgtcgggttaatattggccgggcagtgatccacgcagcgaccgcattggatgcagggcccttcttccatgtcatcgatttcaacatcggtgaaggccaaaataccggaggtcgtcttggttatgggcgaagtaaagtcgaaaatggacttccctgtcatggggccgccgcaaataaattcgacgacattatctttcacgccgcagtaatccaaaatatcttgtaccggcgtaccgacacgaaccaaaaggttcttcggatgttcgataccggaaccggatacggtaaggatccgttcgatggaaggcatgcctttggcgattaaatcgtagtaggctttcgacgtttgaacattggtcaagaagacgccgacgtcgttggtgacgccgttttgcggaacaatacgaccgcagatcgcttccgattgacgtttggaatccccttggggatatttggtctgcatcgtagctacctttaaggtcgggtattcgtttttaaccatttcgttggccttttcaatggcgtccggtttgttttgttcgatggccaagtaggcttcatcggtttgataaaggtcttggaacaattttaaggatgcaaataattcatcggcttgttccaacatgaggcggtggtcacaagtcaagaacggttcacattcagcgccgtttaaaataacgatgtccaataccgggtcatcactcttcaattttgcgtgaagcgggaagccggcaccacccataccgacgatccctgcgtttttaaccaaggatacaatttcgtcgatactcatgtctttgtaattttccaccggtttaacggaaggatctaaatcatccttgccgtcgttttcgatgacgaccatatccgtgtacataccgttggcagcataacctttttcaatggcgataacttcgcccgatacactgctatgtacggccgcggaaataaacgcgtcggaattaccgacaatttgccctctcagtacgtggtcccctacggcaaccgtaggtttacacggcgcaccgatgtgttggctcataggaattcgaaccaacttcggtgaaggcagaacttcaatagcgactccttctgtcagctctttgtgttcatcaaagtgaacgccgcccacagaaaaagtgagattcgtctttgccattctttcaccccttgcattctaagaaatgaatcgccgggcaagcgttttgcctgcaactacaacggacatacttttcagttttccgtcgctcggctcttcagctttcatctttccctatcttatcaaaatcgttataaaaaatctagtatttgtctaaaatgaacgtataaaatacggcagtcatttccgaaaacggggaaaagacaagggccgaggaattttttatacaaaataaaaattttgaaagagaaaaatttatcgcggatccaacgcggtaatgatttcccctctcattaccgcacttccttcttctaccttccattgaataattccgtccgtcggtgcgcaaacaggcagttgcattttcatgctctcgaggacacagagaacgtcgccttttttgactgccgctcccgattgaaaacagcgccggagtatttttcccggcaagggcgcccgcacgatcatgccagtacctcccttaatttatatctgagttcatccgccgtgagaatctcatcgatcagcccgtttttttgagccgccgccgcagaaagatgcatggcgcggtagctcgctaaattttctttgtcgagatgcaaaatttccgccgcaaggtccgcccccatcacgccgatttttgcctcattcaaggcgaagtacgcggaggcgcccatttccctgcaccccatggccatgtaggcgccgcccaaaacattgcccacggcgacggtaatttttttctcgtcgtgattaaggtaggcctcgatcatggcaccacctgcccgcaacacgccctcgccttccgatgctgttcccggtaaaaagcccgacgtatccgccaagctgatcaccggcaggcgaaagcggcgacaaagattgtagaaagccgcggcttttaacgccgcctctttatccaacacacccgccgccaccttgggattgttggcaaagatgcctacacgcacgccgccgatgcgtcccaaaagggccgtggcattttgcgcccattggggccacaagtaaatggcgctcccttcatcgacaatggcgcgaatgatgcccgccatgtctcccgtcgccggggcctcgccgcctgaagccgaagtcgcctgcttttgtctcagaaaagccatgagcgaccgacagtcttccgccatgccttcttccgaatccgacagaagaggaatgccgcccctttcagccacagctttcgccccgcccatggccgcaagcgtcgtctcttcgaaaatagcgcgggccacgattttcggaccggtgaggcaaaaggccgatgccccttccacggccagtaccacatcgcaaaggccagccatgtaggccgccgcaccgattgagggcccgtaagacaaatacagccgcggcgtgtccaatgctttcagtgcgcgaaaaaccgacccggcaccggaaagagacagttggccgccaaccatgtcggctcctgccgattgagataacaggaccaaaggggcgcccccttccccggccaaatgaatggcacgcaccagagacgcgccttcgaaataacccagggcgccgccttttttcgccggatcaaaagccgccaacaccacgggcttctctgcgattttcgccgtggccaccacaacggccgattggtttttctctatgtagtgaatgcttccttcatcggcaagggcttcgattcgaccataaacttctttcatgagaccacctccttcatttattatacgcaaaaagccgcacgataaacgtacggctttaaatggtgcgggaaaagggacttgaacccccacgtgcatacacacacatgatcctgaatcatgcctgtctgccaattccagcattcccgctcacgataatatattataacacggcaaaataaaaatgtaaactcgcaatttacgcttttataaaaaaagaaccgtcgacagcatgccgtcgacggcctttcattgcatggtgcggagaaagggacttgaaccctcacgtgatgactcacacatgcccctcaaacatgcctgtctgccgattccagcatctccgctcatcacaggaataaattataacataggggttttgctttgtaaatcactttttacgtttttcgtactttcttttacctgcaggaaaagatgcctcgccgcaagggcgagggctattttttctccgcagcttgtttctcttctctgcctcctaaggtcacatcgtcgatgcctttaaagacgttaaaggcgttgggtcttaggcgtcctttcacccgcggcccggtgacgaggacgttttgcttaaagaccaaaggaatgtagggtacgtcttcgcgaaattgtttgtagacgatgttgatggcttctttgcgctctctttccctttgagcccgcgctaatttattgagggcttcatccatggcagggttgctgtagcggctgatgttcataccgccgatgccgccggatgaaagcacggaggaaagattgaccatggcggaaaaatccatgccgaccaccgccacttgatagttccccccctgaagggcgctggcaaaggcatcggcttgggatacggcctttttttcgtccttgccgtcgttgttaggcgcctcggccgcatcgcgaacatgggagcgaatgccgattttcttcagatcttccgacaccagttgggcctcggtttttaaccggtggttttcgccgttggtgaggattgtaagcatgagggcttccccgtttttcccctcgcgaaaaccgtcgccgtttatgtctttataaccggcgcggtccaacacgtccatggcgccgtccacgcttaaataggattcttctttcgtaaaggcgccggcggcaagtttcgggttcatgaagaagtttgccatggtcccttgagacaaatagaggctgtcgatgatgcgctccttgttaatggcgagatccatggcccgacgcaggttcacatcgtttaacaccgggtcttgggtattcatgcacaccacttccacccgctgggtttcgtagggctccacattgcttttttcatcgcttttatagcgatcccatgtgtagtcatcgacgacaaacaagtcgatttgtcccgcgtcgtaggcttggcgaatggcttctttatccgataagatcaggcccacaatgccgtcgatatagggcagatttccatagtaattcggatttttctccaagtaaatttttttgttcttttcccatttcttcaatagaaaaggcccggaacctaccacgtcgaagtcctcaccgtcgagcatggcctcttccgaatagatgtgggcagggaggatgggaaagctcaagagctccggataattgccgtagctttgattgaattcgaaatcgatgttgcgctcgtcgaagatcacggccttggccaccgtatccaagtcggcgccggcgccgatccccggcgtgcggtgaaagagtcggttataaggcgaatcggccggggcgtgtttcacggcattaaaggtggcggccacatctttcgtggtaatgggcgtgccgtcttgccaatagatgccttttcttaatgtgacgctgacgcgccgcccctcgtcggatgtctccacgtgttccgccaaggcaggcaccatgcggccgctgccttcgtattcgaagagtcgatcgaaaagcaggtggctcaagtaaaaatacgagcggttttgggtcaagaggggattcagggtgtcaaaatttgtaaggggcacggtgagcgtgccgccgccgcgggaatcgtcgtcggcccctttttcctctaccacggtttttgagcccccgatgccgcaagacgttagaagcaaaagacacagggcgaggatgattcccttacattttttcaccgggcagggcctccaatgcgtcgtccacttgattgtaaaggttcattaaatcgccggaattatcaaagattatggtcgccttctctttcttttcagccagaggcatttgagaagcgatcttttctttggcgtaggcctcatcgatcccgtcccgcgccatgagtcgggcgagttgtacctcttcatcggcatccacgagccaaatggcatcaaacgccaggccgcttgcctttaattcgtcgaactgttcaaaaagcaaaggcacatcgtaaaataccgggccgtggaaattttcagacagatccagcatggcgcagacaatggccggatgcatcaattgattcagcttgcggcgggcatcctcgtctttaaacacgcgcttgcccagtttgtctctgtctaaattgccgtccgactgaatcatgtcttcgccgaaggtttcggcaatttgctttaatgtctccgatcccggttgaacgagatcccgcgcaatggcatcggcgtcgatgacgggaaagcctaagcccaacaagtaggcggttaacacgctttttcccgaggcgatggagccggtgatgccgattttattttgtttcataccaattttcccccgtttctacttctacttttacgggaatcgccagcggcaaggccgattccatggtttcaaccaacaatttttttacccgctcgccgtcttccttgtctgcttcgataatcaattcgtcgtggacctgaagcaggagcttggcccgaaggccttcgtcttttaatttcctgtacacggccaccatggcttttttcatcatgtccgccgccgttccctgaatgggcatgttcagcgccacccgctcgccgaaggagcggacgctgaaatttttcgccgccagctcgggaatgtagcgccgacgatggaacagggtttccacataaccttgggcctttcccgtttccacaatgtcttccataaattggtgcacgccgctgaatttatgcaggtagttgtcgatgtattccttggcttcttttctggaaatgtccaggtcttgagacagaccgtaatcgctgatgccgtagacgatgccgaagtttaccgccttggccctggagcgcataaggcttgtcacatcctccggctccacgtgaaagacctgggaggccgtggtggtgtgaatgtccgcaccgtcgttaaaggctttttgcatgacctcgtccccggaaatatgggccaaaatccgaagctcgatttgtgaataatccgcgtcgataaattccgccccgtctcgaggcaaaaaggcctttcgaatgcttcggcccacatcggttttaatgggaatgttttgtaaattgggattggtggatgagattcttcccgtggccgtaatggtctgttgaaattgggagtgaatctttccgtccggtgcgatttccgccttaagcccttccacataggtggattggattttcgacaactggcggtactttaatatgcgctcgacgattgggtgttccttccggattttctccaacacgtcttgactggtgctgtagccggtcttcgtctttttaatgggcgtcaattccaattcttcgaagagcacttccgccaattgcttcgtgctgttgatgttaaattccctgcccgcatcgtcgtaaatagacgcttccaggccttgaatttcttcggccaatccgtcgccgatctcatccaacaccttttcgtccacaatcatcccctcgtgttccatggaggccagggtttccaccaagggcatttcgatggtagaaaacaacgcccacatgtctaagtccttcagcttctcttcctgtgcggccaacaccttgggcaggtaatgatgaaggcgagacaaatagcccacgacgctctcttccgcctcgagcagagattttttgcttttgccctttcccaaaaactcttccggcggggtaatggtttggttttcatacaaaccgattaagtgagacgcttcgtaattggatttcgttggatccagcaaatactcggcaatggatgcgtcaaaggtaacattgatcggctcgatgccgtagtggaaggcgaaaagaaagaggtctttcaagtcgcttcccacaatggccacatcctcgtcttccagcatgttttttaattgccgaaaggccccttcatcgggagacttgacgatggcgcccttgccatttgcagaaagcagcaagtaatccaccttgccgccgaaatagggcctgccctccgccatgacgtgaatcatgacctgcttcgcccctttcatggctttcatcgcctcgtccatggacacgacggataaatccttgacctccgcgtccgcctcttcttcttcgccgggcaggcgccgcatgagcgtaaaaaattcatactcgctgtaaagggcgcgcagggcatccaggtcgtagggcttgcgccggagggcgtcgatgtcgaagtccaaaggaatcgtcgtaataatggtgccgagctttttgctcaaaaaagcctgttgtttaaaattctccagattctcttttcgcttcttgccgctaatggcatccaggttttcgtaaaccccttccatggagtgaaagtcctgaatcaacttcatgcccgttttttcgccgatgccgggcacgccgggaatgttgtcgctgctgtctcccataagccccttcaggtcgatgagctgcgccggcgtcatgccgtattccttttcgatgcgggccacatcgtagacttccaggttcgtaatgccttttctcgtcatgaggacgtcgatgtcttcttcgattaattgaaaataatcccgatccccggtaagcaaatagacttttttgccggcggcgcggcccattttcgccacggtgcccgccaagtcatcggcttcgtattcaggggaatccacggtttttattcccatggtttttaaaatcttcattaaataaggccactgctcgtctaattccgagggcgtcttctgcctggtgcccttgtactcagcgtaaagatcgtggcggaacgtgcgccccttttgatcgaaacacacgagcaaatagccgggatcgatgcgatccacggcattttccatcatggacacgaagccgtatacggcattggtatacaggccccgcttcgtcttcaacaaaggcaaggcgtaaaaggcccgaaaaaacaaactgcttccgtcgatgattaaaatcgtatcttttttcatgagtcctccttgcttttattatacacgagaagccgcggaaaagcctttataagcatttcatgaatacctctaaagcatttctttttcgcactttgctttttaaaaaatgtagccaataagggagtcgaccctattcgtttcagaaagacattaattccttcccggtaaaataaaaaaggcgaagctgcaattttctgcaacttcgccttttttctattggtgccgaaggcgggacttgaacccgcacggtgtcgccaccgctggattttgagtccagtacgtctgccaattccatcacttcggccagctgatacttcgatagtataacatatctgtcggccgcgtgtaaaggggcattttatttcatggttaaaaagctgctgtaggctttgtaggtggagtagatatcggccttagacgccacttcaaagggggcgtgcatggagaagagggccgttcccagatccacgacttccgcgccagtttcggcgaggatgtaggccacggtaccgccgccgccttcgtcgactttgcccatttcgcccgtttgccacatcacattgtctttggcaaattgatcccgaatggcagcgacaaattccacattggcgtcgttggtggagctcttgcctctggagccggtgtatttcatcatgcagacgccttcgcctaagcgggcggcgtttttcttgtccataacttcggggtagttgggatccagcgctgccgtgacatcggcggagaggaccatgctgttggccaatgcccgacgcacggcgatattggagtccacgcccaatttgtagagcacttccgccacggcgttttcaaagtatttcgcactcatggaggtgttgcccacggagccgatttcttctttgtcggcaaagacggcgacgcaggttttcgtgcggttcttgccgtccagttgggccctgagggatgcgtaggcacagactttgtcgtcttggccgtaggccgctaccatgcttcggtccagacctatatctctggcgttaaaggcaggcaccacttccaactccgccgtttcgaaatcgtcaggatccatgccgtatttttcttttaaaagggcttttgcagcctcttccacggagccgtttaaggggcggtgaccgaagagcacgtttaaattttcgccgatgatgccttcggccaaggtctttttattttgagacttgctcaggtggggcaggagatccgtcacggtgaagacgggatcggcaggatcggagccgatgttgacttcgtgcttcttgccgtctttggtcacgactacgccgtgaatggccaaggggatcgccgtccattggtattttttaatgccgccgtagtagtgggtctttaaaagggccacattttcctcttcataaagaggcgcaggtttaatatccaagcggggcgaatcgatgtggctcgctacaatggccatgccttcttcgaaatctgcggccaagtcgaagagcaccacggattttcctttgtttaaaaagtaaattttatcgccgcgctttaagctgtccatatcgtagaaatttttgtagcccgccgcttctgccaagcggacgatttcttttgccgccatgcgctcggttttcgcccggtctaaaaatgccttgtagtcttcagaaaatgccataatggcatcgtgttcttcttctctgtcccagtaaatgactttcttttccattccatgctcctttcatcagttggcgtcccttacatcggggacgtcgtcgttttcttttgccgctaaattttcttccgtctttgcgtgtttgtctttgtctccgtcgtcgggcttcgtcaccgccgcaggcatattgtaaagcaggcagtgacccaacatatgggacattaaacgctttgccggatctttcatgtgcccttcgtcgtcgtaaaagccgctttggttctttccgtctttgtgccaatcgatgagggccacgttggcgtatttatcggcaatccgttgtagaatatcgttgtttttgtcttcgtaggaaggatcggccaccacattaattaaaaacaaggggcgtccctcggcggtttttacaatttcgtccacggcatcgaaggtaagggccgcgtcgtttccgatttgaagaataatgggcccgtcggcggaatattctttgatgcggctcacataccacgatggattcagattattggaaccaataacctgtaaatcgggcatgagacgcaagtaggcttcccgcgccgattgggcggcgccgtcgcctaaaagcaagcccttttgagactggagcttgcccagatcgtcgttggttaatttgtaatagggcttttgtgcgttcacctgttcgatggccgccgccaattcgttggacggctcgaagcgctccgtcaacgaagctttctttcgtttcgacgccacttctttcggctccactttcttcaccgtcgtcttctccggcgcttggcgcttcatgatctccggcgcctgggttgtgtaggtaatcaccatcaacccgccgaaaagcgtggctaagatggcgtatacccatttattgctcagacctttcacctgaaaaatataataggaaccttgggcggcgataattaggatgatcagagccaagggaatccaaaggcctcccctcaaatgcatacgctcggccagagcatttgtaaaaaagaagaccggcaaactgtagagataaatcgaataggcccgctcgccgataaaggtgaagagtcggaattgaaacacgctttcaaaggcattgccgtcgcgaaacaaaaagagaataaacaggctcaggaggatgctgacaaaaaacagcccgcctaaataggccggggtggattccgccataaataaaagaaaaatgacgaagacgatcataatccccagcatggccatgtcccgactggctgtgcgtctgcgcccttttcccatgagctcgtagaggacgaagggaaaaatgacgaagaagctgaagagccgactctcggggctgtagaaaatcctcgcctcggccaaatccaatccgccgaagatccccattatgagggcggagatcaaggtgatggcgccgccgaaaaaggccacggaaataattttttgtcgcgtccgcttccctgctgccaccagagcgaaaataaggtagcattgcataagcaaagatacaaaccacaaatggccgaagggcgaaggctgctcgatgcttaagggatgaccggcaaggctttgaaaaatattattggcgaatactaaagaccacagggcctgcccgcgcaccatgggcaaatcggcgtaaaaaaacaaggcatacatcgccgtaacaatgctcaccatggcgaaaagctccggccaatacgtccgcactttttctaccaaaaagggaccggggtatgttttatcgcgaatgtatcccctgaaggtctcatagcccatgagggcaaagagtatttgataacccaaatgaccgcctaagaaaacgcggctaaaggccatgtatagtaaaataaagcacagggcaaatcctttgacgccctctgccgtctttctttctttaatggacataaacgactcctttttttgatggtaatattttaccacaaacgtgggaatttgacctgttctttacccggtgcggatttttgtcgatttctttttaaaaaaagactggacaaatttacgtccgggctatataattgtttctgttatcgacgtttgcatctttagctcagttggtagagcaactgactcttaatcagtgggcccagggttcgagtccctgaagatgcaccagatacgcggagcttcggctccgttttttttatgtcttttccccacaaaaaaagcaacggttacacgtcgcttttgtctttgtttttccaatagaggtcccacactcttttcatcagaatatctttgtcccgctgcccgatcttctctgaagccagggcttttttcatgccgttaaaggactggcgcaggattttgtaatcgtcgtaggccgcatcgtctttttccggcgtggcaaattcctcgtcttcgtggagcagatcattcacatccacggaaaaaacatgggccatttttttgtaaatgagccggtttttcgggtaactgtcgccggattcatagttctttaccgtgcggacacttacccccaaggcgtcggccagttcctgttgaatccagcctttttccgtgcgaagggtttttactttttctgcaaaagtcatcgaatcacctgctcttgtatagtcctaattccgtttgcctaatcatgatactgcccctcgggcaatcagagaagcgcgggattggtctttctctgctcggggcttcttcgaaaaaaaagccctgcaaaagcagggcatgcattgtatttattttcctagaaaaaagcggtgctgtcaatgaagatcttcttcccctttttcctctttcgacctttccgatgcatcttccgccccatttccgccgcgatttttttctaaaatttccataaattccgcgcccgtaatggtttctttcttcaaaaggtaatgggaaatggcgtgaaggctgtccacattttccgtaaggatcttgtggctcttttcctgagccttggtgatgatggcgcttacggccatgtcgatgtcgaaggcacggcggtcggaaacggccaaggtggtgtcgccgcctaaatagcgattggtcaaggtttccatggccacgaagccaaactcgtcggtcatgccgtagcgggtaatcatggagcgggcaattttcgtggcctgctcgatgtcgttggatgccccggtggtgcgggtattgaagatcaattcttccgccgcgcgaccgccggtaaaggtgacgattttgttgaaagcctcttccttgctgatgaggaatttttcttcttcgtccacctgcatggtgtagcctaaagcgccgctggttcggggaataatggtaatcttatgcaccggcgccgattccttttgcatggcggcgaccagagcgtggcccacttcgtggtaggcgatgatttctttttccctttgactgatgacactgtttttccgttggtggccggcaataaccacttccacgctttccattaaatcttcttcgctcattaatctgcgaccgcagcgaacggcgcgaagggccgcttcattcaccatattggcgagatccgccccgctggcgccggcagtggctttggccacggcattgtagtcgatggcctcttccttctttacatctttcgcgtgaaccttcaaaatggcctcgcgaccggcgagatccggcagctccacgggaatgcggcggtcgaaacggccgggacgcaagagagccgggtccaaggactcggggcggttcgtggcagcaaggatgaccacgccgccgttaccttcaaagccgtccatttcggctaagagttgattcagcgtttgttcccgctcgtcgttgcccgaaaaaccggcgccgtcgcgcttctttccgatggtgtcgatttcgtcgataaagacgatgcagggcgctttgtccttcgcctgctcaaacaggtcccgcaccttggcggcgccgaggcccacgaacatttcaacaaattccgagccggagatggagaaaaagggcacgctggcttctcccgccacagctttggccaggagggtcttccccgtacccggcgggccgacgagaagggctcccttgggaagcttggcgccgatttccgtgtacttgctcgggttgtggagaaaatccacgatctccgttaaatcatccttggcctcgtcctgccccgccacattggcgaaagtaattccctccacgctctgatcgtaaatcttcgcattgctttttccgaagctcatggggccaacgccccctttgccgcccatggatttcgtcatggagcgcaggaaaatctgtcctacggccaccataaccaccaccatcagggcgaagctcaagaggctttgcaaaatcggattcatttcgctggggaacttgcgatcaaattccacgccgttgtcgtagaggcgattgaccaggctttcgtcggggaaacgggccgtttcgtagcgcacatccttttccccttttatggtaaaggcgatttgcttatccgtaatatgggcttcctttaccttcttttgatccacatcggacaaaaattcattgtagctgacgcttttgatctttaccggatcccgcaacatcttcggcatcagcataaacgagatcaaaaagaccagtacaattccgatggcataatatataaacatcggtttatttatatcttttttcatcgactcctccaatcattctattttctatgtatatccatctatgaataaattattcaatccggcgatgggtagatcttaccacagccggcggatctttaagcgtcggcgcaaaaaacttatcatcatctttgccattgaagccaatagtaaagtctcgtaaagaaatacccggttggcgctgcgatttgtttcaattgcctgccgctgtggtaaaataaccaataacaacaacgttttactgactgaggaggaaagatgaaaaaattaaaattaaccgccatcacaggcgtctgcctgggcctgcttctaatggccacgggctgtgccaaagaggcggcacaggcggaagaagcgaataatcaggtggaagtggttgaaaaccaaaagacatcggaagatttaaacaaagaagccgccgaaaacaaggccaatgaagccgaagaaaaagaggcgaaagacaaagaggataaggacaagaagggcgaagaaaaaagctatgaagtcaccttgacctacccctcctccgactacattgtcaacggcgacgaagaaaataaaaaagtcacggaacaagcgacgatcaaggcgtcgaaagacgacatcgtcacgaaagtattgaaacaattggcccaaagcccgaaggccgaaggcgccgaatccgtaggcttggataaatttgatttctccaaatccaaattagacggcaccaccgctatcgtggatctttcaggcgatgttgccggcggttccctggaagaggacgtgctggcacgctccatcgtcaacagtttgctttccgtcgacggcattaaggccgtggaatttaccattaacggcgaaaaggccgaaagccttatgggccacgtggatatttccgagccctttacgaaaaatctgtaatcgaaaaaaccttgagtccggcgaaaaccgggctctttttttgcgtcttcaaagggtcacgaatcgaaaaaaattctccaacgaaaaaagccaaggggattccccccgtggctttaagacgtcggtccgttgagttttaaattttcttccaccgccgacggatcgcccgactttgccttgtccagcatttccttgaaaaagcttcgcgtcgcgtcgtcgcattttttcgggctcatgtagttcatcgtcggtgccttttccaattcttcgatggctttgtcggcccgtgctttgtccgtcttgtaattatccaaccattccttttcccaggcttcttcccaatattgggacgcccgcgtgtcgccatagcccgcttgatattcggcgtctttctcgccgtctaattccgtgggcaaggtgtaattgtcgggccagtttaagtcggccaccgtttctttaaattccttattcgcatcatcgtaggaatgaagtccttccggatcgcccccatgacaggcgcaaaggccgagagccagggcgaggataaaggacacgcacaggattcgcctaaatgtttttctcatatcaatctccttttcaatgtaaaagcatctctacatctcaaaggatagcatggctcccgttgcgagtttttaattcccttctacgatattcttacttttttcctactttttgaatgtcagtcgaaaacacactttgttatctgcgcttttcgccgtgatctccgccccgtgggcgcggagaatctcccgcgcaatggcaaggcctaaaccggatccgccggcggcgtgtcgcgacggatccatgcggtaaaagggctcaaaaatactctccaacgcatcctcgggaatggtcttacaggcgttgataaagtcgatggtcacctccgcctcactttcttcgacggtcacttgaacggtgctgtcctgatcgccatacaaataggcattttttaatagattgccgaagacccgagacattttgtcgccgtcgcaggaaaggtatacttttcccggtacgtggagtttacattccatgcccttttcgtcgaagaggggtttaaattcaaaaataatctgctccaagagaaggctcaaattgcattcggcaacctccagctttaaatcggacaaattaaatttcgtcatttcgaaaaattcatcgattaaatcggaaagggcccggctctttctcaaggcgacatcgaggtatttctcccgctcctcgctgctcaattttacatcgccgcacaatagatttaagtagcccacaatggatgccaaaggcgtctttaaatcgtgggccaaattcacgattaaatcatttttctgcttctgcctctgcgccgccaaggcctcgtttcgaatggattccgcctttagtgcattgattttttcggcaatggcggcgagttccggcgacaattcaatggcgcctgcttctttatcgaaaagaaggcttgtggcttcctgcaactcatcgacgtagtgaaccaattgcttgaacaaacggtaagtggcaagcacaattaaaagcacccaaatgcccagcgccgggtagagcaagtaaaggtcccggtaatataagtaattgaaaggatcatggccattcagccatcgacgcaaacagacgctgatgaatattgtggcgaaaaacaccgcggcggttatgagaataactcggatcacgtagcgcttaaaaatcccccggagcaaggagtcgttgttatttttcgatgacatagcctacgccccaaaccgttttaatgtacttggcttggcggccggaatcatgcatcttttcccgaatccgcccgatgtgcgccatcaccgtgttgttgttatccatgtacttttcccgccaaatggcttcgaaaagcgcctccgatgacacgacatctcccatgtgctcgcacaaataccacacgatttcaaattcgatgggcgtcagggaaaggggcttttcatttagggtgcatttgtgctcccttttgttgatgaccaagccgcgaatagaaatctcttcctccggcccgccgatcccctgattgtatcggccgcttcggcgaagttgcgtcttcactcgggccaccacttccaaggggttaaagggcttggtcatgtaatcgtcggccccgacagtgaggcccagaattttatccccaaaatcaattttcgacgtaagcataagaataggaaaaaagtagttttcccgaatcctttggcacagactgaaaccgtctaaatcttccagcataatgtccaaaatcatggcgtccggcggattcgctttgattttttcgagagcgtctttgccgtcaaatgctgtttccacggcgtagccgtcgttacgaagataaatcgcaagcagttcgcaaatttctttctcatcatcgacgataaggattttttctttcatggcgtttctccataagtcttaaaaatttcttcctctcatttgacttcactataccatgaatccgcttgttcattgcaataatttgttttgatcgcttctacataataaaacaagccccctttttcggagacttgttcgtaagagaatctgaaaattctgtttatttttctctgtaatccgtgcgatgggcaagggccgtggccacggtgagctcgtcgtaatactccaaatcgccgccgacggggatgccgtgggcgatgcgggtaatgtggatgtccacatcggccaaggtgcgagtaatgtagcgggcggtcatgtcgccgtctttcgtgggattggtggcgaggatgagctccttaatgggctcgtgcttgagacgctccagaagttctttaatcctcaggtcgttgggcacaatgcctcgctccggcacgatgacgccgtggagcacgtggtacaggccgttgtacttgcctgtggcttccatgacctgcacatcttgtggccgctccaccacgcaaatcaccgtgcggtccctgtggtcgcttttacaaatgcggcagggatcggaatcggtgtagtcgtggcagatgctgcactcccttattttttcgcgggcttcctgaatggcctgagccaactgctccgcttcctccggcggagaatccagcaaaaagtagctgaggcgcctggccgttttcgtgccgatccccggcagacgactcaagcgatagatcagctcttccaggggcttatccatcgttaaaacaggcccggcatattgaggccgccggttaagcgggacatttccccttccgtcttttctctcgcgcaattcatggcttcgcgaatggcggcgagtatcaagtcttccaaggtttccacgtcttccggatccaccacgtcgggatcgatggaaaggcgcaggagctcttgcttgccgttgaccacggcggtaacgacgccgccgcctgatgtggcttcaaattcctgtttgtccagatccgcctgcattttttccatatccttttggaatttttgcacctgcttcatcatattgttcatattttttccgcccatattgggaaatcccttagccataatgcctccttattctttttcaataattacatctttaaatacgcgctcaatggaccgaagcacttcgtcgtcatcatcgccgatggcttccaccgccaccgtggtctccggcccgagggcttcttttacaccttcaagcaaagctttttcgttggccgcttttttcagcatctgcaaatgaaatgtaaacttcggctcgaagagaatggtgagccggctcccctccattttcgtggtttgcgcatcttttaaaagggccgcgcaggccacgcttttctcgcgcaccgccgattgcaccccttgccaggtctctgccgaaagggccgtcttttcgccttcgattatatcacggcccccatcatccctcaaagcttcttccacttcgccttgctcgacctcggggacttcggggcgcgctgcttccttcactggggctctttctttcttcccttcatcggttttcactgccgccggttttcgcggcgtcagccgaagggccgcctcatcgggcaattgtcccccttcttttaagtgaagggccttcaatagaaggatttccaccacggtcttgggatccttggcatagcgaaactgctcccgcccctgttgaaaaagctgaaggacttgaaaaccgtagccttcctctaaattctttgcgtgggcttcgaaagccgccccttccttttcactaaggcctttgggaatggcgtgggtgtagcggtaaaacaaaaggtcgcggaagtagtcgatcaacgcgtcgaggagaagagaaaaattcttcccccggtcataggcgctgttcagcgcatcgacgatgagggcgccgtccgaagtaatgaggccgtcgacaatgcgaaaaatcccctcttcttccgtaagacccagggcgttttgtaccaattccccgtccacgacgccttcccccatggaaaggacctgatccaaaatagacaggctgtctcgcatactgccgtcgctgtgggcggcgatgaccgccaggccttcgtcggtgtagcttctcttttccagatccaaaatccgggcgagctccccttgaatggcttcttctttcaatcggaagaaggtaaagcgttgggcgcgagacaaaatcgtggcgggaattttttccggctccgtcgtggccaaaataaacagggcgtgggccgggggctcttccaaaattttcaagagggcattaaaagcccccttgctcaacatatggacctcgtcgataatgtagacctttttcttcgcaaccgccggcgcataggccacgtgctcgcgaatctcccgtatgtcgtccacggaattgttgctggccgcatcgatttccatgacatcgaagaggctctcgtctaaaattcctcggcagaccttgcattcattgcatggattggcctctttcggcgacaaacagttcacggcgcgggcaaaaattttcgccaccgaggtctttcccgtgcctcgggtgccggaaaaaatataggcgtggtgaacgcggttttcttttatttgatttttcagtgcggtaacggtcatctcttggccgacgacgtcgtcgaacgtcttgggccgataccttctgtacagtgcttgcataatcgcctccggcttttagtatacatgaaaaggtcccgacgagaaacagatcccttagacctttcttcgatcgaatccgaaaattttgaccattccttcacgattctatcacatgaggcggttatactaaggctacatcaatgatatgaatcttttaggaggtatttcgaaatgaaaaacttaaagaaaatcgctagcgctatggcagtaggtacccttatgttcggtctcgttgcttgccaacccaaagctgacaaagctgaaaacgctgcaaacaacgctaagaacgctgctaacaacgctgctgctgaagctaacaacgctaaaaacgaagctgctaacaaagctgacaacgctgcaaaagctaacgctgctgctgacaacgcaaaagctgctgctgacaacgcacaagctgctgctgacaacgctgacaaagctgaaaactccgctaagtaatcgacgattcgatttagaaaaagctccggcatccccggagttttttttatgacttcatttttgtgacttcattctgtaatcttccgaatctatgttataatttggtaaaacagatgaagaaggaggacgatctattgtattgttttcaatgtggcgaagaactggtcaaaggcgcgaaattttgtcacgtatgcggtgccaatcaggaagaagcgcgaaaactctttgaggaaaatttcaaaagcgcctcgccgacaaccggtttagatcatcccgcttccggcggcgacacgaaggtcgcctactcctccgatccggaagacggtgaagccttaaaaaattacttaaataaagtggatacccacgtgggcatgagtatccaaaaacacgaaaccctctccggcgcgcacccgaagccgaaaaaagaaaaaacgaagaaaaaagcggatgccccggacaaaaagacagcttccgcgcccctcgccgcggccgatgaaataaaagccgccgatgcgccggccaaaaaacaggatgagaaaaagaaaaagaagagcttttccgccatttggaacagctttatcgacgaggaggacaatccctactccgtcttcggcgaaatggccgatcgcctggagcgggaccaaaaggtattggatgattcggaggccgatcgcctgcgggtgtctcaggacatggatgccatggatcaggaatccttcgcccaaaccggcgacgtgtcctctttgaataaaaaggtcaacgccattttagatgcacaagaaaaggaagaagagaaaaaaattacctcgaaaggcattctttcctccttcttctcgaaaaataaaaagtccgacgaggcggaatctgaagcgaaggaatccctccgccctgccaaaggtttcgaaaaagaggcggacgagaaaatcaaacccgccgatgcattcgatcaaggcgatccaccggcagatgaaataattaaacccgccgatgcattcgatcaaggcgatccaccggcagatgaaataattaaacccgccgatgcattcgatacggtcgataaaccggcggatgaaaaaatcaagcccgccgacgctttcggcgaagtgcaagcgcctgtttcgggccctgtagaaaaggaacccgccgcgccgaaatcggacgttgctttagacaaaaccgcccgcaaacaggcgaaaaaagaagccaaggcggcgaaggcccaaaaagcggcgaaaaaagaagctgccgcaggcgagaagaaagaaaatcccttcgcttccttctttgccggcttgaacaaagaaaaatccgacgtggataaggcgaagcattccgcggaagtgaaacaccatcaccacgtcagcgaactttccgacaatgtttacgtcttaaaagcctacgataagctcgcccccgctcgggaacgggtcctggcaaagggcaaacaaggggtctacggcctcctgggcatcggatttatcctgagcaccgtgcccattgtctttgccttcagaggcatcggcattttggccattgtctttgccctcttaaaagtgctcatcgatttgttccgctttttcttcgcaaacaatgtggcacgcaccaacagctgcacggaagataacttgcgcggccgcaccgtagacaatctcttccactggatcttgtacctgatcccctcgactattatctttttcgtcctgccggcctcctcggccatgggacgcacggtcttgggatcgataaccccccatttcctcttgagcattctgctctatatgtgggtgatgtttttggcctatgcttcggcccattccatattgccgaaagaaaacagtcgggattttctcgcctggtacggcattatcttcgtaagcatcgacctgatctcgaaacttttctggatcatcgccatcttcctcacatccacatttgtataagaagagccgcttcggcggttcttttttggctctataatatccgttggggagtaacctcctcaatggatatttttatgcaaaaagatagcacttgttttccctatcacctaaaattatatcaccacaaaataataaaggggggcaaacaagtgcaaaacaatattaccacattacttttaggaatccaagatgtcgaggtcaccggtgtttcagaagaaagacgcctgattaccattgattgcaa

SEQ ID NO: 36 - DNA, 80008 bp, Peptoniphilus rachelemmaiella
  source 1..80008: mol_type = genomic DNA
ggatggaagaggcaaagaaaagcgggctaaaggagtggcgccactgcttacgtgcctacaacaactggttcgaggagatcaccaacagctttgattacccgtggagtaacggctacgtggaaggaacgcacaacaagatcaagacggtgaagcgcgtggcctttggaatgcgtaactttcatcatttccgcacgaaactgctttttgtttgttcaaaagataagtgagtgagggtgtgtaggaaaacaaaaaggagcctagtttttactagactccccaatggttgacatagaaccttctttttgccgacttttaaaatacaaacacgacgcttgcgaaacaaacataaaaatagccctctaccctatgctcggggaaaggacttttcactttctgtgtttacagggattcatcgccttccgttaatcgctggtacaattcgatgccgccggtgccttttaatgccaccagggtaaattcgtggcgatcggtgattccctccacgtgaaaggtggcgaggcggggattgtttttcgcaaggctttcgtagccgaaggagatgcctacattcgccgccaccaattgcgaaattaaggccaaactcgatgtggtcaccagacgcttaaagtcccgcacttcgtaacctttgtagcgcagtttatcttcgaggatttcccgtgagccgctccccgactctcgcacgaccaaacagcccccggtcacctcttccatggcaagggtgcggttcttgtaagggtgatcgacgctgcagatgccggtaaaggtttcttcttttaacacatcgaaatcaaattcgtttttcgcaaactgcccttccaccatgagaaaatccaagcgggcgtttcgcagccgctccaaaagggcttccgtattgtccacggtcaagacgaaatcattgggccgatccttcaccaaggcggcgagcttttgggcataggcgtattcccccagggttttcgtaaggccgatgcgaattgtgcgggccttttcttttctaaaatgatccagtgtgtcccggtaatttttctgttggctgcgggcgtagttttccagcacacgggcctcctcggtaggcaccatcttctttccgtcgtagcggaaaaacacggcgccgaattcctcttccaaggaacgcatgtgcttggtcaccgccggttgggtgatgtgtaaattttccgccgcccgagtgtaattgcccgtggccaagacttccaaaaaggtacttaatcgaatgtccacaatgcctccatatcgtttcgttatcgctccataatgaattataattttattttatctcagttttatgagatgatcaatgcacaaagaaaggagcataccgttgaaatccatccaagcaattattcccggggtcctgttgaccgttgtcatcgccgcgacctcaaaatttatcgaaagcatactgcctatgcccttaatcagcgcctcggtgatcgctctgtttatcggcatgatcatcaatcattttttagcgtccgaccatcccgtccacaaaggcgccaccttcgcttcgaaaaaattattgaagctggggattattttattgggggcatccttaaacatggccacagtattccaagtgggccgcctgtccctttccgtcatgatctttactctgctcacctgcttcggcttgggccacttctccggtaaattcttcggactgaactggaaaatgtccaatctgatttccgccggcacgggcatttgcggcggcagcgccatcgcttccatcgccccggtcattgaagccgacgatttggacatcgcctacgccatgagcgccacctttattttcgacatggtcatgatcgtcgccttcccccttatgggtcacgccttgggcctttccgacatggcctacggcctctgggcaggcacggcggtgaacgacacctcgtcggttgtggctgcaggctacgccttctccgacggcgccggggacttcgccaccatggtaaagctgaccagaacgctggtcatcattcccaccgtcgtcatcttcgccttaatcagcgcccacttaaaatccaaagcggaacacaaacacgaaaaagcaaaattctccctaacccacgtggttccctggttcattctgggcttcctggcacttacggtcattaacaccgccggctttattcccgctgtagtcagccaaaacttcaaggtcatcagcaaattccttatggttatggccctggcaggcattggcctgaagacgtcgttaaaagacatgaagagcgccggcaccggccccatgcttcacggcttcgtgatttccgccctcgtggttatcgtcgccatcggcgttgaatattttatgggtctcgtataaaaatgggtatattaaaaagaggatcatggaatcctctttttttattacgctattttatctgtgaaaggagttcttatgtctcatagatttgattatatcgttatcggcggcggcagcggcggcattgccacggccaatcgggcagcccaatacggcgccaaggtggccgtcgtcgaacaaaaccaattaggcggcacctgcgtgaaccggggctgtgtgccgaaaaaaatcctttggtacgcctcgggcattcgccgcacactggaaacggaaacatcgccctacggctatgacctcggcccatggtctttcgactacaagaagctgcgggagtcccaaatggcctatgtggatcgggctcgaagcgcctacgaaaaaaacatgaagaacaacggcattacccacattcagggccaagcacgctttgtggacgccaacaccgtggaagtgggcggcgaagaatacaccgccgagcacattaccattgcatccggcgcctcccccacgccctgccccattgagggcggcgagttggtggattattccaacgactttttccgctgggaagaactgccgaaatccgtggccgtcgtcggcggcggctacatcggcacggaactttcctccttcctcgccggcatgggcgtggaggtccactacctggtgcggggcgatcggatcttaaagaaattcgacgaagccattaccgatgaagtcacgaaaatgattcaagcaggcggcgtgaacattcacttcgacacggaatccaagcgcttcgaaaaggtcgatgaaggcataaaaatcacctttaaagacggcaccaccgccgtctacgaccgcatcctttgggccggcggcgtcacccccaacacgaaggatctgagtttagacaaggccggcgtcgatgtggacgacaagggccgcattgtcaccgacacttacgaaaatacgagccaaaagggcatttatgccgtcggcgatgtcactgggaaattggatctcactccggtggccattgccgccggacgtcgcctttccgatcgcctcttcggcggcaagaaagacgcccacttggtctacgaagacattcccacggtggtcttctcccacccgcccatgggttccgtgggcctcacaaaaaaagctgctgtaaaagcctacggcgaagaaaacatcaaggtctacgacacctcctttacggacatgcgctccagcgtggcggcagacgggctcaccaataaaatgcttctcgtctgcgccggcgaggaggagaaaatcgtgggcattcacgccgtcggcgaaggcgtggacgaaatgatgcagggctttgccgtggccgtgaaaatgggtgccaccaaagccgacttcgacgccaccgtggccattcaccccaccggggcggaagaaatggttaccatgagataatgaataaaaaacaaaacgcttctactgagcttggtagaggcgttttttcttgaaaatgaaaatcccgccggcaacatcgccgacaggatttcgtctctttattttcctacgcgaaccgtcatgagaatatcgtcgatgcggtcactcgccttttcgaatttttccttcagggccttgtcttgaatcatcgccgggtcgcccctgaaatccgcgccgtaataaacgccgtctttgtaggcgagaatgacgggccaattgtaccactccgtccgcggattttccacacgggaaagggagaagaggaagccgtcgctgcccgcatcgtcattggatttttcgtagaagtggaggcatgtgccttcgagcttgtaggagatcgccacatccttgggcagcacaaaggacatgtccacgtctttcacatagatgcgctcgccggccggcgcatccttttggggatagcttcccacggtgacgacgcgcaccttcggcatccacttgacgggaagccccgtggcctcgcctaagtagcgggccggaataaaggtgcgatcattctcgaggtaaggcgccacgtccatggaggccgtcttgtcgcccaggcgataggatttctttccgatggtcatgaccacggaagcatcgcccttcgtcaaggtcacttcttttttatcgccgtcccacgccacggtgtagcccagctcttcggtgacggcacgcagtggcagaaaggtgcggtcgtggcgaatgacgggcgtcgtttcttcggctatcagctcccggccgttaacgtaaatcgcgatgggatccggccccttcgccagggccgtcgagggaaggagcagcaagcagattaataatgtggccaactttttcataaaaaacctccttcgatcatccgtagatgattgcattttatcttacacttcacgtcatctcttgcttccacggtgaatttacaaaaaatcacccataatcaatggatcgtagcagaagagtttgtgctttcctacttttattataccccccccccgacagtttttcaatacttatatgagcacggggcatcgaccgcttacgcccgatgaaatttttcgttcaacaagggaacccccgatctaaccgagggttttctaatgcaaaaaagcatctcttcaccgagatgctttcgccctttgtcgtgtacttgatttttaattttacatctttaccgaagtcaagacggacataatgccgtcgatggcgtaggagcgtcggctcggcacctcgccctgttttcgcggttctttttctttcaatgtggcgaccaaatagttcccgtctttcgcgcctaagaggagctggccttttttcgggaagtctttggaattttcttcgatggtgcctaaaatttcgccggtggctttaaacttaaaggcgatgctgcctttgccctttaccacttccacgccttcgatgccgtcttccggccagtcccaggtaatgtcgggtttggtcaggctttctttttttgtgatgtcgctgtaggccaaatcccttcgatcaaaggtgcctaagatgagaagatgtttctcttcatcatagcagacggtctttttctgcgattcgaagaccgtttccatgttcacgtagcgcttgtcgccttgacggaggacggtatcctttcgaatgggtatttgaatgatcttctcccgcgtcgttttaaaggacacatttttatcgtctttcacaggcagatagcatgccttttccatgaccacctcttcgtcgatgaagaccttgccgtttttttccacgtagtccgatgtgtccaagagttgcccgcaaaaaatcacccggtccacggttcgcgatgtcggtgcgtctttttgaggatagcttcccacggtgacgatgcgcgccttcggcatccacttgacgggaagacccgtggcctcgcctaggtagcgagccggaataaaggtgcggtccttttccaaataaggagccacgtccatggaggccgtcttgtcgcccaggcgataggatttcttgccgatggtcatgaccacggaggcgtcgcccttcgtcaaggtgacttcttttttgtctccgttccatgccacggtgtagcccaattcttcggtgacggcccgcaagggcaggaaggtgcggtcgtggcgaatgacgggcgccgcatcttcggtaaaaagttcccggccgttgacgtaaaccgcaatgggatcgggccccttcgccaaggccgccgatggaaggagcaggaaacagagtaacaatgtggctaactttttcataaatacctccttcgatcatccatagatgattgcattttatcttacactcacgtcatctcttgcttccacggtgaatttacaaaaaacacccataatcaatggatcgtagcagaagaatttgtgctttcctacttttattatacccccccccgacagtttttcaatgctttatgggcaaggccaccatcgctctcggccgatgaaatatttccgtacaataaaaaaagcgccggtttcccgacgcttctcattacttgcttgcctttaaggcttcggccatttccttggccaattgtgcacatttgtctaagtcttcttgtttcggggcgcccataacatccacggtggtggggagcacgtcccatttgctttcttcggcgaaagcggcgaatactttttccgcgccgccgccccagctggcgttggtgaaggtgcctaagatgtggtttttcattttttgtttcttcagcacttcgaccaaattggccatgggcgggaacagaccgacattgtaggtggggcagcccaagataatgcccttgtagttccaggtttcgctgattaaatagctgatatgggtcttggatacgtcgcgaatgcgaatgttgcgcacgccttcttgggtcaaggagcgggcgatggcttcggcgacttgttccgtgttgccgtacatggagccgtagacgataaggacgccgtcttcggttttttgttcgcttaaatcgctgtaaaggctcacgatgcggccgatgttgtcgcgccatacggggccgtggtccgggcagatcatcttaatgtccaagccacctaatttcttcagagcacggatgacttgcacgctgtacttgccgacgatgttggtgtagtagcgaatggtttcttcgcggtatttttcccaatccacttggtcgtcgaaaatagcgccgtctaaggtgccgaagccgccgaacgcgtcttggctgaagagaatgcccgtttcttcttcgaagcagaccatggattcgggccagtgaaccatgggcgtggtgtaaaaggtgagcttcctctcgccgatgtccacggattcgccgtctcctacgagaatggcgcggtcttcgccgatggcgtagaagttttccatcatggtgacggcttttttgttggtaatgatcttacattccgggtagcgttccaacacgctctttaaagaagaggtgtggtccggttccatgtggttgaccacgacaaaatcgagctttctgccgttaagggcgtcgtctaatttttcgaaaaattccgacacggagtcgatgcggacacagtctaaaagacaggtcttgctgccgccgtcgaagagataggagttgtagctgatgccgtcgggcaggggccacatgccttcgaataaatgggtgtagcggtcgtttacaccgatgtaatggacgtgatcattgatttttacaaatcgcgttgctgccattgtatcacctttcttttaaaaattcatttcatataccacaatagattttaccttgttacccgctatttttcaatggattctctaaatatccaattctaaatagacggggcagtggtcgcttccgaaaatgtcgtcgcgaatgtctgcctccacaatagcatcggccaaacggtcgctcaccacaaagtaatcgatgcgccaaccggcgttcctttcccgggccttggtgatgtagctccaccagctgtagcgatccgccgcatcgggataaaggtggcggaaggtgtccgtgtagccggcgtccaagagattttgaaattggctgcgctcttcgtcggaaaagcccgcgtttttacgattggccgcggggtttttcaggtcgatttccttgtgggccacgtttaaatccccgcagagcaccacgggcttcacctgatccaacatattcaggtacttgcgaaaatcctcttcccattccatgcggtaatccaagcgggccaggccccgttgggaattgggggtgtagcaggttaccaggaagaaatcctcgtactcgcaggtaatgacccgcccttccttgtcgtgttcttccatgtcgatgccgtaggacacgtgaatgggctcttccttcgtgaaaaccgccgtgccgctgtagccttttttctccgcgtagttccagtattggtggtagccctcaagctccagatccagctggccggcggaaagcttggtttcctgcaagcagaatatatccgcgtccacgccgttaaaaaagtccataaagcccttttttatggcggcgcgaatgccgttgacattccatgaaatcagtcgcatactactctccttcctcgtagtgttccaaaaagctgtgcttctctccttcgctgtctttatagcctaaaatcgccccgagctccacattttccgccgagcgataaatggacatggccacgttgggattttcctccgcaatggtctcgatgaggtttttcacataggcacgggcgccgaaattttcctttgccgtcaccgtgcaggcgcagtcgatgggggtgaggtcattgtatttcacccactggcgaatgtccgattcccgaataaaaatcatggggcgaatcagctccatgccctcgaaattcgtggaatgaagcttgggcatcatggtcttgtagctgcctccgaaaagcacattcatcatcaccgtctcgataacatcgtcgaagtggtggcctaaagccagcttattcgcacccaaagacttcgccttgtcgtaaaggctcccccgcctcatgcgggcgcacatgtagcagggcttctccccgcccatgtcctccgccacctcaaagacattgctgtcgtagatctgaaggggaatccccatggccttcgccgtctcctccacctgcgttcgaatggcgggcaggtagcccggatccatggttaaaaacaaaagctcaaactgcttcttgccgtggcgcttcaattcctgcaaaagcttcgcgagaagcaaagaatccttgccaccgctaatggctacggcgatgacatccccgtcttcgattaaatcgtagtcgttgatgcccttaatgaaacggcgccaaatggtcttccgatatttttttataatgcttcgttcaatttctgctatggacacgtgctcgtcctctctatttaaaaaatcccggctccccgggatcataccataccactctcatggtactataaaaggcgggccgtttcaatcgccgcccgcctcgttgaaataatttttacacgccccttgcattttccgctactatagcctaaaataataggagtactcgctaacgtggctcagatggtagagcagctgattcgtaatcagcaggtcaggggttcaaatcccctcgttagctccaaatgacgcctacgggcgtctttttttatgcctttttcacagattacaaatcccgcttcttgaacttttttaaagccgccgtataggaaagcacggtcatgagtaccaaaaatacgatgccgagaagcacgatgagtgccacgtggctcgtcgcccacaggtatagggccttgacttcctttgggaatgccgaggcggcaaagccggatatgccgacgacaactaatgtcgcggcgatgagggctgccccggccactgccttggcttttttgtgacccacggcaaagaaaatcggcacattgatgtccataaaaaggatgtacatgacgagataacccccgccgacggccaagctttcgccgataataagcgcgccgcttttcgccagattcacgccgttcataatgacgagggcgacaagcgtcgtgacgagaaataccacgaaagaataaaggtagcgcccccgcaccgtgtcctcatcttccatgccgatcatgcggtagagccgttccgtcccggaatcttctcccgtgacgaagggataggtcatgatcatcaaagacatggtcatggcgaagaccatggggaaaaaagaaagatccgtaaaataagtaaagcccacggaaaacaggatgaaaaaagcgatgggtttccacgtaatataagggcgaatgctcaaaaaatccattttgcaggttttaagcatcttcatcacctcgatggtaaaacgtcataatgcggtcgatggagggcttctccaccacggtgttttcgccgaaagctttcgcgacttctgccgtcaccaatacttccacgtgggtggatgtttttttcttgccgagaatttttttcggatccatcccacttaaattcgcctcactgcattttacaatgcgataagtctccaaaaagtcgtctttcgtgccgtaaaaaatcatctcgccgtccataatgaaagcgatgtaatcggcgatggcctccaaatcttccgtaatgtgagtggaaaagagcacggtgttctcctcatcctccgccatgtagcgctgaatggtgtcgcgaaattcatcccgagagcggggatccagcccgctggtgggctcgtccaagatcaaggtcttggcgccgtgggacagagcggcggcgagcataagcttcgtcgtcatgcccctagagaggctcttcacatttagttttttgtcgatgccgtaagcggccacgcgcttcaaaaattccgcgcccttccaatttttatagcccacggacaagacattgttcacgtcttccacagaccagtctttcggaaaataagattcatcgaggacgatgcccacatcctgcaggtagtcgttgtcttcctgccgcacgccgcggtagtgcacctcgcctccatttaaatgattgagatttaaaatagcgcgaatggtggtcgtcttgcccgagccgttagggccgataaaccccgtaataaatccctctttcacgggaaaactgaccccatttaaagtaaaggcgctgtattctttgcgaatctcttttaatgcgattcgatccattagtcacctccgaataacacatccagcatggccacaatatctttcttggcgatgccgtgatccttggcaatggcgacaacggcttccatgtgcccttctatttctttttgcacgatttcccgcgccacattttcgtttttctcggcgacaaaagatcccttcccctgccgcgtcacgataaatccatccgcctccagcgcatcgtaggcttttttcaccgtcataatgctaatggaaagatccttggcgaggacgcgaatggaaggaagcttttcgtcgtatgccaacacgtcgtttataatttgatcgcgaatttgattccgcagctgttcgtaaatgggaaccgaggcggaattgtcaatgatgatgtccatggctatccctcatttccataacagtgtataacagtaatgaacacttgtcaataaaaaaaagccatttccaatcttaaccagattagaaatggccttcgttccaatgttttctcacgcaataggttccagaggcagaatcaaggtaaccatcgcccccttccccgacgggcgattttttattttcagatagccgtgatgcaagtcggcgacggtttttgccgtgtaaagtcccaagccgtaatggatcgagctgtgacgactcttatcgccgcgataaaagggttccgaagctcgctttaaatcctcgtcggaaaatccggggccgtaatcgccaacggtcatttcgagggtgttttctcctgttgaaataagcagttccacagccgatgcctcgggcgcatagtgaatggcattcatgagtagattctgcacccctcgctccaattgttttaaatccaccgacacatagctgtttccgacatgcaaggattcctcgattgggcacccataagtgttcgctatttcccgagccagggccgttattttttccgcgacaacagaaatatgcaatctttttaaatccaattcctcggaaacaccgaactgattcacttccataagggcgtgggcataggccgaaatccgcgtcgaatttttttcaatgaaatcaacgtagcttctttgctcatcggataatttcgtctctttcaacaattccgcgttcccccggataatggcgacgggcgttttcaaatcatgggccagtgaggaaatttggtttttcctattcgcctcttccgtccatttttctctcagggatcgactcaatgcgattttcatcttttccaaagcatttaatacaccgttaaattctttaatggtcgacatccctatttcaaaatctaaattctgtttcgcgatttcctccgacgcttcgatcatcggcgtcaattgcttcgtcaaacgtctcgcccaaatcagggtaatggtcatggcgcttataaagcataaacttaccatgagggcggaaaacaaataatttacgggagggaagtgggcctccatccagggattggaatagcgaggcttcagggtgtagtgggctaccaccacgccctcccggcgctcgatctccatataagcggaagacggcgtggacattacctgcccccggagaaaggccattgcttttttcctctccgccgccgagatattggagtcgaccagatgcccgttatctgcgaaatacgcgtaaccgacgtgctcaggaatcatagcgggatcaaatggctctgcctgggcgattttcgccttgtttcgaagaattaactgttccgtcgcatcagctggtacgattccgttcaatcgatacgccgccacaaaaagaaccagtgcaaggcccgcagatgctgcaagaccgagtgcgatactgagcaaatacttaagaaagacgagttttagggactgcccttttttatttagttccatttatagccaattccccacacagtcgcaatgggcttttcgccgacccgttgaaacttcgcccgaatgttttttacgtgctcggaaaccgccgatggttcgccttccccctcgtagccgaaaacctgttcataaatctgctctttcgagaagacctgcccttttctttcagccagaagcacacaaatccggtactcggatttcgtcaaaggtactttttcttcttctacaaaaatgctttttgaagacagatcaaagcgaatcgatccaaggttgaatccggcatgtttttctctctgctctctccttaagtgcgcctccacccgcgcgagcaattcctgtacgccgaaaggctttgtaatgtagtcgtctccgccgcttaaaagcccttccacaatgtctgcctccatggactttgccgttaaaaagagaatgggacagtccacgatgcgacgaatttttttacagaaagtcatgccgtccatcccgggcatcatgacatccagtaaaatcaaatcgtattttcgcaaactgttttcgtctaattccaacggattttgaaccgcatgaaggcaatggccattctttttcagaatattttcgattaacacgagcatatcctcttcgtcgtcgacggcaagtatcgtcgccacaaaatcacctccgctatgcatctagcgctttttcttcttaattgattatttataggatttcaatcgccccattgtcctccgtcccaccgattaaaccaaatgacggagccgataaagatcactgccgtcatgggaagggccgaaaatccccacttcgccatctctgctgctagaagggaatggttttggtgcgcactggctaaaatataggtccccggcaagcgtgcgggccaggtgcaggggataaaataccaaagcttatcgcctaatccggtgatggcgagaagggcgatgagtgtttctacaacaccaagccccatggacgggaccgaacccagtgccaatgccacccacaagtgaatcaagtagacggcaacggatgcggctaaaagaagcaacagcgccgcaaaccaaacagcaagtgtttggtgaccgaaaagccctccaaagacgccgacggctacggacgtcgcccaaatgaatccaagaaacagggcccccgcttttcccaaataagccctcgtccttgacggcgccgaaagcaacagttgaaaatggcctgcgccgctttccatctccgccactttagatatcaaaacaccgactacgatgggcactgccgcgcctaaaagcgtgaaatagttctgaatcgtctcatcgggcataaaattttttatgccggtaaattgacatgccccatagaaggctagggcgtagagtaccggtaaaataccatggatccaaagaatccacgtgtgtttaattttataaagctctgcttttaaaactctacccatcattttacctcctgggtcgcaaaccatcgagccgttatcccggacaataagataaaaatcccaagagatagcgcgcagggaatgatgatcgacgtgttttcgatcatgggttcggcaacttccgccacaagaccgttgggcaggaggtgcagaatcggtaccattaaacgcgcaccccacgcgtagggacaaaggagccacatggacgtatcagcgaacatagcccccaatgccgcgcccaacaagatgttgatggacacggcggccgataagccgaacttcttcgccagaaacaggcacaaaggcacttgccacaggtttacaaaaaataatacaccactggcaaaaagtagggtgtcccaccccagattcggcgtcagttgactacccagaaaagattgtaggattccgacacccgtcatgtggatggcagaggcgaataaaagatacactgaagccacaagtacttttgcaacccacactttttttagatcgacgtgaagagaaaaaatggcgcggtaagccaattttctctcatctcttcgatgcaccatggctggtaccaaagcaaaggtcgccggcaatagaatcacataccaccagttgtatgcatcgacagaaaagtagggcggcataagtacgaaagccatggcgaggggcattagggacatgataacgacgaatgtttttaaaaaggtatgcttctgctttaaatgctcagcgagaatatattttttcatttgcgccacccctcgcttccattgacgaccgtcatgtagcgcgactctaaatcgtcgttttctgcaattttttcttggtactttaattcaccgccgacgataattcccacgtggtcggccgattgcgccacttctcctaaaatgtgactggataaaacgaccgtcatgccttttttcgggaaactccgaattaaatcacgcaaatcccgaatgccctcaggatccagaccattggtcggctcgtctaaaattaatagctttggtcggttcaccaaggcgatggcaatgcccagccgttgcttcattcccatggaaaattgtcccgccttctttttccccgtatcctttaaatcgacaatgtccaaaacttcatcgatgcgttcgtcgcccaatcccaataacagggttctcaccttcagattttcttcagcgcttaaattatcgtacaaaggcggcgtttcgataagggcaccgatcgccgctaaatcgttgcggctccaaggatgtccatcaaataaaatatctcccgatgtcttgtgaagcatgcccgcaatcatctttaaagtcgtcgattttcccgcgccatttggcccaagcaatccgtaaacggtgtttttttccacctttaaatccaaatgattcacggcaatttgctctttaaacgtcttcgttaagccctttgtttctaaaatatatttttccatagcttatccctccttctatttctaaggagagtatacggaacaactttaaggattttataaggaagcgctaaaaaaccggcgatggcccatgccgcgaatcgccgggtacatttattctatatgctccgttttcttcctctctctgaagccgtccgccagaaacagtaccacgccggaccacacgaaggcgaacatgatggcgtggatggtggtgaattcctcgcccatgatgaagacgccgaggaggagttggatggtggggttgatgtacattaagacaccggcgagggataggctcgtgtctttcatgcccacggcaaaaaagatgaggggcacggtggtggcgacgcccatggtggggatgagcaggtattctctcacgccaaggccttcgaggtggctaaaggccacgaggtaaatcagggcgacgggcacgacgaggaaagtttccataaagatgctcagcatccccgaggcggtgatttgtttttttatggcgccgtagaaggcgaagctggtgccgataataatggcaaagacgggcagcttgccgtaggcgacgatgggcacggtaacgccgagtatggccaaggcgaaggccacccactgcagaggccggagccgttcgttgtaaatgaaaaagcccaggacgatggagaagatgggatacatgtaataggccagggaggcgtcgataacgcggccggtcatgacagcgataatgtagccgccccagttaatcgtaatggtgatgcccgccaagagcaaaaagagcatctgccttttgtctttcattaaggcgaggatggcagggccctgacccataatgagcatgacaatgagacaaaagagcatggaaaagatgattcgaaaggacagaacggccaagggatccatggcgccgaaaaggggccaatacaaaacgaggaaggcccacattaagtagcaggccaatacttttaaacttccgggcatcgtgcacctctttctatgtattgtcttttatcttatcacgtaaaggccatgttttaagcaaaaaaatagcacgtttttcgtgctattcgtagtcgatggacatgaggatgagtccgttggccgcagccgtcgggcccaaatcctttcggtccagggtttccgtggccttgagcagttgatcttccggcatgaggccgcggccgatttccatggcgcagcccatgatgatgcggatttggtttttcagaaagcttttgccgtaaaaatccacctcgatgatctctcccgctcgggtgacggtaatttcgtcgatggcccgcttggggttggccggggatgcgtagcggccgatgaaggcggaaaagtcgtgaaagccttcgatttttttcagggcccgcgccattcgcaccacatccagaggaaagggggcgtgcgcggcgtagcgatccagcatgccgtttctctgtttgctgttatagatgcggtatttgtagtgcttcttcttggcgccgtagcgggcgtgaaaatccatgggcacttccacggcctcggtaatgcttaaatcccgcggcaggtggtagttcactacccgggggaagttgccgagatcgatgggcgtatcggagagaaagttggccttctgccccagggcgtggacgcctttgtctgtgcggcccgccgactgcagcgccacgggatgatgcacggttttttccagagccgcccgcagcagagtctccacggtgcggagctttttcggcccctgatcctgatagccgtgaaagtgggtgccgtcgtaagcgatggtgattaaaatgtttctcatggcaagggcacgggcatccaccgggtggcggaaacgaggatgaagaagatcatattcgcggtaaagagcagatggtcttctcccgtcagttgaaggggatttaatttcgtgcggtgttcatcgccgcggtagcagcggctttccatggcggtagccagctcttccgcccggcgaagggcgtttaaaatcaagggcaccaaaaggggcacgaggtttttcgcccgattcaacacattgcccgattcgaaatcggcgccccgtgccatttgcgctttcatgattttgtccgcctcgtcgattaaggtggggatgaagcgcaaggcgatggtaatcatcatggcgatggcgtgggcgggaaagccgacgcgttttaaggggctcatgagcttttcgatgccttcggtaagggccaagggcgaggtggtcaaggtaagcaggctcgtgcccataacgaggagcaccaggcgaatggccataaagattgcttgtgtaaggccttctcttgagatggttaaaaagcccagtttgaaaatcacctcaccgggaatgaagaacacattcataatgaaggtgaagattaaaatgagccggaggggctttaagcccttcaccaccatgcccacgggaattttcgccgcggcgatggtgaaaaagagccaggcgaaaataaagatgtagggccaaaaatgattgatgaagaacagactgacgatgaaaatcgtcataataatgatcttgtagcgggggtccagggaatgaaccggcgatttggcggggaaatactgcccgatggtaatgtctttaagcacgtcttccctcccaccatgtctttaattcgtcgaatgcttcatcgacggtgatgcagtcttccttgatggcgatgcctttctccgccaaatcggtcatggtgcggcgcacttggggcacgcccaaaccgatggcgcgaagttctttttctcttgcaaaaatttcccgaggcgtgccgtccattgagacgcggccgcggtccataacgatcatgcggctcgccagtcgcgccacttcttccatgctgtgggagacgaggacgatggtggtgccggtggattcaaagatgccgcgaatctcttctaaaatttcgcggctgcctcggggatccaggcccgccgtgggctcgtccaagaccaagacctccggctccatggcgagaatgcccgcaatggccacccgccgcttttgtccgccggaaagagcgaaggggctttgctcccctttttggtcgtagtccaggcccactttttccatggcccggcgcaccctatcttccacttcttcgtcggaaaggcctaaattcttcgggccgtaggcgatgtcttttgcgatggtttcttcaaagagctgatactccggatattgaaacaccaggcccactttttggcgcaagacggcgatgctgtttcccttttcccggtaattgacgccgtcgtaaaggatttctccttccgtgggctccatcaggccgtttagatgttgaaccaaggtggacttgccgctgcctgtgtggcccaccagggcgataaactcgccttcgccgatgtccaggctcacgtcgtccagagcgcgtttttcaaagggcaggcctttattataaatgtagcttacatttcggatgctgatactcggcataaggcgctgacaaactcctctctgtctaagatcccgtcgggcagaggtacgcccacggcttttaatcgggcggcgagctccgtcacctggggcacgtccagacccaatgatttcatggtgtctacttgattaaacacgtcccgcggcggcccctcgagaatgagcttgccctcttccatcaccgccacccgatccgcctgcacggcttcgttcataaaatgggtgatgaggataatggtcttcttctcttctttgttcagacgcaggatggttttcatgacttcctgacgtcccacgggatccagcatggccgtgggctcgtctaaaataatgtaatcgggattcatggcgagaatgcccgcaatggccacccgctgtttctgtccgccggaaagcttgtggggctgatcgtctttgtattctgtcatttccaccgccgccagcgcctcgtcgacccgccggcgaagatccgattgctccacggccaaattctccgcgccgaaggccacgtcttcttccaccaccgtggcgacgatttgattgtcggggttttgaaagaccattcccgcccgagcgcgaatcttccaaatatccgcctcatctttcgtgttcatctcatcgacgatgacatcgccggaggtgggccgatagagtccgtttaaacacttggccatggtggatttgccgctgccgttgtgacccaggacggcgacgaattcccctttttcgatggtgaggctcacgccgtccaccgcacatttcacgccgtcctcgtattgatagactagatttttgatctcgatcatacgcgctccttcgcttctactgttgcgttaacttatgcattataccacaggccaaaggccccgctcaatttcaatgacatagaaaaagagcgagggtgagatcgcctcgctctcaatgcctaggcgcgattgcgtttgtaattcacggcgatgactctttcgaagatcacgcctaaaaccgctgtcatcactgccgtcggcagaaccacggcgacaaacatggccgtaaaggctgcatcgccgggcagacccacgaagatcagggccgttcccaaaaatacggcgccgctgatgacggtggcgataaaataaataatggcttttgtaatattgccgtcaccggggaaggcgcgcaccataaaaaggacagcgaatgcggcgatgattttatcaaacatgctgggcaattgaccgccggggaattgggtggttaatgccgccataacgccggtggctacgcccatggccaaggtaggcaggggcttcggattcagaataatgtaagcgattaagcaaaaaagcataaagtccggcttcatgccgttaaaaaatccggggacgacggcgtgtaaaatcgtgcccaatgcgatgaaaattgcgccctgtaccaatgttttcgtgttcataataactccttttctcggcacaaaaaaaccatttgctcgtataggagcaaatggtgaattcgcggtgccatcctagttgcgcccaaaaggacgcatcttattttagatactaacatatcctatctcggtaacgggagaaccggctcggctacttttcttcacctcgcactcacagacccattcacaacagggaacttcatcggttcacaccaaccaccgactctctgagaagggcacctgaagctacttgcttctgctcgacgttttcatatttgttaggattactaacagtatagcagaaaaaaatgaaattgcaattgcttttttactttttccacagttccagatcggagagtttgcccgcccgtttcagagacaagagcaccaagatgccgatggatgcaccgacgacggtggagggcacgaaaaagggaatgtagtaaaagggactgcccaaatccaatccgtaaaggtatttcataaagggataggacaggatggcgcttaaaatccccgtgccgaagacttcgcctacccacgtggcgggaagggaggcggtttttttgtaggcgaggcccgagagcagggcgcccaccacggcgccgatgacggaggtaatgggcctgcccgtgcccatgcgaatgagcccggttaacagggcgcagaggaaattgtaccaaggtcctaagatcacggcgccgatgacattgatggcgtgttgaaagggcgccatattggggaagaccaccaaggtggacaaggtgacggaaagggcgcagagaatggccgtagccgttaagaggcgagtctttttattcatatgcttccacctcaaatgaaataccgccgtcttccgaaataaaggcgggcacgccgatgtttcccgcttttttcacctcatcgaaggcgggggatgtgtctctcagctgcagaaaggcctttaagtcggcgatgtttttcgtcacgtccacgtagtcgtagggaatgttcttttcgtctaaaattttctttgccgctaaacaatcggggcaaaggtccgttccgtaaattttcattgctcctcctacaaaaaaccggcatttctgccggctattcttttattttgttcttaacccttgtgaatcctttaagtcattactttacgttgtagtcgccgatttcgtaaagattcagggcgtcttttaagggattgttctttaaggtttgggcaaagaccttggccttgtccaagttggtgaaaagttccacgtcgcattcgatagcgtttcgacggatcaggaagccgtcgcgcttggagtcattgcccttggttggggtgttgaacaccaggtcgatttcgccaccttgaatcaagtcgatcatggtgggggcttcttcgccgatgcggcgcacttcttcggcctcgatgccgtgttgatttaagaaggccttggtgcccttggtggcgtagaaggtaacgccgtcttccgccagggatttggcgatgggcaaaaattcctctttgtcgcggtcgcgaatggtgcacagggcgcggcggctcttcgccgcaatgtctgtgccggcggccaaaaagcccttggccatggcttcttcttccgtgcggcccacgcctaagacttcgccggtggagcgcatctccggtcccagggacgcttccacccggtggagtttttccgtactgaagacggggatcttcacgcaggtcgtgggggatacggggccgatgcccgtggtgtagcccatggattttaagctgtcgccgagcatgactttcgtcgcgatttccgtaatgttcatgcccgttaccttcgagagatagggcacggtgcgggagcttctcgggttcacttcgatcatgtaaagggtgtcgtctttaatgatgaattgaatgttaatcatgccgataacgcccagctccagtgccacttttttcgtggcatctaagatggcttcgtccatttttttcgaaatgtggcggctgggatagatgctgatggagtcgccgctgtggacgccggcccgttccaagtgttccatgatcccgggcaggaacacgtcggtgccgtcgcaaatggcatccacttcacattccatgccttgaatgtattggtcgattaacacggtgcgcttgggatccatggcgaaggattcttccagatagtagcgcagatcttcatcggcggtgcaaatttccatgccttggccgcccaagacataagaggggcgtacgaggacgggatagcccaggctttccgctttttccatgccttcttccacaccgtggacgccgacgcctttcgggcgaacgaggttcaactcttccaacatggcgtcgaatttttcacggtcttccgcccggtcgatggccgtgggatccgtgcctaaaatggggatgccttcttctttaaagacaccggcgagcttaatggccgtttggccgccgaattggaggatgacgccttcgggtttttctttttcgatgatgtttaatgtatcttccgccgtaaggggctcgaagtaaagtttgtcggaaatgtcgaagtccgtggagacggtttcgggattgttgttaatgatgatggtttcgtagccttctttgcgcagggtcttgacgcagtggacggaggcgtagtcgaattccaccccttggccgatgcgaatggggccgctaccgatgacgatgatgcggcgcttgtcttcgtgaaccggggattcgtcttcgccctcgtaattggagtagaggtaattggccttggcatcggcgaggcccccttgggtgtccacttttctgtacttggcttcgatgccgaagagctttctcagctcgcgaatgaatttttcgctgacgtttaagcgattggcgatgatttcgtcgctgaagcccagccgtttcatttcgcggagcttgtcttccgtcaagtcttccttcttcatggcttccagttccgcttccacgccgacgatgcgcttaatgatccgcaggaagtaagcgtccatgcccgtttctctggagaggcggttaatgtcgtagcccgtgtttaaaagggccgccaaatagaagaggcgctcgtcgttgggccgcttcacattttcctttaatgtagcgatgtccatggttttgaagcgggggtgaaggaggctgaaggcaccgatttccaaggagcgcaagccttttaacagagccacttcaaaggtggggccgatggccatgacttcgccggtggccatcattttcgtgccgaggttgcgatcggcgttaaagaatttgtcgaagggccatttgggaatcttcacgaccacgtagtcgatggaaggttcgaaggccatggagcgggtgccggtgattttgttttcgatttcgtcgaggcccaagcccagggcgatttttgccgccacgcgggcgatgggatagcccgtggctttcgatgccagggccgaagagcggctcacacggggattgatttcgatgacggcgtattgcaagctgttaggctccacggcgaactgcacattgcagcccccttcgatgcctacgccttcgatgatgcggaaggccgcttcacgaagcatgccgtgttcgatgtccgtcaaggtttgggtcggtgccacgaccatggagtcgccggtgtggacgccgacgggatcgatgttttccatattgcagacgcagatgcagctgcccttggaatcgcgaatcacttcgtattcgatttctttccagccggtaatgcacttttcgatgagtacctgaccgacgcgggaaaggtgaatcccggcgtgggcgatggtcctgagctccgcttccgtgtcgcaaatgccgccgccggtgccgcctaaggtaaaggccgggcgcaccaccacggggtagccgatgatttttgcataggctacggcatcttccacggtttccacggttttcgattcgataatgggctcgccgatttcttccatgagttgacggaattcttcccggtcttcgcccttcttaatggagggaatggaggtgccgataatgtccacgccgtatttttccaagacgccggaatcgtagagctcgatggaaaggtttaggcccgtttgcccgcccatgccggcgatcaaagcgtcggggcgttctttttcgatgattttttcgatgacttccgtggtcaagggctcgatgtagaccttgtccgccacttccctgtccgtcataatggtggccggattggaattgacgaggaccacttccaccccttcttcccgaagggattcacaggcttgggtgccggagtagtcgaattccgccgcctgaccgatgacgatagggccgctgccgatgacgagtacttttttaatatctttgttgcgggacatgatttcctcctaggctaattcactgataagggctaattgtgtgcttaacaaatcccgtgcgccgggcagaccgaagggatcgaagagcacgccgacggctttgttttctttgtccgtaaagccttccacggattcgtcggcgacgtttctgtagtcgatggccacggattccggcaagtgttcgatgccgtactctctgttttgactcgtcatatacacccgctccccttcaccttttacggcgatggaggcgccggcgtggggcgaggcaagtttcaccaaatcgccgcctaaagccaggcccaggaactgagccccgaggcccatgccgtaaatgggcagcttgccgatcatttgcccgatgtcgtgaaccagatccaggtagtgggcggcgacgccggggccggagcttaagaacaagaggtccggcttatctgccaaaatggcttcgtaattggtcatggcgggatagacgatgaggcggtagcctgcgtcgtttaatgcttctaaaatgccgtctttgacgccgaagtcccaaagggcgatggtggggccttccccttcgatttccgtgacctcgatggtgctcacttcttcgatggtgttggggttttgttcggcgaagtattcgtccatttcagagggcgtcatgaggcggtcggtaatgacgccccgttgcatccccgtttcctttaagtggcgtatgagcccgcgggtgtcgacatcttcgatgcccaccacgtcgtagtaatttaagtattctttcagatccatttcgctgcggaaattcgtggcattttccatggcacggcggcagataaaggccgcgatcgtcgggccgtcggattgattgtcctcgaaattcatgccgtagccgcccaccaagggataggtgaaaagcaggatacgatctaaattggccggatccgtcatcacttcttcgtggccgatcatggtgctgtgtaccgtaaagcgaccgcctactctgcgctttttgccgctaaactctttgcccgtaaagacggtgccgtcttctaattgaatatacatagtcgctcctttaaatgatcttgcgaatctcgtcgaaggatccgatgttttcttctttcatatatgtttctaaatcggcgatgaggcgcggcacgatgtggggatccactaaattcatggtgccgatttccaccgcttgcgcccccaccataatcatggcgatgacgtcgtccgccgactgaatcccccccatgccgacgacgggaatctttaccgctcgggccacgtcccgcaccattctgagggcgatggggaaaatccccgggcccgacaggccggcgtagacattgtcgaaaacggcgcggcgattttttacatccacggccatggcctggaaggtattcaccaagctgatgccgtcggcccccgccgcttcacaggctttcgccagctccgccggattgtcgccgttaggggaaagcttcaccacaattttgtggcggctcacttcctttaccttggccgtaatggccgccgcgtcctgacagtgtaggccgaaggccatgccgccggaggccacattggggcaggagatgttgagctcgatcatgtcgatatccgcttcgtttaacatctccgcggcaattaagtaatcctccacgctgtggccgccgagattggcgagaatcaccgtgtcgattttccgcatctcgggcaaaatcacctcgatgaaatgcttcaccccggggttttccaggccgatggagttcataatccccgacggggtttcatagacccgctgccctgtgttgcccgggcggggatttaatgtgagccccttcgatgaaataccgccgatgatggcgggatcgtaaaagggggcgtattcctcgccgaagccgtaggtgcccgaagcgccgatgaggggatttttcatggtacatcccaaaagttccgtcttaagcatagatcgccctcccttcgaagaccgggccgtctttgcagacccgcacccgctcgttccccttttcgcaggtgcaggccaaacaggcgccgaagccgcagcccatgtgcttttccatggacacgtagattttatttttcgcccgcttcaccgcttctcgcatcatgggatccggcccgcaggtgtaaatcacttcatctgcaatggcaagttcgtcgaaaatattggcgccgatgtaaaatttcacccgatcgccgtagggggcgtaaatggcctgaagggcctcgttttcttcccgaaggccgatggccacggaaagcttcccttccgcgtccccttccagcaagtggagggagggggcgatgcccgtgccgccgccgataaagagggtcttttcttttatttcgggaaagcctcggccgaagggcccttccaccgcaatctcctcgccgacgaggagctgcgccaaatcctcggtgccgccgccgactttttttatgagaaaggacagggcgccgtcttttattgaaaagatggaaatgggccggcccaacagcttcgcccgattccgaggcttcaccatgaaaaactgccccggcgacgcgctgccctcgtaggccaaggtgaggacgaagagcccctcgcctaacggccgattaccgatgaccttcatttttcgcctccagcaaagtcaggatcagggccatgcgcatgtacatgccgttttgtgcctgctcgaagtaaagggcccgagggtcgctgtcgatttccgcgtcgatttcgtctacccgcggcagaggatggagcacgattaaatcatcggatgccgcactcagcacatcggcgttcagcaaataggagccttcgtagcgcttggcttcctcttcgctgataaagcgctctttttgcacccgagtcatgtaaagcacgtccaaatcgccgatgacgcccttgaggtcgtccacctccgcgtaggggcagcgggccgtgtccaagtactcttccggcatattcagcccttccggagatatgaagacgaattcgttgtcgtagtggtttaaaaactgaaacagggagtgaacggcgcggccgtagcgtaagtcgccgcaaaaaccgatctttaagccggaccaagcctttttgtgcttgcgaatggtaaaaatgtccgccaaggtctgcgtcggatgggcgtggtccccgtcgccggcattaatgaggggcatgtttttcagcacgtccacggccttgtgttgggtgtaagcgtggggatggcgcatggcgcaaatgtccgcgtactgatccacgatgtgcaaggtgtcccgcaccgtttcccccttggccatgctggagactttcacgtcgcctaagtgaagcacctggccccctaagcggtacatggccgcgtcgaaggacatgcgggttctcgtggaaggctcaaaaaaaagactggccaggatctttccgtcacacgcgtgggcgtattttgcgggatccgatgcaattgcttgcgccagtctaaataaatcgtcgtactctctttctgtcatatcgtcaggttctatgaagtgtttcagcatatggcctcctataaaaaaagcttttacaaaggtaaaaggcacaaagagagacccatccctcgggacaggtgtattctgttttgcgacctttttagtgtctcgcactaaattaaagtatcttcgctacaaatagtctacgctccccgaggccgttcgtcaagaaaaaataacggaagaaataaaaaagcccgaaggacgcataatgtccttcgagcattgtttcaaacttcctctttacctcccggccacggcgtcgcatcgtgatcggctttcagttcttttttcgacttttctaaatcgtaaggcacgttcttctttcccggaagctgccaactgtaatccattttgtcggtggtgttgccataagccccgtcgattaaccaagaggcccccgtgtcgccggccatggccgccaaaaccttgggcacgccttcttcgatgacgagatggactttgtaagagttgcacacagaggcgtgttccttgccgtcgtagaagtaaaaatccacgaacatggtaacgtcgtaggtaccgtcgccgttatcgataaatttttcgtcctcgaagatcgccttttcaaggacgtattttcgccccactacctcacaacgataggaattcatgactcgtttgtctttgatgaactgttgaagcttcttcgagtccttgctcagattggtcgtgctcaatcccttatcctcagcgaaatcacaaaagtcgtttaaaacaaaattccgcgccgtcttcaagcagggctccttccactggtttttctcgcttttcgcaaaggacatgtagggcacgatgcaaaaagccgccacaagggccacgagggccaatccgccgccgattaaaagtaacttcttcatattcatcctccttctgtgcttttttctttctatgtacggtgccgaccgctttcattctccggcacatttttagataccgatagttaatcttaatatacgcctccttccgccttgaagcgttacaaatagatgagggaaaattgatgtttcgtctaagaaaaagagccgaaattttaaaaacgaaaataaagggaaaatatgttaataaagggaaaatatgttaaagataggctactcgccacaggatgagcaacaattttatacagtgaaggagaatggattttactatgaaaaagagagacattttattttgcctatttcttctgatctatgccatttttggatgtagctatgcttttttctcggagtacaaattaaatagaatgctcacaacaacattcggatttgcccatttatattctttttttaccatgatatgccttgtaatgctccttttttcattattagcagtggcaattaccttgttaaagaatggatttaaattgaaatttgatacgccaaattcaattttaatttcatcaatgattttttcaatgctttttattttcggaggaactggcacagataaactagtcgagacaagccgtgatggtcagacaattagactcgttgaatggaatgtagctgacaatataaacgaggcaaacatccgagatattttcggcgaatttgacgctgatatagctgtgttcccggaacttggaggatatgaaaaaggggatcattcgaatagcaggctcattaatttgttcaaaaaagccggtattgatttcgaaaagtatgaagtctatgtttcggaaccgacggagggcagtatagctcccgttacaatcgtgataaagaggtcattcggtcgctacaatttttacaagaaaacacctatgacgagatttggaacagtctatttatctccaactacaaagggaaaaccgtccattataggattgcacacggcacctccgcttccggggttaatgggcatttggaaaaatgatttagatttaatttcagacctttctaagcataataaagattcgattataattggagatttcaatgccacaatgaagcatggtcgtcttaatactataaaaacacatgtcgatgctttggagcatgtaccgaaatttaattcgggaacatggaacatagatattccatcgccttttaggacaagaatagatcatattttaataccaaataataagtatggtgtgaaaagcatagagcttaaagcccatagcaactcagaccatttgtgtgtgtttacagaaatacaggagttaaccaattaaaatttacgttatgaagcgagcgacttagaatgatatcttcgtcgcttttttattgttcaaattgcaatcgaagtgcaacggaacccccggtctaaccgggggttttctaatgcaaaaaagcggctcttcggagctgctttttttgtgggcgaaaaagcgcggaaaaagattgacgaaaaatgaaaatcgttgtacattattactaccgacggaaccgtcggtagcggaaaaggaaggagaggttatggtcaaaaagcgtttacgtccggaggcgcgaaagaaagaaattttagctgcggcggcaaaactcataacggagaaaggctacagccacgtcaccatggaagatgttgtagaggcgacggggctttccaagggcggcctgtaccattactacaaaagcgtcgacgacattctctacgatttaatggtggagggccttcgctaccggaacgacatcatcaaggatgccacggcaagctatgacggcccgatcgatccgaaatttgttgcggagagcatcgtagagaaaatgctcgatgacaacccctatatgccggtgtacgtgcagtttttactcgccaaacgtcgcaatgaaaaattggaaaagctgtttttaaaattaaaggagcaaaccctggaagaattaaacgcatttttattttccaaagagggcgtgcagatgaatgaggacatgctggatttgctcacggatttcatcaacacgatgatcctcggcagcgaacttttagatgcacgggaaaattttaaaaagcatcgccaacttcttctcgccgccacccaaaacatacttaaatcgacagtctaagtcggtttaagtttttttacaagatttcgtgataactattatcacgaggaaggaggtcttatggccatttacaaaaaaatattttcctatgtacccgaggcgaagggttacggttacttatctctgctattatccattgcaagcgccgcaggtctcgtggcgggctattatttcgtctactgcgtcatggtggcgttgattcaagaaggcaacgtcgcccacgccatggcgctctctattcgcaccatgataaccttgacagtaggcagtttgctttatttcgcatcgggcttcgcatcccataaattaggttttcacttggaaaccaatcttcgcaaaaaaggcatcgacggcgtggcaaaagccagcttccgctttttcgatctcaatcccagcggcgtcgttcgcaaaaccatcgacgacaacgccgggttaacgcaccaatcggtggcacacatgattcccgatttagggcaagcttttgtcgtgcccattctaagtttgatcttaggtttttacgtgagcattcgattgggcatcgtcctcgtcgtccttatcgtcatcggcggtttgctctttaaatccatgatgggcggggaaacaaaatttattcaaatttaccaagacgccttaaagcgcatgagtgccgaaacggtggaatacattcggggcattcaagttgtcaaaattttcggcgccgacgttcaatcctttaaagcacttcacgacgccattcacgattacgcaaaatacgcctacgcctattccaaatcctgcaaattgccctacacggcgattcaatggctcttaatcggcgtcatcgccatcgtcatggttcccctgtcattctacttacaccgcgtaggcgatatgcgttctttctacgtggaactgatcatgctcctctttatttcgggggtcgtcttttcatccctcatgcggatcatgtattccagcatatatatttttaacgccaactacgccctttccaatttagagaaaatgtacgacgacatgctgaaagataaaatcgccttcggaacgaaggaaacattcgacggggaagacatcgccttttcccacgtggatttcggttacggggacaagcccgtctttaaggatttcaacctgaacttggaagggggcaaaacctacgcccttatcggcgcgtcgggatcggggaaatctaccctcgccaaactcctttccggattttataaaatcgacggcggcgacattttaatcggcggaacgcctttgtccgattattcggaaaaagccgtggcgaaaaacatcgcctttattttccaagatccgaaactctttaacggctccatattcgacaacattgccgtcgccaaaggcggcgccacggaagacgaggtgttgaaggcgctgaaagacgccgcctccatggacattatcgaaaacctgcccgagggcatccacaccttaatcggcgccaagggcgtgtacctttccggtggagaaaaacaacggatcgccattgcccgcgccatgctgaaagacgcaaaaatcgtggtaatggacgaagccagcgccgccatcgacgccgacaatgagtacaaattgcaggcctcttttaaaaagctcatggaaggcaagaccgtcattatgatcgcccaccgcttgacgagcgtgcgaaacgtagatgaaatcctcgtcatggaaaaggggaaggttgtggagcgaggaagccacgacgtgctgatggcaaaagacagctactacaagcgggaacttttgcgctataacatggccaatgattggaggatcaacgatgaaagagcactttaaacagaaattccatgtaaccgaagaaggtgcacggggattggtacgcgccgtatgggcgagctttatcgtcaacgtcatcgccatgtttcccgtcatgattcttatgttgctgggtcagcagattttagaaggcacattctattcgcaaacactttatttcgcgctatctctcggcatttgcgtcatattgtttgtcgctctcctcgtggagtacgagcgcatgtataacgccacatacaaagaatcggcgaacttgcgagaaaatttagggaagactttggcgaaattgcctctggcctttttctcaaaacgcaatttaagcgatttggcacaatccattatgtccgacgtggatgctatggaacacgccatgagccacgccattccgaaaatttacgggctctacctcttcattcccattctcggcatcatgctgttgatagggaatgttaagctgggccttgcggtcatccttcccatgaccctgcgcctcttaatcctcgtcgcgtttaaaggagaaggcattaagagtaataaaaaattcttcgataagctgcgggccaatgcggaagattttcaagaggccatcgagctgcatcaggaaatccggagctaccatttaacggatgaggttcaaaaagaccttgacgaaaaaatggacgaaagcgaaaagatccatatgaagaccgaaggcgttaacttcatcattatagctttgtcgaatttattctctttcattagtctcggcatcgttctttacgtcggcgtcggccttctcgccaaaggggaagtgagcttactttatgtcgtaggctatgtcctcgccgccatgaagcttaaagatttaattgatctttccaacgaaacggctttggaaattcgctacattacccctcgcgtcgaaaatatagcttctattcaagatgcgcccctccaaaagggaaaagacgtggatcttcgtcgcgtaagcattgatgtagaagatgttcacttcggatacggcgaaaagaacgtgctggacggcgtgaacttcaccgctcgccaaggggacgttaccgccctcgtcggccccagcggctgcggcaagagtaccctcttaaaactcatgagccgcctttacgattacgattccggcgccattcgcatcgacgactacgacattcaaaatgtttccaccgactccctctttaaaaagacatccatcgtcttccaagacgtgatgctctttaatacgagcgtcatggaaaacatccgcatcgggcgtttggatgccaccgacgaggaagtaaaagaagcggcgcgtatggccaattgcatggactttatcgacgaaatgcccgaagggtttgatacggccatcggagaaaacggacaggaactttccggcggtcaacggcaacggctttccatcgcccgcgccttcttaaaagatgcgcccatattaattctcgacgaaatcgcatccagcttggatgtagaaaacgaacgggccattcaacaatcgctgaaccatttgattcaaaataagaccgtggtcatcatttcccaccgcttaaagagcgtggaaaaagcggataaaatcgtcgtcttaaacaaaggaaaagtcgagggggaaggcagacatgacgaactgctgaaaacctcgccgacctaccgaaaccttatagaaaaatctgaaatggcggaagcctttgtgtattaggaggaagtatgaagaatgaaaaattaaaggtcaaagatctcgttaccatcgggatcttttacgttatctattctattgtaatattcggcgtcggcatgatcggcatgatccctattttatttttaatctatccgaccattctcggcatcgttagcggcgtcatcgtcatgttgtttatggcgaaagagcaaaaaccctgggcgctttttatcttcggaatgttaacgcccctcggaatgtttgtcatgggacatacttacgtggtgcctgtacacgcattagtggtcatgttgatcgccgaatgtattcgccgaggcggaaattatcgttcctttaaatataacgccatcgcctttggtatttttaacatgtggatttgcggatcccttatgcaaatgctcttagtaaaggaaaaatacatggaaatgtgtgccatgatgggatcggattatgttcaagcgcttgaaaaacttatcacctacccccatatggccatcgtctacgtaggagcctttatgggcggcatcgtcggcgcgtggatcggccgcgccatgcttaaaaaacacttcattaaggcgggcattgcataatgaatggagcgccaagtgtttcatttaatccaaaccccattacgaaatttattgttaccatgctcgtaagctttaccgtattacaccccattggactctttgcctggggtgtgatggtgtggatcagtttgtttttttggttaagagggtttaaaaaagaagcattgcgaagttttttggttttcgctcttctttatttcctgccgaattttgaaggcgttatggctcttcccggatttttaaaaatgtttgtcgcccttttagtcgtggttaaaatgttttacttgccttttatggcggggaaatacttgattcaaacatctgacgtaggcgatattatcacctctatggataccgtccatgtgccacgagccattgccatccccgtcgccgtcatgtttcgtttttttccttcctttaaggaagaacatcatcacattcagcaggcgatgaaaatacgagggattacgcggaaaaatcctttgcgctacggggaatatgtaagcgttccattgctcattttatcgtcgactattgccgatgatattgccatggcggcggaaacacggggaatcggcatcgagggagagaaaacgcgctttcgggaagtgaaacgcggcgtcgtcgacctcgtgtatttcctaggcgtgttcggttttgtattgggaggctggttatgctcgagataaaacatctgtccttaacgtatggcgaggccgaaaaaagcttacacgacattaccttttctgtggcggacggcgaatgcgtcttgctcgcgggaaagagcggatccggcaaatcttccattttacgcgccatcaacggcatcgccccttcttacgacggggcatccctcgaaggggagatactgatcgacggtcgtgcagttgaaaaaatgagcatggccgatctgtcccaaatgatagccagcgtgtttcaaaacccaaagacccattttttcaatgtggatacgaccttggaactggtattttatttggagaacataggcctttgtcgcgaaaaaatgaaggagcgattggagaaaatgctcgctcttttccatatcgaacatttaatggatcgtgatattttcaaattatccggcggcgaaaaacaagtcttgagtatcgccgcagcctatataagcggtgcacccattattctcctcgacgaaccgtcgtcaaatttagatgaaaaggcgacccgaaccttacacgatatgctttatgtgctaaaacgagaaggcatcacattagtgattgccgaacatcggctttattaccttatggatctcgtagatagaatttatcttatggagaagggaaggttgaaaacaactttttgcaaaagtgcgtttttggatctttccgaaaaagcgttgtacgaccaaggtttacgttcgacgcaacatgtggcgttaaatgaaaagtcgggaaagtgtaacggctcggatctcaaaatccactgtttacagcatatttttgagggatcagccaagggattttccgtagaaggtattggccttgcaaaaggaaaggtttacggcatcgtcggaaccaatggttgtggaaaatccacattcctcagaagccttctcggcatcgaaaagagcgcgttagacgatatcgagtttcacgactcgagaataccgcggcgtaaacgactggcacattccgcattggttatgcaggatgtaaaccatcagcttttcagcgacaccgtggcgggggaagtcgtactcgggcaaaagacgttcgacgaggaaaggcgcgaacgaatattggatcgcttaaaccttttggataagaaagagcgccatcccatgagcttgtccggcggcgaaaaacaacgggtcgccattgcttcggttttattgagcgatcgggaaattatcggttttgacgagccgacaagcggcatggatttcgaaaacatggtaagtatttcaaagcttatgcggtccatggcgagaaacggggcgattttaatcgtcgtgtcccacgatacggaatttttaaatcgcacggcagatgagatcatcgacatgggttctttcgaaattcaaaagaattaaactaaaaaagcaggttaaccttagtagagtgaccccataaagttgagcttaatcgagtaagcatttcgcttgctcgattttgttttacataccattcgtcctatgcttcttcaattcataattgtattttgccattaaaagacccccaaaggttggatttctgggtccaacttttgggggtcagtacgctaaccgggggttttctaatgcaataaaaaaagacccggacctcgccggatctttggatcccccgcagggccgggcttcgtttaattcagacccgcccttaaagtaaaggtgggtaatttgctaactacgtctaacttccactcagtggaggcttgttataggtaactagacacaatttcccgtgtctgatttgtcggttgaattaatagaaggtatcgaaccgcgcaggggttatttatcttgtctttattatactacgacggctcttcttaatcaagaatcgacacctcagaggcgatcgtcgccgaaaaatttgagccacgcctcgggcatgggggatgtaaataccatgggcgcctttgtgcggggatggacgagggaaattttatgaacgtggaggtgcacgccgccccgtccgccgccgtaaagttcgtcgccgaggatcgggtggcctatgtgggccatatggcagcggatttgatgggtgcgcccggtgtccagctgaatctccagcaaactcaccttccccctatgaatgggcctgaagtgggtaatagccgcctgcccgtcgtctcgtacaacgcgcaccagggacgcgtccccgatgcctatgggtgcatccaccgtccccgccgccgccacttccccattcaccagggccaggtagcttttgtttttcgtgcggtccttctcgaggacgccgtaggcatagggatttttcgccaccaccaaaagcccggtggtctccttgtccagtcgcccgagcatgcgcaccttccgcttcaagcctttcgattgaaaatagccgcaaagctcgttggccagtgtgtggtcgggatacattttgcagggcatggcgggaatcacgcccttgtcgatgacgaggatgtcttcatcttcgtagcagattttttgcttcatgggcgacggggcgaggttcgtctcctcgtcggcaaatgccacgaccacggtctctttcgccgccaagggcgtggattttacgatcttccgcccattcaccgtcaccaggcccgcgagaaaggcgcggcgactatgggtgtgggaaaaacccacgcttttcaggaagctgtccgcccgggcatagtttctttctgtcgtaaattttatgtctgtgcttttcatttttcctcttttgcattaccatataagtaacggaagttttcgtaaaggaggtgaacttgtggcaagttccatcatcaatattatttctaactcgaatttcgaaagtcgcaagactacgaagcgactgattcaaatattaaagcagcaccattatacgcctacgacgacgctgtcgccgaaagcggagctgaccattaccatcggcggcgacggcgcctttattaaggcggtgaaccgcatgaatttttcttccacgcccattgtgggcattaacacgggccacctgggcttttatcaggaaatcaaccccgatcgtttggatgcttttatcgaggattacaagaataaaaattaccacatcgaggcccttcccctattaggtgcggaagtttataccaatcaaaaaaagtatttcgtacaggccattaacgaaatcgtgttaaaggcgcaaaattcgaaggtcattcacatgaatgtctttatcgatcgaaaccatttggaaaaattttccggcgacgggatgctcgtctccacgccctcgggctccagcggctacaatctgtccttaggtggcggcatgatccatcccaaggtggaagccatggccatgacgcccatggcgcctatttcctcgcaaagctaccgctccctcaccacatccattgtgatccccggcgaacacgtgatttctctcgtccccgagcggcgctacgccaacagcaatctggttttggtcgacggcagagaacacagctacagccagttgaagcggatcaatattcgcttctccgatcaacgcattcataaattagtcatggaaaacaattattgggaaaatattaaaagtaaattcctgtaaaatcagcccctcggggctttttttattgcccgcccaagcaggcaaagaaaaaagagcccgccggctcctttttctgcttctactgctgcttcccgtaggcggctttgtagcgggcgatgttttcgtcgcttaaaaagtcgttggctgcattgatttcctgaaagagctgtgtcgtgtcttcctcgggatttaaatccgggtgatactttttcgcgagctttttgtaggccaggcggatttcgtatttgtcggcggtcacatcgacgcccaggcgatgaatggcggcttcgtatttttccttaaagcccccatcgtagcttccttggtagccgctctgattgtagctgccgtagtcacctgcgccctgtccgtagtaattggcctgattaaaaaaggcttcgaattgtcggcggaacagctcttcttccatgcgggcgcgggccgcttcctgacggcgccgctcttcttcgattttacgttggtagcgcctgccgtaatcccccatggtgtcgtaggtaatgtcttttcccaacaggtagtagtccgcccgctcgtaaaaatactccgtcaccatgtactgtacatatttcagccggctcaccgcaaaggagccgatgacagggaagattaaaatcaaaagcagaatcccgccccagttcccgccgcctcgtgaggagaagctcaggggaatcaaaaagataaagaagaataagcagccgccgaaaaagagcagggacaagagcaggctgcgaaaggagcggaaaagctctgtgagcaggctgaagaccgcaatgaaaaattccagcacatagtcgatggcggtgcccacgtatttaaaaatgtttccgtaaagtttattcatgttccctcctgtgccgctccataaaagccgcatcctcaaggaccaagtcgttttcgccggccaaggtttctaagtgatgggtcagttcgtggtacaaggtttctttcaaccgctccgtaatctcttcgtgggattcgtagccgtaaagggccataaaggagccgtagtacaagacgatgctcttgcccatgggctcggacttgtagtggcccatgacacaaaggtccgaaaaggtctcatcgcgcatttcttctctcgaaaaaatcacgccgccgttgaggccgcgaaaataatgttggggcaattcgtctaccaaatcatctaaaatcgtggccatttcttcaaatcgatcttccatacccacctcctgaactttcattatagaagaaagaccgtcaattataaaggtgctcataaaatcttcgatttgtcttcactattgacagcgccatgttgccaataaaaaagcgaggccgaagcctcgcaaatttttacagttggtctctcagttccggatgcttgttttgacgtcccacaagagacagcagaccgacgaccataacaaccccgatgattaaggggatgtaggggtcttggatgaagcctgcgataatgtagcagacggagctgatggcggccacggtcaaggcatagggcaattgggtggagacgtgaaccacgtgattgcattgggccccggccgaagacataatggtggtatcgctaatgggcgagcagtgatcgccgcagacggcgccggccaagcaggcggacaaaccgatgaagaacaagtggttttcgacattaaacatgctggtgacgatggggattaagatcccgaaggtgccccagctggtgccggtggcgaaggccaagagggccgcgacgataaagataaccaccgggaggaacaattgcaggctgcctgccacattgctcattatgcctgcgacaaattcggcgctgcctaaaagatcattggaaatgctcttcagtgccgtcgccatggttaagatcatgatggcggcgaccatggagttaaacccttccgttaaacaattcatggaggtgttgaagctcaacacgcggcgaatcattaaataggaaatggtgaataacaaggtaatggtggcgccccagggcagtgccacggtggcgtcggtgttaccgaatgcgccgacgaagtcgccggtgaagtccgatgcgggatcgaagtagccgccgacgtaaatcaatgcgacgacggaggtaatgatgaggaaaataatgggaatgaccaagtcgaaaagactggcgtgttccgccgtttcaaccacttgcatttcgtgttccagtgcggaaatgtcgtctccctgaagggccgcttcttcgtagcgaagcatgggaccgtaatcgtcgcgacgccaaatcaagacgatgacgaagatcagggtcaaaagggagtagaagttgtagggaatggcccgaacgaacatggtaatgccgctcatgcccgtgccttccgcatagccggatacggccgccgcccaagaggaaataggggcgatcatacaaatcggtgccgccgtggcgtcgatgatgtaggagagcttggcgtgggagatcttgaagcggtcggtgaccggtcgcatgacgctgcctacggtaaggcagttaaagtagtcgtcgatgaagattaaaatgcccaggaagaaggccgccgtttgcgcgccccgtctggaggtaatgtgttgtgccgcccattcgccgaaggccttggtgccgccgctgcgattgatgagggcgacgagcatgcccaagaggacgaggaagaggaaaatccccgccgtaccggatacggcgccgattaacccttcgttaatgacgtggtccatggtggtggtaaaggagccgccgctggccaagatcgcgccgacgaaaatcccggtgaagagggaggggaaaacttctttggtaataagggctaaggtaatggccacaataggcggcaagagggaccaggccgtggcctcggtgctcgcacccgatgcggcgacggcaaagctcgccccgatggcgataatgcctaaaattaaggcgataataagattgcgttggtttgtcatgtaaatcttcctttctgcgttttcaatcgaaaaaaagagccatgatactatcatgactcttggttatacgaaaagaaacgcaaaaggcacgatagctctccgttccgtagaacgacagtacgcaggatattctcctacgtcccggtgaaagatacttgtggacacaagcacccaaccctcggcacgtcaccctttcacgattatccattgaccggagataatcgctactgatgtgaaatgcgcctctatcatgtggattcgattgttgactatgagtataacagagataaaagaaatgtcaaggaaataatcaaattctttttataaaataaccagactggcccccataaccatcatgccgaagatcagacccaacaaagacaagtgggtttcgccgtaggcacgggaagcgggcaaaagttcgtcgaaggaaattaaaaccatgatgccggagatggcgccgaagaccacgccgaagagggtaggcgtaaggaaggggcgcagcaaaaggtaggccaacatggcgccgacaggctcggagacgccgcttaaaaaggtgagccacaaggcccgcttcttatcccccgtggcaaagtaaataggcgccgccacgccgatgccttcagggatgttgtgcatggcaatggccacggcgatggacaggcccatggcgggatccataagtccggtcatgaaggtaaccattccctcgggaaagttatggacaccgatggcgatggcgcttttcagtcccaccacttccagggccagctctttgctcttctcttccagctcgtgttcggttttaatgtcgtggggcgcgtcggcttccggcaccaaatgggaaataaggccgaagacggccatggcgccgaaaaaggaggccaacatcatccactgcgactgcttgtcggccatggtcttcagaaaattttcctgtgccatgggcatcatttccataaaggaaatataaatcatgacgccggcggaaaagcccaaggcggaggagagaaattttttattgtccgacttcgacaaaaagacgatcaccgccccgagcatggtggcgaggcccgccaaggcggaacttaaaaatgcgattgcgacattggacatactgcttttactcctgtttcttttcgccggcagtaccggaagaatgactaacgtccattattttaccatatttgcaataaaaaaacgcccggccacggttttaccgtagcgaggcgcttgtttatcgaaacagccgcgcggcctcgtcggtgaggcgcttcagaatcagggcctgtacgacgattttaatgacgagcatcaagccttggaaaggaagtttggctgtaaataaggggccgtagggattgcccgtaagcatgtgcacccacacggtacctaagcaaacattcaccaccaaggtggctaccacattggccaggatgatgcgctttagcgtcagctctttcttgtagaagaaatagccgtagatcacggcgcctaaaaaggcattaaaggtgaatcccggaaagtaaggtcccgtgggtttggtgaaaaacccgatgatgtcggccacagccgccgcaatccctgagggaatgggccctgccaccgccgatgccaaggtgacgggaataaatgagaagctgattctctgcacactgccgagatcgattcccaaggttcgggtaaagacgatttgcatcgccaccatcaaggccaaaaaggcaagtttcttcgtattcaattgtttcatttttcctccttaagctgcttaagaggacagcagcggatgcgacaaaagatagcgagcctcttcactcttcgtttgagagcaacttcccatctctcaacacttaacgccttttgtctactctacttacgaaacaattataaacatttcacgcccatcgtgcaaggctacttcgtgcgcacgcttcccaagaagacttcccctgtgtcggcgttcatggtaataacctcgccggatttcaagccgtcggtgatgcccttacagcccacaatggtgcacttgcccaaggacaagccggcaatggccgaaggggacgtaaggccttcttcttcggagataaagccgccggcccgagccaaataaggcgccagcgatttttcatagcccttcgccacgataatgtcgccgtcggtaaaatcacgcatataagtgccgtcttcggagacgatgcgggcgcgggcggtctttttgcccatgacaatgcccacgcctttgtgcagggtggatgccacttgatggaccttcaccacattggtgctgccggccaccccttggggaattcccgccaccatgacgattaaatccccctctttaataaagccggcccgcttcacgattttcgccgtctcctcaaaaatttgcctttgattggtctttcccttgacgcctgttacgccccactgaaggctcatttgccgcagcacggcgtcgtcttcggtaacggcaaagacatcggatttcgggcgaaacttcgccaaatttctcgagctgtagcctgtggccgtggcgatgacgatggcatcggcggaaagctcttccgccatttccacggcgtggcgcacgatgacattggtggtgtttcgcttaaactggtcgctctttttcaaaatgtgttcgtagtccagggcggcttcggtaaaggcgcagaccttggccatggtcttcaccgcttccaccgggtatttgcctccggcggtttctcccgagagcatgacggcgctggtgccgtcgataatggcattggccacatcccccacttccgcccgagtgggccggggatttcgaatcatggaatccagcatttgcgtggcggtgatgacggggattccctcgtcgatggcccgatcgattaattgcttttgcaccaggggcacgcgctccgtttcgatttccacgcccatgtcccctcgcgccaccatgatgccgtcggcaaaggcggcgatttcatccatgttgtcgatgccttctttgttttcaattttcgcaatgaccttgattccctcgccgccgtggctttccaaaacattgcgaatggcgatgaggtcgtctttttttcgaataaaggaagcggcgataaagtccaccccttcgtcgatgccgaagcgaatgtcttccacgtctttttccgtgagggccggcaactgaatggaggcaccgggcacgttgatgcccttgtggtctttaatcacgccgccgtttaagaccttcgtgtgaatggtcctattttcgatgcttgccacttcaagggccatgagcccgtcgtcaagcaagatcacctgccccggtgaaacgtctttgtagaggccggcgtaggtgatggttacaccggatgcgtcaccttctatctcctcggcgtaaagggcaaaggcgcccccttcttcgaggaccgcttccccgcctttaaaggtggcggtgcgaatctccggccccttcgtgtccaacatgagggcgatgggcagatccatttcccgccgcacttttttgatcctatccatggtctctttgtggctcttatggtcgccgtgggaaaaatttaagcgacacacattgacgccttcggtgaaaagggcccgcaagatgtcctcgtcccaagacgccgggccgatggtcgctacgatttttgtttttttcatcgtctctcctaaatcgaaattttatccagtaagtggtacatatctttgtcgaaggttttttccacggccagggcttcttccaaatccacggcctgaagcttgccttgtatcatcccgagggccagagatttttttccgcctcggcagtagttcaccgcttccgcccctaagcgggaggcgttgatgcggtccgcgccggtgggtatgccgcctcgctgcacatagcccagcaccgtgacccgggtctcgatgcccgtggcctcttccaaatccctggccagggcgtaggatgaaagcttgtcttccgtgagaagaataatgtggtggcgcttaccgcgaagtttgccggcgagcatttttttcttcacggcctcgaagtcgaaatccacctcgggcaaaatcacgctctccgccccgccggcgatgcccgcgtaaagggccaggtcgccgcagtgtctgcccatgacttccacaatattggcccgcttgtgggcgctggaggtgtcgcggatctttccgatggcatctaaaatggtctcgatggccgtgtaaaagccgatgcttccgtgttggtagcccaggtcgttgtcgatggtggcgggaatggtaatcaccgattgacccagtttcgacagggacagggccccgcgcatggagccgtcgccgccgatgaccaccaggtgctcgatggccatggcctccagatgctttttcgcttcaaaaagcccttcgtccgtgcgcattttttccgagcggctcgtgcctaaaatggtgccgcctttgtgaataatgtccgccacggaagacaggtccatatacatggcgtcttcgttaaaaatgccggtgtagccgtttcgaatccccagcacctcgatgttttcgtacaccgccgagcgcaccagcgcccgtatggctgcgttcatgccaggggcgtcgccgccgctggttaatatgcctatggccatagtcgcctcactttctgataatatcttccgcgggatccacgtacacactcagatcccgaatcaattcgtcgtcgtagttgaccgccaagcgcttcggaagacccagagctttttgctcctcggtgaaatataaaatcacatccagggcgccgctgtgcttttccaacaccccttcaatctcctcttgaaggtcgcgatttttcaggcgaataaacaccttctgcgccgcctcttccaagggacgaatggattccaccaagaccttgccttcttccacttcgcttccttcaatgcggccggtgacggtaataagcttgccctcttcaaaaaagcccgggggcagagaagcatagacttggggaaagaccacgagctcaatggtgccgtaaaggtcttccaaaatgccgaaggccatcattttatttttcttcgtcaccaaggttctggtctctctcaacatgccgcctaaggtgcgattaaacaagacatcggcggtttccagagcctcttttatatccgccgtgtttgaatttgtttgttgctttaagctttcgctgtaagactccaggggatgaccggagacgtaaatgcccagcacgtcccgctcgtattccagcttctgtttttggtcgtagtccttcagcttcggaagcacgtcgcctgcggcgctttccgtctgttgaaacaaactgacctggccgggaatgttccgcttattttctccctgaatctgatccatgagcttgtcgtaaacggccagatactggggcctgtttcctcccaggctgtcgaaggcgccggccttaatcaaagattccatgctgcgcttattcatggcgccgggggccgctttatccactcggcgaataaattccgtcatggaggcaaagggcccctcgcacctagcgtcctcaatggcgcggacgaaattggcccccacattgcgaatgcccttcagaccaaagcgaatggccccgtcttccacattgaatttcaaaaagctcttgtttacatccggcggcaagaggggaatgttcagccgcttcacttcctcgatgtacatgcgcatgtgatcggtgttggacataaaggaggtgatttgtgccgccataaattgcgccgggtagtagcgcttcagccaggccgtgcggtaggccaccacggcgtaggccacggagtgggatttgttgaaggcgtagttggcaaagtcgatcatgaggtcgtaaatcttgtcggcactggcctcgtccacgccgtttctcagggcgcctgccacgtccacttccccggcgtcggttaagctgccgtaaataaagttttgccgttcctgttccatcacggccattttctttttgctcatggccctccgcaccaagtcggcgcggcccaaagagtagccgccgacccggcgcacgatttccataacctgttcctgatacacgatgcagccgtaggtttcttccaaaatatccttcaccgcctcgtagggataggagatcttcgaaggatcgtgtttcgattccacaaatttcggaatctgattcatgggccccggccggaagagggcgttggcggcggcgaggtcggcaaatttcgtgggctttaagtcttttaaaaaggcccgcatcccgccgctttcaaattgaaacacgcccagggtttccgcccgctgaaagagcttcaacacttcgggatcgtcgtagtccatggcatcgaagtcgatccttttgccgtagtcccgctcgataaaggccagggcgtcgcgaatcaccgtcagggttcttaggcccaaaaagtccattttcaacagcccgagctcttccaactcgatcatattaaattgggtggagataatctcgccgtttcgcgtcaggggcacgtagtcggtcatgggattttgactgatcacgacaccggcggcgtgggtggaggtgtggcgaggcaccccttccagtcggcgagccaaatccaagagccgatgcacgtcttcttcttcatcgtaggcttttttcaaagaaggcgaaatctccaaggcccgattcagagtaatgtttaattcattgggcacctgcttcgccacaaaatccacccggccgtagggcaggtccatgacccggcccacgtcgcgaatggcggcgcgggcgcctaaggtaccgaaggtgacgatttgcgccacgtggtcttcgccgtatttgtcgatgacgtagtcgatgacctcttcccggcgttcgtagcaaaagtccacgtcgatatccggcatgctcacccgctcgggatttaagaatcgctcgaagagcaaaccgaatttcaagggatccacgtcgatgattcccaaggcgtaagacaccacgctccccgccgcagagccgcggccaggtcccacttcgatgcccgatgcacgggcaaaggcgatgaagtcccacacgatgaggaagtaatccgtatagcccatggaaaaaatcgtgttcaattcaaattctacccgactgcgcacggcctcattcacttcgccgtaacgcttcacgagtccctcttccaccagctcccgcaaatagccttcgttggtgtagccctcggggagttcgaaatggggcaggtgcaggtggtgaaactccagctccacatcacagcgggcggcgattttcactgtgttctccaaggcctcgggggcgtaggggaaaagttccgccatttcctcgggactcttcacgtaaaattcgtcggaggggaagcgcatgcgctgctcttcgtctaaaatcgatgccgtttgaatgcacaagagggcgtcgtgggcgtcggcatcttctttatttaagtagtggcagtcgttggtggcgacaaggccgatccccgtctctttggaaagacgcaaaagcttgcggttcacctctttctgctcccgcatgccgtggtcctgaagctccaaaaagaaactgtcttcgccgaaaatttcccggtaacgcagggccgcctctttggcccctgcctcgtcgttttgaagaagggcctgttgcacctcaccgcctaagcaggcggaagtggcgatgatcccttcgctgtgctttcttaaatcctccatatccacccgaggcttgtagtaaaagccctccacatagccggtggagacgatggccattaaattttcccagcctcgctgattttccgcgagaagaatcaggtggtagcgccgattgctcttctccgtcaccgatttatcctgtttcgtgacatagacttcgcagcccaagatgggcttgatccccgccgccttcgccgccttgtaaaaagccaccatgccgtacatatttccgtgatccgtcagggccacggcatccatgcccatggccttcacccgctcggggagatcggcgattttcgtaaagccatctaaaagtgaatactccgagtgcaaatgcaaatgtacgaaagatcccatagtcgtcctctctaaataaaaaaagagctgtcgaaaaggccagctcttttaatctaattgtttttctacaaattcaaccatgccctcgatggcctcgtcctcgtctttgccttcggcccgcaggataatctcttgacccgaaaaaatacccaaactcataatgccgataatgcttttgccgttgacctcttcgccgtcgcgaacaatcgtaatatccgattcgtactgattggccacccgaacaaacatggccgccggtctggcgtgcagaccctctttgtttttaagtataaccttagactctttcaatttaaactcctctcagcttttccgccagctcgtgtatttttttcatgcgatggttcacgccgcttttcgacattttcggcaccatcatttcgccaatctccgttaaactggcctcgggatgattcatgcgacagagggccacgggcatgagctcttcgcctaaagacgaaaggcccacggtctttcggatccaatcgatgtctctcatctgtctcgccgcggcgttcaccgtcttggacaaattggccgtttcgcaatttaccaggcggttcacattgttcctgacgtctttaaccacccgggtggattcaaattccaggacggagcgactcgcccccataaatgccaggaaatcggaaattttttccgcctcttttaagtacaggatgtaatcgtcttttctgtaaatgcccttggccgaaaagcccgcccgcgaaagccattttcttatgtcttcgccgtggaccttgtcgtgagaaatcatctccagatgatagcccttcgacggactggtcacggaccccgcccctaaaaaggaggcgcggatgtaggcgcggatcgacgccgcatctcttaacagggccggatccacggcatagtgcatttgaaaaacattgtcgggacgaaggaaatcgctatccatcagaagagagcgaaccgatccttcgtcggtcatgcgaatgcgatactgcttgtttttcttcaaatacatattttgcgtcgccgccacttccacatcgctgccgaagaggcgtttgatggcggaaaggatgcgccgcgccacggaggcgttctccgtgtggaaggaaaggtctattttaaggccttccctcaggcggatcacgccgcaggtgcgcacgtaagccgcaagctccgcgtgaagaatcgccatgtcctccatgggcacgcgggccaattcattttttacatcttttgaaaaactcacagtctcctcgattctactacctctctattatagagcagtttttcatcccttgcaatggatttccccataacggtcacataagcttaaaagtcgttgagccacgcgaaggccgtcgtggcgaatgagatcgccccctgtggccataaaggcgccttcctccacatctacgccttttttcgacagatccttccgctcttcggccgctaaataaatgggccgcaccccttcttctcgggcgtacttttccaggagattcggatccgtttttgcatcgtttgcaaggatgcacttcaccggtctcgtaaggccgtgggcttttaatgcctctaagtgatcgcttaaactcatcccctcggtttcgccgcgctgctccattatattggccacatagaccaagggggcgcgggcctcgtttaatgcacgggcgacctcgggcacgaggatgttggggatcagggaggtgtaaaggctcccgggccccaggaccaacagatccgccgcgaaaatttcatcgatgcaatcgccgttggccttcggcgcctcgggatccagctcgatggaggtaatggccgcgtcattttcgtaggcgtagcggggaatggcggattcgccgcgaatgctcgccccatcggcgtaatggccgatgagggcgatggattcttccgtcacgggaagcacccgcccggtgatcttgagtacctccgccgcttctttcaccccttcggcgaagccgccgtgaatatctgtcagagccgtaataattaaattgcccatgttctggtcttttaaattcccgtctttaaagcggtactgcaggaggtttttcagcgaaggctccgcattggcgagagccaccaaacagttccgcacatcccccgggggaagcatgccgtagtctctcctcagcatgccgctgttgcccccgtcgtcggccatggtgacgatggccgtaatgtcgtcgctgaagcgcttcaggccccgcaaaagaacggagatccccgtgccgccgccgatgactacaaatttcggatcgttcatgctacacgcccaaatctctgtggcccacgatgaccctatagcccgcctcgcgcagggcctctcccagtctttccgtcatggccacggagcgatggaaaccgccggtgcatccgatgccgatggttaaatgctccttcccctctgccacgtaatcgtcgccgaaggtcttcatgtagttgacaataaaggcgacgaaatcctccgcctttttcttcccgaagacgtagtcccgggtttcgggattcaatccgtttttcgccttcaactcgctgacatagtagggattgggcaaaaagcgcatatcgaatacgagatccgcctcttccaaaatgccgtttttaaagccgaaagagatcacggagatgcctagcttgcctcgctcctcgattaaaatgctctttaggcgaatttttaaattataattggtcattttcgatgtgtcaataatgtgatccgcccgggcgcggaggggctccatgtgccgcttttcctcttcgatgcccttagcgatagaggagctcaaaggatggggacggcgcagttccttgaagcgctgaatcaacacgtggggatccgcctccaaatagatgacggtcacatcgtccacctctttgtccaaggtttgaatggccacatccagctcgttaaaaaacaggctcgagcgaatgtctaaaaccagtgccaccaagggcatttgggcctcttccaccatgtcgatgaatttcggaaacagcgccggaggcaaattatccacgcagtaatagcctaaatcctctgccgcctttagggcctggctttttccggcaccggataagcctgtgagtactaaaagcttcattccgtttctcccaacactttcacttccgtctccagttccacgccgtgtttttcatagaccgcctcctgtaccgtgcggatgagctccaccacatctttgcaggtggcgtcgccgcaattgatgacgaagccgcagtgcttttcagacacttgagcgccgccgtgtttcaggccccttaagcccgcctgatcgatgagctgccctgcgaagtagccctcggggcgcttaaaggtgctccccgccgaggggtattccaggggctgtttcgcgaggcggcgttgccacaattcatccatacggctttgaatggccgccgcatcccccggcttcaaggcgaaagtggcctctaacaccacgagcttttcgtcgtagacgcggctgtttctgtagcgaaagtccattgcatctgcggggatcacttccgtggtgccgtcgtgatgcatgaccttcaccgattccaccacatccttcatttccccgccgtaggcaccggcgttcatggtcatggcgcctcccacggcgccgggaatcccgtgggcaaattccaagccctccagggatgccttacaggccgcctccgccacttttctgagtgaggcaccgctttgagcgatgacccgcgtgccgtccacccgaacgcctgcaaaatagttttccagacggatcaccgcgccacggatccccttgtcggaaaccaccatattggtgcccttgcccatgaccatccatggcaagttttctttttgaaccgcaacgatgacttggcgcagctcctcctcggtgcggggttcgataaaataatccacgggcccgccgatttgaaaactggtcacttccttcatggggcgatgctcaatcacgtgttctcttacaaatctgtccatctatctaaactcctttatttttaattctgtaaacctattgtaccaaacaaatgcaaagaaagttcaaaaaagggggttgacaagtagaggatgtccttgttagaattgcttcaccgagtttgacgaggagagtaacctgaagggatcgaactacagagaagcttcatttggtgagagaagcgttttggttttcgggcgaacatggcctctgactctaagggtcgatactagattcttacaggtgcgcctgttacagcgccggagtatgatggtactcgttgaggtgtaaatcgtgagatttacataaataaaggtggtaacacgatttctatcgtcctttttttcctatgggaaaagaaggacgtttttttattttcattttgaacgaggaggttcatcgtgatcgacttaaaacatatttccgtggtctttgaaaaagaccgccaggcctttacggcggtggacgatgtgtccgtccacgtggcgccgggggatgtcttcggcatcgtcggctactccggtgcaggcaaatccacactggttcgcaccattaatctactgcagccccccacatccggggaggtcgtcgtaaacggcgaagacttaaccaaattgccggtgaaggagctgagaaagcgccgcaaaaaaatcggcatgatttttcaacactttaatcttatgaacgcccgcaccattttaggcaatgtgctctatcctctgaaagacagcaagctttccgatgcagacaaagagaaaaaagccatggatcttctgcgactggtgggcattgaagacaaggccaacagctatccccgagaactttccggcggacagaaacagcgggtggccatcgcccgggccttggccaacgatccgaagattctgctttgcgacgaagccacatcggctctggacccccggaccaccacctccattctccatctcttgaagcggttaaacgaggagatgaatttaaccattgtcctcattacccacgaaatgcaggcggtgaaagaaatctgcaacaaagtcgccgtcatggaatcggggcgggtggtggaagccggctccttaatcgacatttttgccaatcctcaagaggaaatcacaaagcaatttgtgaacaccgcaagccactgggatgaaaccatcgacaagctcaaggaccacggctactttaatggtgacgatcccaccagcgagctcatccacctgcgctacatcggcgcctccgccaccaacccggtcttaaacgacgtgttcacgaaattccacgtgaagaccaatattttgtccgggagcatcgaatttttagaagatgtgcccttcggcaatcttgtggtgctctttgaaggctctcccgacgccattaaacaggcaaaacaatacatgatcgatcaaaacgtcgaccttcgcgtcgtcgataaggaggtgatttaatggacttctttgccaatgccatcgcatcgaaacaagattttattacggaaaccggcgccaccatttacatggtggtggtcacgtcgattatcgccggcatcatcggcatgttaggcggcctggccttgaccctgacccaagagggcggcctgtgggaaaacaaaaaagtgtattgggtcttggataaggtggtcaacatcttccgttccattcccttcattattttactggccctcatctccccggtaacccgcgccatcgtcaagaccaccatcggcaataccgccgccatcgttcccctggttgtgggcagcgcccccttctacgcacggcaaattgaaaatgccttggccgaagtagacggtggtatcatcgaagcggcgaaatccatgggcgattccccggcgaacatcgtcttcggcgtttatttaaaagaaggccttcccgccattttacgggccagcgccatgaccatcatcagcctcatcggcctcaccgccatggccggtgccgtcggcgcagggggcctgggcaacctggccattacccgcggctacaaccgctatcaaaacgacatcatcatcgtgtccaccgtccttatattaattttagtctttattacccaaggcctctttaacctgtgggtgaagaaagtacaacactaagcaaaagcgaaaggagcttaaaatgaagcaattagttaagaaaattacctctatcgcccttctctcggccctggtgctcaccggatgtgccggcggaggaaataacgcggcaaaaaacaatgccgacaacagcggaaaaaataataccgcacaaacggccaatgcgaaaaaagaaggccaagtggtaaaaatcggcgtcgtcggcgacgaccaacgcctttgggaaaaagcgaaagaaaatgctgccaaagacggcgttaccttggacatcgtggtctttaccgactacaacacccccaacgacgccttggtcaacggcgacatcgacttaaatgccttccaacacaaagccttcttggatgattacaacaaggcgaaaaaccaaaacctcgtgcccatcggcatgacctacctctcccccatcggcatctactccacgaagattaaggacttaaaggaactgaaagagggcgcgaaaatcgccatccccaacgacgccaccaacggcggccgggccctcatcgtcctcgaacaagcgggcgtcattaccttaaaagacgacgccggcctcgtgcccaccattaaagacattaaagacaatccaaaaaaagtcaccatcgacgaattggacgcgtcccaagtggcccgctcccttcccgatgtggacgccgctgtcattaacggcaacatggccgtggacgccaaattggatccgcgaaaagacccgatctttgtcgaagcaatgggcgaaagcattgccccctacattaactacgtcgtcgcacgagctgaagacaaagacaacgaactctacaaaaaagtcgtgagctattaccaacaagacaatgtggatcaactgctccaagaactctacaaaggcagccaatacgccgcatggaaattggatctgaaggatctgggccaatacggcgattcggcaaaagacgccaaataaatagatcattagaaagaaggatcgacatgaaacgaaaagaacgaatgctttgcccgtccacccgtttaacaatccaccgcccttaggggcccgggtgtgacggattccttcgaacacccattaccggcttcggccaaaattagaaaaggaatagtatccatgaaacacatttttaaatccattaccgccgttctcttatgcgcctgcctcctctttaccgccaccggctgcggcaaaggcggcgacggccaagcaaaacaaaccgtgaaactgggcgtcgtcggcgacgaccaacgcctctgggaaaaagccgcggagcttgcggcaaaagacggcattaaaatcgagctcgtccacttctccgactacaacacccccaacgacgccttggttaacggcgacgtggacctgaacgccttccaacacaaggccttcttagatgcctacaacgcctcgaaaaaaaccgacctcgtccccatcggacgcacctttatctcccccatcggtgcctactccaacaaaaccaaagacttaaaagacgtgccccaaggcggcaaagtctctattcccaacgacaccaccaacggcggacgcgccctcttcctcttagaagcggcaggcctcattaagttaaaagacgacgtcggcgtcagccccaccaaggcagacattgcagaaaacccgaaaaacatcaccatcgatgaattggatgccgcccaagtggcccgtaccctgcccgatgtcgatgctgcggtcatcaacaccaacctcgccatcgatgccggcctctccccgaaagacgatgccatcttcatggaaccggtcaacgaaaactccgccccctacattaactacgttgtggcccgaggcgaagacaaagacaacgaactctacaaaaaagtcgcttcctactaccgcaccccggaagtcaaagaattaaacgacagcttgtacgaaaagacccaactcatggcttgggagctggacattcccgatgccggcaacaccgccgatcccgcctatcgtccgggcaaataagacgatcctcctttaaataaaagcccttcggggctttttttgtgcccgtcgtggtgctatccgatgcccgatgatataatgattaaagtagtcaaagccctaattcagaaagaggtgcccattgagtatttcgaaaaaatccaaacttcccaagggagaatttcgcatcattaaagataagtacattccggaaatcgaatcctcccttcgcaaaaaacccgtactcatgcccaatgccatttacaatgccagcggcattcgcattcagggcacgcgaatcaaatccctgattttctcaacagatatcgctttaattcgcaactcaaacgcccaggcggtcttcgccgtttatccctttacgccgcagctggccatcgtgcagtccattattcaaggctcctccattcccgtctttgccggcgttggcggcggcaccacctccggcccccgcagcgtgtccatcgccttggaatgcgagcttttaggcgcctacggcgtcgtggtcaatacgcccatgaaaaacgaagtcattcgggaaatgtataaggtcttggacattcccattatcgccacggtggtctccaagcacgacgacttcgtcggcaagatcaacgccggcgctcggattttaaacatttccggcggcaagaatacggcggagctcgtagcctatgtacgaagcattatcggaaacgaatttcctattatcgccaccggtggcgacgacgaagcgagcattcacgccacgaccaatgccggtgccaacgccattacttacacacccccttccacttcagaactgtttaaaaccatgatggaagattaccgcatgcatagcgcagcatccaaggcgggagagaacgacccgacgaatttggatgtggaagaattccaacgggatttagtcttccccgccgattccatcgaatttatttatccggagctgaacgatgatgaaaggtaaactgaatcaacatttaattaccgtggttttaatttttctcatcattttgcttttcagcacgacacagaaatttttaagcccggtctacagcgtcattatgtctctcatcgtgccgctgattctggccatttacattttctacgcctttcggcccattcgcgacaagctgacacaatggacgaagaagccccgcctttccgcggtgctcaccttcctcctttttatcgccattaccatcggtctcttttacgtcacctttaccatgatctacgatcaggccacgagctttttctcggacttcgacgtcaacgccttggtcaccttcaatcaatcggagttttatcatcagctgaatcagtacgtagccttggacagctacatggataagtttgaagcttggctgcaaagcattgccggggacgtgcctcgcctcttggccagtggcctttccaatataggcgccgtgggaagcctccttctcttaatgattttggggcttttctatctcttaatggacgaagacgacgccgtgaaggccattcaatacttggctcgcggcaagtattacgaccgcatcatggaggtcttgagtgaaattcacaagaccttggaaacctatatctccgggcagattttagtggccggcgtcttgggcgtgcttatgtttatcggctacaccgtcatcggcttgaaatacaaattatccctcgccgccatcgccctggtctttaactttattccctttatcgggcccttcttaggcgccgcaccggcggtgctcgtaggccttaccatgggcggctccatggtcataaaagttatcgtggtcagcgttgtggttcaacaattggaaggcaatgtcattaccccgaacattatgggaaacaaattggacattcaccccttcgtcgtcattttggcggtgatgatctgcgccaatctcttcggtgtacttggcgctttaatcgcatcgcctctgtatatgtgtttgaaaatcatcattaaaggcattcgcaacgaacgcttcgacaacaaaaacctctgcgccattccggaggaggaaggcgcggagtcttaaaggatcggtgattttatgaaatgcccacgctgcggttcggatcaacggacaggcgccgctttttgcaacgcttgcggcgcgccccttccgcaacaagcccccgcttctcaaccttcgcctcgtggggcggacggttcgaagaaaaaaatcatcgccgtcaccgtcctctgcgtgctcctcgccatggtgggcctcgtctttttaatgcgccatcaaaagcaatcggagatacggggtttggaaaagcaaatgagctttcacgccgcaaacggcgattacgacagtgccctggacattgcgagacgcctttatgacatgaccggcgacgaccaatacctgagccgctccacggagcttgagcaaagcgcccgggcggcggaagatttggccgaagcaaaaaagaaagccgccgaagtgccggaaacgaaaaccatcgtcgtggaaaaggaaaagcccgtggaaaaaaccatcgtcgtggaaaaagaaaagcctgcgtcgaaacaggcctcgtcaaacggcagcaagctcagcaaggtggcggccaatctgaaagacaaggacatcacctccacggccctgaagtctaatgtgcgcacggagcctaccattcacgcgccggttctctacgccttggagaagggatccgtcgtccacgtctacgacacggtcatcgaaggcaatattatttggctcgacatcggcgacggctggacctcccacaaaaattttaacggcgatcttaaatattgatcccgccgccctcggtttcgccgggggcttttttgcatttgttttattctacgggcaaggcaagtttgccgcggcaaatctcgcttcgccatggtactttcctttaatcttcgctataattaaattattacaataataaaaggtggattatgagcccttccaagcgaaacgatacaatcgatctgatcaaaaccttcgccattctctccgccgtggcgattcacgtctccgccccctatgtggcaggggatgttacaagcgcctattggcccgtcgcctgttttttcaggagcttcgcctccggcggcgttcccctctttttcatggccagcggcgcccttttgttgcgcccggaaaaagaaatgccccttaaaaaactctacggcaaaaatatgttgcgcatcctcgcggcgctttttgtctgggcctttgtttatcgcctcgcgcccatctacggcggcatccattccctcggggagctgaaagcggccctcgccgatttagtctttttccgccacaaagaccatctctattaccttcacgttatgatcctcgtctacgcctttttgcccatgagccgcatcgtcgcctgccatgccgcgaaaagcgacagggtctatctcctcgcgctgtggtttattctcgggatttttcttcccacgctgaaggctttttatcccctcgacggcgtcggcgccattcccctgcagtggagcatggtgctctcctacagcgccttgggctacaccttcatgggctacgtcctttcggatcaaaagccggcgaaaacccccttcgccttcagcgcagccatgggctttttgctcatcttcgtcggcacattcatcttatcccgcaccgccggcctattggaggagcgcctctttgaagggatgtccgtcggcgtatgcctttgggccatgggccttttcgccttggcacaacacatctccctttcagaaaaaatgaaagcccgggtcctcgccgtctccaagggctcttttgccatttacctcgttcacgtcctcgtcttggattatttgaaaaacttcttccccgtcttgggaaggctgaatccccttttgggaatccccgccgtcacgatcgcggtcttcgccgtctcctacatgatctacaaatgcctttcaatcattcccctcgttcggaaatggcttatttgaaaattgcccggccccgccgggtttttttgcgcaaaaaatcgggcaagcgcgtgcttacccgatgaatgtatttcttcaattagtttaattcgtccagctcgtggataaagagcccgcttctgggcttgggctcaaaccaagtggacttcggcggcatgactttgccggaatccgccacggccataagctcctcaagggccgtggggtacatggaaaaggccacggccatgtcgtcctccacccgccgctccagctcttttaagccgcgaacgccgccgacgaaatcgatgcgcccatcgcttcttggatcgtcgatgcccaagatcggtgcgaacagattgtcctgcaggatcgatacatccaaggcctcgatgacattgtcgggcacttcgcccttaaattctaagcggtaccagcgatccgctaggtacatgccgaattcgcctttcttttcagggcggacggcttcatctttttccgtgacgacaaacttttcctcaagctttttgagaaaggcttcttcgcttagtccctttaaatccgccaccacccgattgtagtcgtagacgtggagctgatcggcgggatagagaatggccatgaagtaattgtactccgtgtccgcatccccggggccgaatttttcccggcgtagcttcgccacccgcaccgccgaggcggatcggtgatggccgtcggcgatgtagagggcctcttgcttcttgaaagcctccacgagcccgtccacgatggcccgatcggagagggtccacacacgatgggttatcccgtcgtcggtggtgaagtccagctccggcgcatttgccgtgcctttcgcgatcaaatcggcgataccatcgtcgtttctgtaggtgagaaagatgggtcccgtttgggcatttaagcgatcgatgtgatccacccggtcttcttctttttcccggcgtgtcttttcgtgttttttaatgcgatcgttgaggtaatcgtcgacggaagcgagacacataagcccccgctgcttgcgggcgccgtcgtccagctcgtagacatacatcttccgcgtatcgtccccctggaaaatccccgccgccttcatggcttcgaaatttttcaccgccacatcgtttatggccccgtcgtaggtgtccaccgtggctgccggcagatccacctgcaaaaaggagcgggggtgtttttttatctcctccgccgcttcttttgtggaatacacgtcgtagggcagggccgccacgtcttttgctaaattagttttcggccgcagggccttgaaatctttaatggtaaccatgggacactcctagaaaaaccgcacgcgaaccacgccgtcgatgtttaaaatcttttcccgcaggccttcgtggacgggggaatcgatgtcgatcatagtgtaggcccagttcacccggtggcgattcaaaagattggcgatgttgatctcctcatcggccaagaccttggtgatttgccccagcatattgggaatgtttcgatggttcaccgtgagccggcccatgctggcgcagcggcccatattggagtcggggaagttcaccgaatttcgaatgttgccgtgatccaaataatccaccaattggcgcaccaccatcatggcggaattttcttcgctctccggcgtggaagcgcctaagtggggaatgttaatggtgtggggaagcttcatggtttccgaatcggggaaatccaccacgtagttcaccacgacgccggcatccatgaatttcttcagtgcctttacatccaccaggccgcctcgggcgatattaatgaggcgcaggcccggcttggcgatggagagcaactcctcgctgacgaaatttttcgtgtccgccgtgtagggaatgtgaagggtaatgtaatccgccttattaaaaagggctttgggatcttccaccacgtcgacgcgggtatccaagttcagggcgtttccgatggaaaggaaaggatcgtagcccacgacattcatgcccatgtcgatgcccatttttgccacgcggcggcccgtggcgccgaggccgatgacgcccagggtcttgcccataagctcagggcctgcgaagcgcttcttcgccgcttccacgtccttgccgatggcatcgcccttataatttctcacccagtcgatgccgcccagcacatccctggaagacaggagcagagccagaagcaccagctccttcacgccgttggcattggcccccggcgccttggtgacgacgatgcccttttccgagcagcgatcgatggggatgttgttcacgcccgcgccggcacgacccacgaagcgcacattgggcccgaagtcgtagtcgtgaagatctgcactgcgcaccaaaatggcatcggggtcttccacatccggcgacgcgataaaattcgccggcaacagcttcagcccttccttcgaaatattgttgatggtcttgattttatagacacgccgttcatccttagccacgttgcacctcaaattccttcatataatcaaccagcgccttcacgccattcatgtccatggcgttatacaggctcgcccgcatgccgcccacacttcggtggcccttcacattgtaaaggcccttggccttggcaccggcgacgaaatccccgtccaaatccttgtctcccgtcacaaagaccacattggtgagggagcgatcctcggcgggaatggtgtttttaaacaaagcgctgttgtcgatggcgtcgtataaaaacgccgccttttccttgttccgcgcttccatggctttgacgccacccattttcttcacccaatccaagaccaagccgcaaatataaatactgtagcaaggcggggtattgaacatggagtccttttccaaatgggtcttgtaatccaacatggtgggcagctcgcccttttccttttttaagagatcctttttcacgatgaccacggtaaccccgctggggcctaaattcttttgcgccccggcaaagaccaagccgcaaccattcacatcgtaaacctcgcttaaaatatttgacgacatatccgccaccaccgtgccctttatggaagccaaccggtccggagccaggcgggtgccgtaaatcgtattgttcacgcagacataagtatagacgctgtcctttgccccttgttctaggttgggatagtaggaaaaattagcctcctccgacgaggcgacggccttcacgggataaagcatggccgcttccttgtaggccttcttcgcccaagagcctgagatcacgtaggaagccgattggccttcggataaaagattcatggggatcatggtaaattgcagcgacgcacccccttgcaaaaagagcacctcgtgatcctcatccagattcagaagcgagcgaagagatgccttggcttcggcgtgaatggccccgtactcacttgagcggtgactcatttccataaccgacatgccgcagcctttgtaattcaacatatccttcgatgcctgctccaaaacctccacaggtaaggtggcggggccggcggaaaaattaaacactctttccattacaaacctcctacgtataaaacactgtaaagcactaaagctttttggatattgccctattatacgccgtaagataaaaagaaacaatcccgcagcgagaaaaaattaaatatacggatggcccacggcaaaaatcaaaaaacgtcgcttttttagaattacagcttgaaaattctgctgtaattctcgaaaaaggcctttttcgcaaattacattttaaaatcgcctttcttcttctcgataatcccgcttttttaatttaaaagcattaaaaagcggggaaacaggcggggatatttgcaacacacagcaacaaagacacgacgatacaaaacgatcgcatcaaaaaaagtggctgattgcaatgctagcaacaatcagccacttttacatatggtggagacggcgggggtctaggatataggcttataaaccccatgatataggcatttaaaacaaatagtgtgcaaccagtgtgcaacaatgattaggaagtgtaacattctatccctgtgtaaaacttcttattttgtaaataagcaccttacgagaaatttctaaatcgtgtagggtaatggagtccttccattcaaatttatttagcgtatatgatagaatttaatagaacattgaagcaaagtttctggaaaaattaagaacgtcattgtcttgatctctatctaatgaaaggagtgtaaaataaatgaacgataaatttaatatgacgctttcacaaaatattgcttacgcaaaacgtaatttagtagacagcatttataatagtgccaagttggaaggattaaatgttaccttccctgaaacttatactattcttgaaaaagcgaagatgcaaaatgtagatatttctgccgtcagtacgattttaaatttaaagcatgcttggcaatttcttttaaagaacatcgaagaacccattactcttgatttcataaaagacctgcattatgaaattgcgaaagatgaagcgcttgcctggggagagttgaggacgggtcgtgttggtattggtggaacagattatataccaccaatacctgaagaaggcgaagtaaaaacaaaacttttagcattcgaaaaaataaataatgcaacggaaagagcgattgaacgaatgctgtggatgatgaaagctcaacttttttgggacggaaataaacgaactgcttcacttattgctaataaagatcttataagccacggtaagggtattctaacaatcagggaaaaagatattctagagttcaataccttgctcagccattattactctacagatgaaaaaaccgatctagtaaaaatgatttacaaaaaaggaatttccggtgtcgagttaaaagatcaagcaactaagagaatgaatctttctaagcccgactcgtcattgaaacatagtgatttagaaagatagctttaaagccactgtcttatcgatgttccatcgaggatggtggcttttttggtcttgaatttacaatctaagtgcaacgaaaaatgattcaccgttttccggtaaaattatgtcgacgaaaaccaatcaaccagggaggatgataaatcattattctcattttacacaaagattatgccttcagcgtgcgacgaagtgtgcaaccgttcgagattatttgagacaaagtgaaagccatttgctatttcaaaaataacaaatggcttaaataagcggtttcaagattatttgaaaccctttgaaatggaatggaaaggaaatcatatattgatagaatttcagcctatgggtgcaaatcgatacctatgggtgcaaatgagggtgcgtaggtgcaattcaatgggtatgggtgcagctccattttacaactaactattcctcataaattaagcccttctactatttcaggtatccacgcacataataagaaatttatgcttttactttttctttactcatcttatttagttctccaagcatcatgaagattccaacaacaatcataatgaaatcaacaaggggctgtgtgaaccaaacagcttttactccaaataccattggcagaagaaccattgcagggacaaataggaagagctgtctaagcatgacaataatccccgctttctttccgttcccgattgattggaagaatgtaattgtcattaccattactccatacataataaatacagaatagaatagtctgaaattcccaactccctgtgttatgatacttgcttctactccaaacaaggaaagtatctgacttgatagcaataatgatggaatccaaaagattgccgcaagcacaagtcctccgatagaaaataccttcattgcttgccttactctttcatattgctttgctccgaagtttgttccgacaacaggctgcaatccttgactcattccccaaagtggaatgaacgaaaaggcatatacacgaagcgatgctgccatcaaaattccgtttggatctccgccatacttaaatgccattttataaagcatagtctgttgaatcatgaacagaagctgcatcatcatagctgatgagcctactccaaacatttctttttttatttcttcatcggacttaatcttatgaattttaacgactttactctttttcaggaagtagtgcagcgttacaaccgcctgaacaaactgtgctgtaatcgttgcaagggcagcaccttcaatggcgtattcacccataactgtcattaaaatcggatcaagaatgatattcagtaaagctccaagtcccattatcatcatggcttttttcattagaccttcgccacgcataaccatgtttgcggactgtgtaaaatttacaaagagggaaccgataaagattactcttaggtatctgataccataagctttgatctcacctgttgctccgaccatatctaaaaaatgtggtgcaagtagtattccgccaactgttatgatcgccgaaaacaaaatcacccagaaaatcaggttgcccatgattttatctacggttttctgatctcctttaccaatcgctcgtgataaaacagatgcagaacctacaccaagaagtgtagacaccccgctgttaaaaaaagtaagtggcatcgcaacgccgcaggcagtcattgcagtttgccctatgattttcccggcaaatatcccgtccattaacggatacaaaccgattactatcattccgataaccgccggaatagatagctgaaatagtaaatctattggtcttttggtcaatagttgttctttcatatcttgcttcataccaaaatctctcttctaaaaatttttctatttgattttccaaccgattgcttgtattcttgaatcaacaaatcgttgatatattccatcttgcttcattaactcatcatgagtcccgttctgcacaattcgtcctttatctatgacaaatatttgatctgcgtttctaattgtctttaggcgatgtgcaatcattaaaattgttttttcctttgtcagcgcttgaacggcagccataagttctttttcattttctggatctacattagcagtcgcttcgtcaaggatgataataggtgcgtctttcataattgctctggcaatggaaatgcgttgtttttcacctcctgataatgatgtgccattttctccgataactgtgttatatccatcgggcagagccataataaaatcatgacagcaggctttctttgcagcagtaatgacattctccatcgaggcgtccggttgtccaaaccgaatattattcgcaaccgtatcgtgaaacagatatacgttttggaaaacgaagctgaaattttgcattagagcatccatagaatactctttaacattcttcccatcgagagatacccttcccgtatctacatcccaaaaacgagcaatcaaatgacaaagtgtggtcttacctccgccagatggaccaacaaaagctaccgttgttttctcaggtacaatcaaagataaattgtcaataatttttttcttgccgtaagcgaaatcaataccagatatttcaatattacttgtctttgcggtatattcttcacctgatatatccatcgtattaagactcaatacctcttttccacgctctacgcacaaatctactactcggagaagagaagagtaggatcccattgtttcaagacctgaaaataccataaaagacataatcagcatgataattgacgtaagtaaatccatagaaccgctaagataaaagccaattgaggagatcaaaatagcaactcctgttagttttatcgcaatgttttgaagtggaatatatcggttgcaaatcatctccaactccgtgtttgtatcaccagccatgcgaatcgtatcatccaaattagttttcgaagtggaaaccaaattgtaagcttttacttcggatataccttgaatgtattccagtacattggatattacatttgtatcaacttctactttttttgcagaggtttctgcatttgcttttcgcattatatggtttattatggaaaatatcgcaattcccacaagacaaattatccctattctccaatcgaatacaattatcattagaacaataatcgttgtgttaagaatcccctgagttgtgagcatcactacacgggtagccacatcaccaagttgttccataacattcgtgataacggtagttatttgaccaagactattctcattgaaatatcccattggcaaatatctcaaatgttctgcaatttcaattcttttatcggcacattcccgatatcctgctttacactgtagcatgctggatatgcctcgtaggaatgattcaagaattacagaaataagtagtatgataaaccctgtcaaaattctgctgccagacatgctgtttgaaagaaagccatccataacaaaatagattgcagggaatttacttgcttcgcaaatagcaatcaaaactcctattacaagagtttgataaaatagtcgtctgttttccttagcacagaagttaaaaaattttttaagtgtggaaatcatactaatacacctcctctcgcttcatatacatctctcgcataaatgtgtgccttccacatattcttgtaaagagaactggagttaagaagctcggtgtgggttccttttgcttcaatatttccgtcctttatcacaacaatctgatcagcatcaattatcgtagaaagtctatgtgctattacaataagagtcttttctttagaaagttctgaaatggacttttgtataatagcttcattctcaggatcagtataggcggttgcttcatcaagaatcaaaatcggtgagttctttagcattgctcttgcaatggaaatgcgttgcctttctcctccgctaagatgagcgccactacctccgacaatcgtatcaaaaccattttctagtcccataatgaagtcataacaaccgctttttcgtgctattttttcaacctcttcgtttgatgctgaaggtttgcccatacgaatgttctctcttatagaagtattaaatagaaaactatcttgtgaaacgtatgctatctgtgcattgtagtcagatagtgacatatcccgaatatctactccaccgattttaatgtttccgccctgtacgtcccacaaggatgctataagtcgagctaccgttgactttccactgccagaaggccctacaagggcagtgacagttccatctggtatttttagactaaaattgtgaagaacttccttttcaccatatccgaaactgacattattaagtgtaatatcatgaacagtattcaatttgttgcttatttctggacgtttcagttccgtaagatttaaaatatcatcaatctctgtgaaaatcgaagttgcttttgtaatatcgtcgttataactcataacggtaatgagtggtgaaataagtccgcaagatattattaaaatcatgatgtattctgtaagagaaagcgagccgttcatcgtaaagagtgcaccggtaggcaaaacagataataatgttgccggtgcaatcaccatgccaagtgaaaaaggaataacacatgccctcatccattcaataaaactgttcgcattttcttttgctgcatctgcaaatcgcttgtaggagctttccgcttttccaaatgccttaataacctcaatacccccgacatactctaccgcagtatcgtttaatacctttgttgtagtttgtgttttttgaaactgtacatttttgtcttttaacatccaaatcattgcaattcctgcaattggaagagtagcaagtgacagaaatgccatacgccagtcaagcgtcagaatatatataaatagcataattggtgcacagatgttagctgtaaattctggtactacatgtgccaaaatcggctccatagagtctgttctctcgcagattatattttttaactctccacttggcattccttgtactgtaccgagaggaaggcgtgatagtttatctatgagcagaatacgtacattgccgattagtttaaaagtcgtgcgatgagatatattcgttgatagagtatgaaaaactactctaaatatccaaagtacagccattatcagtccttccataagatagacataaaaatccctttctcctaaaaaaagtttcttgaccatatctcccatcaagatatatggtgtgagggaaaaaaacactccgatcaaagcaaaaatgatgcttttaatatatgtgctcttttgttctcctgcgaattggaagatgtaatctataattccttttttcctttgtttattcatatatgaatctctccttttcctaatgtcgatgattcctatattcatttggagtcatgccacatatttttttgaatacagcaccgaattttgattggctcttataacctactgccattgcaatatctaatatactcatatcttctttttctgttagatattctttggccttttcgatacgatattcttttagccatgtgtagattggtttttcgtataggctcttgaagcaatccttaagagccgtctgtgaaatatcaaaccgctctgctaaccacttaattgtatagtcctgatctatgttttcggaaatcaatttctgcactgctcgcgttttttctaccttgtctttgtagaagtatgagcctccttttgttgtgttcttcgcctcgattgcagacatacaaactaataattccaatactttggtacggaaataagggattttcacactatctggaaacaagtacagatcggtaaaaaggcgctcaagagtttcttccttctgtatgataaaatatccatcttctccacagaattttcttcgtatatctgtaaggtcaataggaatacctgctgcattctcggtaagtgcattttctgccaatgaatttgcaaatccgatcgtgatcccgtgatagtgattagttgggaaaaaaaatatccctttatgatgagtacgagaatcaatacatatattgcccggctttttcatataatacatgtcattatccaaatccattgtaagactgccctctcggcagtagtccacaacaagcattgtatctaccgcctgatatatagaagaataagaagacatatgaaaatcgttatatattaaaaatacaccgtcaaagactttgtaaataatcatatctccttcgccagtctcgttttccaaacgaattacagcgcaatcttcagttcgagataaaactcgatattccccaatctttcctaaaccatgaaaagtatcttgaactatatcagatatactattaaaattttctgtttgctcatcaaagacgtgaataccccaactcatgctatacctcctccatatgaataacatcatcacagcagtattcaataaattcgctgtcgtgcgttactgtgattattgttcttccttctttttttaatcgattcaaaatttgggcaacagcattcatctgcaggcaatctaatccgctcgtcggctcatctaaaagaagaattggcaattttgatgcaatggcacatgccaaggcgagcctctgcttttgccccccggaaagcgacattgggtgtctgtcataaaaagcttcgagcccgacatcggaaagagttttttttgcttcctcctctttttcccttggctgactaatcaaaacctcatcaagaactgattccgtaaaaagttgatgattaacatcttgcataaccataaatattttgccaacacgttttttacaagtataaggtaccccatccacaaacatgatgccgctattttttcgtataccacatatgcattccaaaaatgtggttttccctgcaccattcgtaccaataatagcagtcactttaccttttgggattttcatttctttgatagagaaaaccttacgttttttatcatgtgagtagttaaaatctttaagtaagatataatcatctgaatttgtattagttctgacaagacttgttggtgctacccttttgagagaacgcatcccaaattgttttgtatcatcttctgtaaaacagttaacttcattctttgcaatttctttcttaaaagtaccattttccagaatgattaccttatctaccaaatcccaaacatagttgatacgatgctccgcaatcagaatcgtttttccagcgtttttccaacatataatcagttctcgaagattttccgctgcctcgtaatctaaatttgctgaaggttcatcaagtagaataatgctcggtgcaagaacatttattgatgcacaggcaattttttgcttttcaccaccagaaagttcaaaaatattccgatccatcagcggctcaatatgaaaatcccttacagttctgctaatacgattcaatatttcttgctctgggaatgcaagattttccaaaccgaatgcaagttcactggtagtatcaacattaaaaaattgtgaacgcggattttgaaaaactgtaccaatcattccagcattatcttcaattctacctttttgtatatctttattatctatatatatgtcaccttcgattttcccactataaaactctggtattaacccgttcaacaacctcaaaagagtggatttcccgcatccggaaggccctgttataaggacgcactctccatctttcacagtcaaagaaaggttactaatgctcttcatttccggtgtcgcatcataggagaaaccgacgttattaaactcaatcatgccaatacccccgaaagccaataaatcaatgttgacgcaataaacagaaaaattacataatccacccatcctaatccaatttgacaaatgtttgtccgttttttttgttttccaagacctcttgtaagtgctgaagccgacaattcttcacctatcttcgccacacatgtaataatgggtacgattcggtattccaacattttctcgactttccctccgccgaatcggattcctcgcattttcatggctgcgcggattgaatcattttcctcacgaatggttggaaaaaggcgaaacatgacacacataggaattgttagtgcatctggcatatgtaatctctccattgttgccttaaactcgctaacagtagttgtattgattacatatacgcccatcatgtaggcgggaagaaagcgattaacaaccataatgataatgagtaaaatatttgccaatgccccctttgcatgtggaaatacgacacactctaaaaagtaaattgtactcagaacaagcaagcctataacacaagttttatatttctttgctgtaagtaagagcaagaagggaagaaaggcaaaggcaactcggaaccaaaacagtctacttcccccggctgttgataaaacaagaactgcttctacaaaaataagaagcagttttgttctgggatcaagcaggctcttttttctatgtggtgtccatgaaacttccatcatgcaatgcccgccctctcaaaatgtttttttaacagagctttgccgataacacctccaataatgccacagataacagtagcaattagcagaacaaaaaacatccagttcggagtaagctttacgacagtatcgatgtattcctgcccatagttagttttatccgcaaaataattagccttttgtaaaaataatggcagatagtttccgcatgaccaaagaggaaatattccagctgtaagaatggcagaacgcatactcttatactcaccattcctataaaccagttctgcaataattccagtgacaatggaaaaaggaataggcatccatgtcatacccgttacaaacatcataattcccataataagactcatgataagaatcataccgggctttttcactttcgtaaggaaaagcataaacggaatacccccaatgatcccaatcatagatgaaagtagtataagaaaaatcggaatgagtcctgtcatggccagcgccataacaataacaaaatagattgccgcatagattccgatattgataaaatctctaccatttagtttgtttcctaattcttgtttactcataaaagtttagtcctttctatttttttagttagattaagctaacacaattataataacttgaaacgttttgtttgcatatgccatttagacattattattctgtttagtttagaaatttcatataataacaaaattgatccatgacaatgacttttacaaatatctgcggtataatataaaaaaaattaaaacttgcttaatgcttgctaccctaatcattcttttgtagcaagcacagtaagtgtacggacacttacggaaaattgacgaagcagccctttgggatttgcttctttttttatcaatttttagcttgttagggagaaccctaagaccccaaaacacattcaaaggaggagttatttatggcaaatagaataagaaacgaaagacttgaaattaaactaactgaagaagaaaaggctctttttgaggagaaaagaaaactttcaaagtgtagaaatatgagccttttcatccgcaaatgtgttttagaaaaggaaatttatcaagtggatttagagcctttcagagatttacaaggcttgctttctaatgcaacaaacaatatcaatcaaattgcaaagcgagtaaattcaacaggtgtaatctacaaagaggacatcagtgatataaaaaaagaaattgaacatttctcaaaagagttatggcaaattcattccctgctgcttaacaggacttccggaggtgattagtttttatggctattacaaaaatacatccaataaaatcgactcttcatcttgccattgcttatattgttaatggagataaaacagatgaacagcttttagtcagcactcataaatgccacgaatcaactgctcacactcagtttttaaggacacgaaatgacgcaggaacaaaaggaaccgttcttgcaagacatctcattcaatcctttttaccgggagaaacaagtcctgaaatggctcaccagatcggtatggagctgtgtaagaagatactcaaagatgagtacgaatttgtcttatctactcacgtagataagggacatatccacaatcacatcatcttcaataatgtaaatatggtaacgggtaggtgctaccagtctaacaagaaaagctaccaccaaatccgttatcagagcgataagttatgcaaagaaaataacctatctgtcattgacgagttttacgaaaattataagaaaaaatacaagattaacggtaaatcttggtatgagaatgaacaggcaaagcgtggtacttcttggaaaagtaaacttcaatttgacattgatagaataataaaacagtcaaaggactgggacgaatttttaaagaagatggcggatcttggctatgaaatcaaatacggtaagcacattgcttttaagccaaaagataaggcgagatttacaagggctaaaacaatcggagaagattataccgaagaaagattaaaagaacgaattgcagaaagagagtttatcaagactcctgccgtcaaaaaacgcatcggcaatgttattgacatgaacaccaatgcaaaggtaaaggaaagcaaaggctacgaatattgggcaaccatacataaccttcatacaatggctgagtctgttatttatatcagagaacatggcattaaatccgttaaacagcttgacaagtatattcaaaaagcagccgatgaaaggcaaaatatacaggagaaaatcaaggctattgataaggaaatgcagaagctttctaccactatggagcaagttcataccgttaaaaaacacagagcgtgctacaaggaatataaggctaatccatctgacaaggcattttttgaagagtacaaagctcagattaccctatatgaaaatgctctctcagagcttaaaaaatcttattccaagctcccaaattcaaaggatattttagctgagcttgataaattacaagaaaaaaagaacacccttatgcaagagtattcttcctcaaaatccactatggacgagctttacaagatacgaaaaaattacggaatttatatggggaaggagatggagagataatttctatttcctctttttcgcaaatcagaaccaccggcttagccggtggtttgttatgcccctataaggggctgttaccggcagcactctcgtgccctgaatttcttcctcttgcaaccattccccagttggcgctaaagcgcctgttctcatactttatttgacctgctgacccataaacggatcgatgaattctttcatgcttatctgatccgccatgtagtcttcttccaattggtttttgatgtattcttgaattttttcgcattttttcccgcagtatcgacgtaatatcctctacaccagaaatgcctatttccatatttgtacttcagatttgcgtgtctatcaaaaatgattaagctactttttccttttaagtatcccatgatttgagatacactatatttcggtggaatctccagcagcatatgtatatgatccgggcaacattccgcttcgattatgtttattccttttctgtcgcataggtcccttaatgtttttcctatgtcttgtttcaatttcccgtatataacctgccgcctatattttggcgcaaacacgatatgatacttccaattccaacttgtatgtgctaagctgttcttatccatatggatacctccttgatattttattgccgatatcacaataattttggttctatgtcaaccattggggagtctagtgaaaactaggctcctttttgttttcctacacaccctcactcacttatcttttgaacaaacgaaaagcagtttcgtgcggaaatgatgaaagttacgc

SEQ ID NO: 37 - DNA, 64533 bp, Peptoniphilus rachelemmaiella
  source 1..64533: mol_type = genomic DNA
tttcggagcaaacactacgtgatacttacaattccattttgtgtgtgataaactatgggtgtgatttagtgatgtcattatttcctcctgattgtgattggttggcagacctctctcatcatatcactctggaaataacgggcaattatcgctaaagctaaacggaacccccggtctaaccgggggatggttattgcatatcctgttataggcgcggactcgaagccccatcgcgtcattttacggcagccgcatacctcaagcgcaccgcgttttcccataagggtaaaacccgtacgcttcatgtattttatattttttaaaatatcccttgactcctcatctcgctttgcctataattccattcataacgttgaagaggagagtacaaaagggaagtgcttacagagagatttcatttggtgagagaaatcggcatggaagttttggaacatggccttggagtgttcgcaccgagacttcggtttaggctgcgacaggtacgcctgttatagcgtcacgggtatgatagtactctgtaaggttattttagcgataaaataatgaaaaaaggtggtaacacgagcattttgctttcgtccttttggggcggaagctttttttattttctcgcaaataacagaagaaaaaaggagaaagacatgaaacagaaaaaacgagacacactttacatcggcttagcgctctttgcctcttatttcggggcgggcaatttaattttccccggcgccctgggcctcgtatcgggagatcaatggagcttaggcgccgtagggcttatgatttcggccgtcttaatgcccatcgtcgccctgtacgttatttcgcgggccggttcggtggaggcccttacgaaaaacatccacccggaattttctaaatacttattgctcttgattatgctcttcgccggccacatttccgtgccgagaaccggcgccgtggcctacgagctcggcgttcatgcgttgttcccgaaggtgcccatggcggtattcgccctcttttatttcggcatcgccctttacttcgccctggacttaagcgccatgatcgacaaagtcgcccggtatctcacgccggccctcgtggcaatcttatttattatcgtgattaaaggcgtgctctttcccatcgatgccgtcccggccgcgcctcaagcggacaatgtccttttaaattctttcttgggcggctaccaaacgggcgatttactggtaagctttttaatcggcacggtctttataggcgacattgtgcgaagaggctacgcaagggatgcggagcgaaacaccatcgtcgccaaggccggcatcattaccttcggcctgttcttcgtcatttacgtcggtctcctctatttcggcgcaaaattaagcggacagtatccggcggacatcgatcacgccgccctactgctcgctatcgtccgcgccattttaggcgaaaaaggactggccttattgagcatcgccgtcgttctcgcctgcttgaccacggccatcgggcaaattacatccatcgccaatttctttcacgaatttacgaaggggaaactctcccataaacaggcggcgatattattttcctgcatcggcgcgggcattaccttactgggcgtggaaaaaatcgtcttcttggcgacgcccatttacctcatggtttaccccagcgtgatcatgctcatgatcctcggcgttttctacaagcccctggaaaatcacgccctcgccttccgcgtcgccatggtcttcaccctggtggtcagtttactggaagcaatcaccgcctttacgggccttcccctattaaaggccgccgtcgatgccattcccctttcgggagcgggcttcgcgtggctcttaccggccgttacgggcttcgtactcggcttaatctatgaacttgcgaaaggtacgacaaatgccgccgtcccttccgctgtgaaaaatgaaatttaaggaggatattatgacaaaacaaggactcggaactttatgtgtacaagcgggatacgatccccaaaacggcgaacctcgcgtggtgcccatcgtacaatcgacaacatttaaatatgattcatcgaaacaaatgggcgatctcttcgacttgaaggaatcgggctatttctattcccgactggccaatcccaccaacgacgccgtggcggcgaagatcacggccttggaaggcggcgcatgtggcatcctcacctcttccggtcaggcggcaaatttctatgcactgattaatattttaaaagccggggatcacgtggtggcatcctccgccatttacggcggcagctacaacctcatcgcccacaccatgaaggacatgggcatcgaatccaccttcgtggatccggcagcgacgcgagaagaattagaccgcgccttccgccccaatacgaaggcggtctacggagagagcctggccaaccccgccctgaagattttggatatcgaaaccttcgccgaagcggctcacgcccacggcgtgcccctcatcgtagacaacaccttccccacgcccatcttcctccgccccttcgaatacggcgccgatatcgtcacccattccacgacgaaatacatgaacggattcgccaactccgtcggcggcgccgtcatcgactccggaaacttcgattggacagcccacaaagaaaaatatccccaacttaccgaaccggacgaaacctatcacggcattacctttgcggaaaccttcggcaaggcggcctatattacaaaaatgaccacgacgattatgcgcgatctcggaagcattccctcgccgcaaaattctttctacttgggactgggcttggaaaccctgcatttgagaatgccacgccatttcgaaaacgcccacgccgtggccaagtatttaaaaggccacgacaaaatcgcctgggttaatttctccgcattggaagacgacagccaacacgagctggcgaagaaataccttcccgacggttcctgcggcgtcatctccttcggcatcaaaggcgggcgcgaagccgctacgaagtttatggatagcttaaaactcgccgccgtcgtcacccacgtggccgattcccgcacctgtgtcctccacccggcgagcaccacccatcgccaaatgaacgacgaggaactcctcgccgccggcgtcagcgccgacctcattcgcatgagcgtaggcatcgaagacaaggaagacattatcgccgatatcgagcaagctctggaaaatctataaaaaaagatcgcctacgtggcggaaaagtggattcaaaaagaactggttaaaatgaattaaacaacacgcaaaaaggcgccgactctcggcgccttctttattgcttgtatttccttttatccatttactttcgcgatgcattaaaaagatcgacaccgtttataagaatggaagccgcagtcaaaacccacaaggcgcgactcaaggtggggtgtccatgagcccgacccaatcaccgcccgccactcgggcggcgccgtcagcgtaaaaggcgcagagggcaagggccgtgagggacaaactcgcccagcgaaagacttcccgtttttctccgggcttccgtaaatttaaaaaggcgaacgctgcggcacccatgccgaacacgaaccacatggcctcagtccttcccttccgtcatttgtttctgcgacaattcttccagggcctttacgtctccttcccgcaccatcgtttgcggtatctccattgcgaaaaattcatccttcggcttttgtacctcgcccttttcgttcactctcttttccgaagtgaggtcgatggcataggcggtcacattcaggccctcggcatccatgattccctgcgcccgttgcaacacggccatggcctctttcgccgtgacctcgtcgcccacgccctcgatatccacttgcagtttaaagggcagatgcttcatgtccacgggctgatccaccgtcaaatactccgtgggatccaccttgtcccaataagacaatgttattacatagggaaagtcgtagaccttctccagatcgtggccgtgctcgcgaagggcagcgtcaaagcgcatcatcgtgttgttgatgcgccacttgtaagtatcctcccgaaggcgaccgagggcatcgaaacacaattcaaaggccgaatcctcgctgttcttgtcttgcaaatgcaccacgtactcggggatcttaaaattataaaccgccttttcgcgggataaatccaaatcgccgtacttttcagcgatcaccttgtccgctccccgctccgccagcgccttcgaaacaggattgccgaagatcgcgttcaccaccgcaagaacaaggaaaacaaaaatggtgaggacaatctttttaacgcttaatttcatcgcaagcctcccaaaaaacttcccaaaagggccaaggcgccgtaaatcgccacgtaaatcagggccgattcattgtaaaaaatccaaacggacggcaagaaacacaaactcaccgccacaggataaagcaggtgaaagccacgcatcctgccgtaaacaatcgaaatggcgaggcacaggacgggcatggcgaaaagcaagaccatcatcgcccccaccgtgttccgcatgacaaggggcaaaagataaaataccgcaacgattcccgcgagatatggaatcatgtttttaaaaaccttcatagcgcctccaaatacttgcacaaccatactctctttccttcattatacccgccggagaaaataacgcagctctccctcgccattcttagacgaagcacccacattgtaaaggtattgttcccaaggaaaaaggcaccgctatgcactgacccccaaaggttggatttcttggtccaacttttggggggcagtgcaatttctagatgcttttaaacaaatttgtattattcttttactatagggatccataattccatttgataatcttctgaattagggtctccatctccatatacttcaaaatcgggactttcatcatgtctatatccttctttagggaagaaatatgaaataatatacttccaaccttcgtgaatgcactttggtataggtccttgtaagcttacaatagcatactctttttcaggaatactgagtatatccaaacctaacttctcagcttttacctcatccgtcaaatcaaaaccagctaagtatataaatgaatcttcttcatccattatatagtcatatcctacgccaaagatttgaccattaccaaactcttcaaaattttctcttggcactttttcaactagtctatcccaaacttttgggaaatttgaactcttagttacatctgatttaataccagctactttaaacgctttctttttctcaattttaatatccatttgatttcctccttgaactgaaatagaaaagtagattcttggaaaatattgatattttgctcctttttttacttgacctggagtcagcttatgaaaacttttaaaagctaaagcaaaagaatcctgagaattataaccatattttattgcgatatctataattcttttatctgatttttttaaatcaattgcagcatttgtcatctttcttaaccttatatactcagataatgaatatcctgatacgattgaaaatattcttgaaaacattggaaatgaatatcctgttatccgtgttatttctttttcatcgagttcatcagttaagttatcttcaatgtagtctattgctaagttaaaagatctcattatatccatattctcaccacctttcatttaaattgtacaaggatttattaaattatacccgataatgctaatacaaatattatagcatctaaaatttatcaaagtcttcttgcgtagctacttctttgtatttgtattcatcgttattcttttctgtgaacatatcatttacaagtccaattgttagtagggataaatcagagacaaaaagaccaagttccactgtccttaataaaaacaaaggtgtagtaattggtcttactttttaaggacttttccgactttatgttaagcccccataattcaattagttgcggcgaaattgggtaaatagcaagtgtcttaagaaggttttagtagttgttattaccgctcctacatctaaccgctaattaaaactttgtagcaaataatatgttaaaaatatatgtctgaacagtgagcatgattactaatgtgcctatccaaaaaaataacagttcataatagcattgaacaccatcaacttgagtctgattaatccaagattttggaacagctttgttaaatgatttataaatgccaaatcccaaacacgtgccaagagtatttgctatcaagtcatttatatctgttgttcccatatcaaacatctgaacaaactcaatagataaggatataagaaatccagctaaaactatatttgctaatctattatattttttatatagaaatggcataaaaaagcccaatggtataaataaaattacatttaaaaacgtttctattggccctgtaatcatttccacaaaaggaatataaacaattcttgggaaaaatgagcctttgatagcaatacccgtcgccgccaatattcctgtgagataaaagcagaaaacaaaggataaaattatatgtccttttgtttgttttttcccactaaataataaaatagcaaaatagatagctactgctaaaaatacaggaatacatccacttaaaaaatgatacataataaattcaaagtccatgaattacctccaccagaaaaaccataatttttctcttttacctttatttacttcttcttcgtgttctcccaaactaatccatgtttttctcagttagggatgtttcaatcttgccatgtgcaatcctactttcatcatctgtatgaatttcttttagatgatttaggtattcaagcatttcatctcttctgatttgtgatagatttcccaattttattccacctcatttcttctcctttagttttttaataccactatcaccaattttttcaagtgatctcaattgtgttatggcaagttttctaagttcaaccattctttctttttgattcatgcctttaccaataaggactgcattataactttccatatttgcaagcactaataactccttcagacttgcataatctctcatattaccttttaaacctggattttcttcacgccactgtttggctcttttattaaataaagccacattgagcatatctgcttcgcttgcgtatttataagataactgttcattggtaagatcctttaaaatatactctttaattgcatccgtatgaattttatagtttatttttgaaatttcccgattaagattccaccccagtgacaatcttgaattttcatctgatttaagtcttttataatcttgaataatgtaaagcttaaattccggtgaaatccaggaagcaaattccattgctatatcgctatgggcaaacgtgcctccatatcgtcctgacttggaaactatacctattgcacttgtcttctcaatccatttttttggtgatagtgtaaatgcattactaccggcttcattttttaacctatcgaattcgataggtttaaaatcaggattatgcattgattcccataaacctaaaaattgaatgttatccttgccccttaaccagttattaataactataaatggttcatcacttttatatcttgcaatatccgttagacttatatagtcgttcttaaaatcttcagtataaatctgaatagcaaagccctttgcttcaatcgtgtcttttttcaccttagacatgtgagttcctcctttatactgatatattatttacagcatttattttcgtaataactcctctaagcagcacaccaacgattcattttttgattttatactttaaatgagaaagcgggcatctttcatgtaacgggaaaaggctgtgtctccttcgtcgccatggagtttctgaataaaggggaagatttcttcgctgacgaggcgaaacatttcttgtgccggcaaatttttgaacttactccaacggtaatgctgtttgtcggcgggaaagatgctctccactttcatgccgaggagctccccatcttcttcttttgccaattcgatttcgtccagatttttcataaagagcaaataggtgatttgttcgatattggttaagggattggtggagccttccgtccaaagggtggtccaaatcccatcgattctgttgcgcgtttcgcctgtgagcatggtatttctcctctttccttgatcttttatcatatcacaggatgaatacgtttttccacgatcgtaccccacaaaaaaatccaccgggttttcccgatggatgtttacttctcccttacccgatagatgaaatcgccgcggtaaaatagatccatgtagatttccaagtcttcgtcgccgcggctcaagaagccggtgatgaagcagtttttgtagccgtggtaggtgctcatgatgtccatggccttgaattttgaatggaaggcgtcgaggaaggtcgccagggtcattttttcgccgacgaagccgcccacattgcccgtgaggacgtttttgtattccatgatataaatataggaatcttccggggacacgccggtgacgatgacctcgccatccaccatggcatcggccgcggtgtccacgaagccgtattggggcacgaggcgcagcttgccgctttcgtaatcaaatgccacgtcgacgatgtgggcgtcgtggaggctgaagcgatcccctgcttctttttctctcttgtagtcggtcatctgttttcctttctcgtcctacgatccattatacatggcctttttcgacgacgaagctctatttgcgcctgcagacgccgccggccatggtgtaactcttttatttttcttccccacgcaaaacagccacagaggcattctccgtggctgtattccttacagatctcggatgcccaccagttccgatttcaccaagaggcgtttgttgtttttcggatagggatggcagctcatgaggtagagtttggttttgtcttcttcgcgaatgaagcggctccagtcgttgggctccaccacttcgtcgccggtcacttggtagtagaggacctgttttctggtggtgatttttatttcgtcgccgggcgccagtttgccgatgtgcaaaaagtaatccagccctttgcccgagccgcggtggccggccaagacagtgatggtgtttttcgacctgctcgggggatccgtggtgtccacgacgccggcgccgaggaggagatttttcttgctcgtgttgtcgaagatgggcagcaccacgccgattttatcgatgcggatgacgcccagggcgttttcgtaggtgatggcatcttcctgaggggccttggcaggctcttgcccgccttgcgcgctttttgccgcctgcgcggcttttgcggctttttctttttccgccgccttttgcatcgcttcttccagggccatggcggcctttttttggcgcacatttttgaaatggaccttcacgggaattgccgccccaataaggagaagggaaatccccaggattattaggaatttcccttgcctgtttttgtttttacttggcttcatcgacggattctctctgttttttcacgccgatggcgagaaccactgcaccgagaacggccaggcctgcaccgtaaaccacggggctgatgccgtcgccggtcttgggtaatttgcctttgtttgcttgggtgccttgggtcgtgcgcgcggcggtgacgggaacgccgtaaacggtgatcttgccgtcttttgcggcgacggtatcgccggattggatcttgcccagggcgatgctgccgtctcgattcactgtgaagttaaagtcgcgggccagttgatagctttggggcgccgtcttcgtgtggaagcggtagctgcccggatgcaacataatcttgtagcttgcggtggaagtcgtccagcttgcgacggattttccgctttggagaatttccacggtggcgccggagagttcgctgccgcttttattggcaacgctgaattccacccagacgttttgtacctgtgtgctcggtttagcctttccttgtcccggtttttccgccggtttcttgtttggatttgccgcaggtgcatttgacggttcgccgacgacgatgaggtcgccttctttcagcttcacgttttcaccggcttgaaccttgctgagtgcgacggtgccgtctgcctttacttcaaagtcaaagtctttgacgactttgtggccgatggcggcagaggcttcgtggtatttatagacgcccggttccagttcctgcttgttgctgtcggatccgctcttccaggaagcgattttgatgccgtctttgtagatttcgatttcggttcccaaaagggccttgcccgaggtatccactcggctgaatgtaacgacctgcttggcgtttttgctgagaagggtcagtttttgatggctatctacgtcggtaagcccgtaggtggcctcgacaactttatcgctttcaactttaaagcgaatgggctccgccttttcgtgaccgtagggcacggtggtttgcgaaaattcgtacacgccatctttaaattcctttatggcgatccctttcagggcgtcttcgctaaaccatttcttcacgacagtgccttcgctgtctttaatttgcagctccgacccggttaaatttttgtcactactgtctttcaggctgaagtaaatttgcttttcagtgggcttcgcttttaagaacagggtttcgttgccgtcttttttatctttatccagatattctttgtcgacttccagtttaccctcatctttgatttcaaacttgatggatttattctcaagagtatagccctccggcaaatcggttacggtcaattcatatatgcccttatcacgcgtcaattcataaggcgttttctttgtttcaagcgtttctttcaacttctcgccgtcttttttgatttcgaattttgcaccggccaatttctcgtcgccgacgctacgaagactgaagaagagtttgcctgtttcttttttcgtcttttctgatgatgcggtagcaggtttagccgatccatccgacggcttggccgccaaggtcggggagactgtggctaaaacaaaagtcatggctaacagtagggctgttaattgtctcttcatgtcgtcactccttcttcaattaggtacatccttctatattcatcaaagtctttgccgaattgattatttcacatgtatattatatcacgattcattcatcttatggaaaaaattcccgcagtccgtcggtcccatggagcacccctttttctgtctaaagttttcgggcataaaaaaacgcaccctttcaggtgcgtcatttggtggacagtactggacttgaaccagtggagatgacgcttataaacggctagaaatagccatctctggcgttatcagctaaaaaagcggggagaaaaagcggggactgtgatataataagtgcgaattgaaaaactcatttgtttttgtggcgggtgcacttgtgcgcccgtgattttttttgcacttagaaaggcgggaaggataacccgccttttattatttatctttatcgtcgtctttgatctctactttatggactgcctgtttattaaattcttcgattaccggattaaaatactttttttccgcttctttcctcgcttgagcggcttcttctagcgtatcaaaaacgcctaaatatttcctttttttgcgcaatgatatttccgcagtatacttgttgcgatgaaaatatacacctttcacgccggttttaccccatgactttttctgaagtccggtaacgcgcgttccatcaaaaagataagaatttactgtttcaacgctcttttctttcttattgcacccgcacgaaaccgtcgttgcatgcgggcctactacatcagttataactggtcttatctcgttaccgcagtcgcatttacataaaagtctatagttatatacattcttttttgggtcatcctcatctttatagacatcaagtatcgttagccttccaaactttttgccgactaattcttttttaagtttttcaatctctttttttctacgctcatcttttctatcttttttgatctttttgtatttagactctgcctcgtctcgcgcttttattgcttcttccagtgtgtcatacgttcccacgtgcacagctctggatttttcattggtcgccctcactctatacctgccgttaggcttgaggtcaatccctctatcaacaacaatcactttacgcttgtctgccataatcaatcattctctttaaagtacttttccaaggccatgatgatgacgtcgtttttagccacgccttgcttcgatcgctcaatctcgatcttgtcattgagcgctgcggggatataggcgtatactctgaccacactctcatcttccacaaccgcgccaaactcattttcgtaggtttcggcggggagatattcctccgcccactctttggcctcgtcgtaggtcaagggcttgatgatcgccaagccttcgcggcttgagtcgccatattcccggctgtatatgctaccggggccgccgtcgcagaataaaaagtattcgccggtgcgcttccggtacaaatcctcatcgtagccgtataaccgatcttcgggtttgtagcagtacgagcttatataagttgcggtgttggtgtcgtaaactttatttttaatgatctttctcataatgtcctcctgtggattttttttagaaggggcccgaaggccccgccaagtttattttgtgaatcttgcgaatgcatcgtctttttctatttttgcaattccattttttacaaggtaatcgtatattaattctgtgaaatcttcccaatatgtggtatcccaatcactgacccatgattcttttatgatatcaacgtatcctactgttacatggtcatatctacatttaaatgatgtactcaatgctatagtttttccaccgtataaatctgtcgagagatagacgcgttctttttcgcctttttcttcgttttcgtcccagtagatttttccgtagttggtcaaggttctttttgtcatattgtgtctccttttttttaactcttgggcgttgccctttcctcatttcttgtctttattatatactagagttggcggcaagtcaagtcttttttaaaacttttttttgacttttttgaaaaaatcgagtatattaaaagcgtagcgaggcgggtttgtcatattgtctcgtctcgtcaggtctaagacctgtggatttaaacacattagtttaggacagtgattcagggcgcgagccctgcggattgaaacatatttttatacgatcgcgatcaggggctatgcccctgtggattgaaaagtgtctgtatgcgattgagatcaggggcatggcccctgcggattgaaatgagtcaatatgcgactgttctaacgcaaaaatgggagctccggctcctctttttgtttgtaacaaaaaaagaggcttaccgggaattacccgataagcccttttgagaattaaagtacctttgctttttgtgtaaacgcttaaactcttcctccgagagcaaccgctgcacagcgattttatattccttacaataaggatatttcccggcatccacgagccggcggacgtttagagcgtctttttttgtgtgcatgtgggcgtgttgctcgtagctcccgccctctcgcttgatgagccacgggcgatcaccgcaaccgggcttatacaaaatcgtcagctgcataagctatttatgcgcgtgatctttgtatgcctctttttcctgcgggcttacgatgcccttatcgcccactctcgacccgctctcataaagtcccacggcggagagcccgatcacgatgcctgtcacgacatgctcgggagagatgcccgcaacggccacgtacataatcgcgccgacgaggatcgccacaatgggagagtatttagccgggagtccagcaattttacaggcctgtacgatacccaacactgccgccgtcatgacaatcgcattttgcattttttgcctccttcgctttatacgttcttaccagcatcgccgcaacttccgcccgtgtcgccatggcaccgggacgggttccatcggtgatgccgagttccttcgcttcttcccactctgcttccgcccatttaggcagataatccggatcaactttttgtgtcattaaatactccttccgcgctttgtcctgcgcctttaaatcctccacatccgtgacctcggccaccggtgccgccgctcttgcctgtggcccaaactccgaggacttggagaggtcgatttgccactcaataggggctttaatctcctctttaaactgccaccacatggcccaattattggccctaaaattgtggggacaatccttgcggctcacgtcgtagtggcgacatactctttccgccggcaccttaaacttggccatgagatttttggtcagctccaagacgtttttataggtctttttttggtccgcatcggcattaacgcacatctcgatactgatcgagttgttattggtgcatccgttgagatacctcccatggccttggttatctcccacggcccaagccacccgactgtcgccgatagtttgtatgatctgcctgtcgtctacaaagtagtgcgcggacccataccgcgtcgctccctgtaaatactcgtagtgcccctccgcatcggctcccgcgttgtaattgccggtgtagtggatcacgataaatttaatctcactgtgggcccgcttgcgcccgatctggcgggcgttggtgatgggcttgtaaatgtattgcacggatcaatcctcccttgtctttgctgtgcagtaggtgtcgatcctaatcacttcgtcctcaaccttattgattctatcgtcgtgggtctccagtagtctgtggatctcgtcccgatccttttggctgtcgaggatgtcacggcgtagctcctggatcgtatcttctaaactttttagcgtggcttttgtccctgtcatcacttttgtaaatggcgtgacgattagccgcgcaaagctaaaaatcgcaataaaggcggttgcccattttgcgattaagtcaatgtcaagttgcatagatcactcctctctaatatctaatgatgtttacgtcctcgtcaaaggcgccgtctgcgactgtgcaatttttagggacttttacttcggttaatttgttgctatcaaaagcccagtccccaatggttgtaacgctcggcggtatggttaccgccgtgagtttgttgctagaaaaagccgattccccaatggttgtaacgctcggcggtatggttaccgccgtgagttggtttctatcaaaagccgatttcccaatggttgtaacgctcggcggtatggttaccgccgtgagttggtttctatcaaaagccgcttccccaatgcttgtaacgctcggcggtatggttaccgccgtgagttggtttctatcaaaagccgatttcccaatggttgtaacgctcggcggtatggttaccgccgtgagttggttgcctctaaaagcccagtccccaatggttgtaacgctcggcggtatggttaccgccgtgagttggttgttagaaaaagcccagtcctcaatggttgtgggcttgccatgcacctcgggccattcgcctgctttttttgttacgaggctttcccccattaagatgtcatataaatattgtttatctaaaaggttggctttcttggcgtaggccgtgagatcgacatgcaccatatccgccacttcttgcttttgctcgggtgttaggtcgtcatagcgcataggcaacccgcgcttcccttccactccgggatcaccttgttcgcccttgggccccatggcgtgcttcccggtatccacaccttccacgacccacgtacccgcatcagagatggtgagcttcggcggatcgcctttttgtcccggctctccacgatcccctttctcgcctttgatccttccgacatttgtccacgtcgtctcgctccacacgtacagatcgccgccaaccatgtaagcatcgcccgccatgcctgttacagggagctccgaggcggtatttttagttccttttacatttagggccgcaccggtttcgccgcggtcgcccttctttcctcgcttcccttccgggccgcggttaaagtacggaagttcggcataaagccttctcccgtcccctaccttcatcaagcccgtgtcgccctccacggctagctcccccgcgtataaaatcagttgcgacgcctcccactccgcacgggtgcggtactggaaggcaaatcgcccaagcgttacccgcttcatggtctacgcctcggctttgtcgagttcaaggcgttttttcacggcatcccgcattccgaagcaggtcggcacgtcctcgatggttttttctccgcgtttgattgcattggcccaaatttttacgatcatgctattttcgtcgagcttaaacattatttagcctcctttaaacttgcaacttccacctgcaacatcccgatcatctctgtcatttccatggccatgttttccatggcctttttttgatcctcgataatctgcgcctgcgtcccgatcatctccgacatctccatgacggtggccgtggaagcctcgccttgcgcgtccactttgtcgtcgatggtcttaatggtcttaatgacgtcgccgtcctttactttctcctcgatgtaatcctcgcgatcccgctcttgatggatcgcgatcaaggatctctgattgtggataatcattcaaatgcacctccgatgccgtatacatagctatccatggtcgccgtcttgcgctcgaccacgatctttaccgatatcccccatttatccgccgtgcgcttggcgtttttaaagttgtagttgagattggacatcaccatggacgtgatgtcctcccacgtgggcgtctcgtcaaaaaagttgttgcaggcgtaaattcgcccttccgcgccttttgccacgcgccagttagggatgatgaggatcttccgcgccgccgcgtcggtttcgatggggtcttttaattgcatcaccagccgcgccactgtgcgggtaaaagagatcgtccgccggctcgtattacctgtgctatccgtggcttcgatatggatcgcgtgccgtcccggtcttacctttacaaaatcgccaaggccgctgtccgagccgatggtgtaaacgccaccgctctccgtgggggttagtgccttgatgccgtcgtagtccactttgacttctacggtgtcgccctcgatgtcctcgactttaaacttaatatcgcccagtgcggatgttttctcgccgatatccacgtcggcggctacataggccccgctactatcttggattaaaatcgtcggcgcaaagttagcccggcggaatgtttgtaccagtgtcgcccggcccttcttgtcgtcctccgcctcgaccctgatcttgtaggtcttgcctaattctagggatcgtagcttggcatcgtcgatggtgatcgtcaaatccgtcccgagttccacggtgctgcgactccggataatttcgtcgtctaaatactcgacgacgctgacattgtcgccctcggcgtccgccacctggtacgtaaagctaaaaggcgtgttcttgtcgcccaaatcgccgttcgagacattaaacttgggcggggtgttgatcttggtaaagcgatagattcgcttcgccgtcgcccctttggcgtcttttgccacgatctccacgcgatggtcgccgagactgtaatccgccagcttaatatccagctgattattgacgttgagcgtggttttgcgatcgtaaaccaccttgcccgatgccgtgatggtaaccgtcaccgcgtcattgtccgcgtcgcttactctccaagtgatcgtaaaatcctctctaacggcaccataatcataatcgttgccgctgattacgggggcctggttgttgatgacacttacgatgctgctcgtcgcatagccgctgtaatcactatttttcgagctctggaccttgacgcggtagcgcagggtattagcacctcgcggggctgtgtcgttataactcatttcccgcccgctataaatcgatcgatagtagccgttgtcgatgctgcgctccagatagtaagtcacattgtagccgcggccatctacccaactccacgacactgccaccgtctctcccgcattgacgctgctcggcacataaatattgcttggcgtataaggctccctattactggagccttcatggcagctctgataaccttcacactcgccgcggtccccaaactcccaattactctgacatccgtataagcatgtcatattacaccgtcctttcccctgctaaatacgtcgcctcggtccatctacaataggcttcggggatcgtatttaaatctttgtttgcaaaatagttatttatcgtacatccgccgacgcagattcccttcgccgcgcacttctcgcatcggccctccgccgcgcttttgatctggtccacgtggaagcgggagataatcgccatgcgcttctcgtcgtccacgccggtgtagatattgccgattttaaaatcgccgcaatcgggattctccgtcatctcctggcatgagtaaatatctccgctcgggccaacggaccccgaaggccccgcaccgatgccgcaagtgccgcacccgagggcatcccgcacgcagtcgcgggtcttgtccgtcctgcgtttctccacctcggtaaactccgcgtagggctcgccgctcgccttggcgcggtcgatatgctccataatctgatcgagcccacgctccatggcagcataatcctccgcgctccacgcctcaaaaacgttggggatcatggtcacacttgtatagccctttcccacggcaaaaatgtaattgacgtacatgtccctcacatttcgcggatccaaggtggcgcggaaggtctcgtcgggataatacttgcggtacaggtcgatggggatgtcgtcaaaagagccgctcccgtcgtgctttacccgcaacttgtcctgcgtcgccttgtcgccgtcgatggagagtaagacgctgacgccgttgtcgcttaaaaacttgagccgctcctcgtctaaaagcgtcccgtttgtggtgatggataaatcataatcgccgtaccgcccgcggacataatccaccaagggcttaatgatgtcgtcgtaccgcagcatgggctcgccgccgaagaaggtcgccgtcggcgtagttaggttgtccagggcatttcgggcataaaagtccacggcatccttcgccgttttataatcaatctccaggggttgttgttttacaaagcaatacttacacgccaagttgcaccgctgcgtgacgttgataaagccgccgctaatcttcggcagcatcatacaaccccgcggccgttttcttcgtcataccagccttcgatgacgacgagatccccggcgatggtctcggccaaaaagctgttatgcggcatgttgttgctgatcccgccgaccagcgtgtttagttgcagattgattctccgcaccaggtccatcaaatacttgatttttagatggttgatcaagtcgttccattccatgcggcccaagtgccacgaatccaccggcgtgccctcctgaaagatgtagccatcgaaccgttcgtgttgcacgatttcattcccttggtcatctttcccgcggataatttccgtccgtacgttcccaaactcggagatgtgatcgtcccaatagaccagctcgatatcgtcgtccaggaagctctcgatcagcttatccaggtacttgggatctttcttgacctcctcttttgtcctgtaatattctcgctgattatacttcattctctacccccattttaaaaacactgtttggatcggtaatctcgtgctcgatcagctggatataaaaactgctcaccaatccgtatcctaagattttttccgtttcctgcgggcggttgatcaccagggcgcccgtcttatcgtagacccgcacatctgtaatttttccgtgggggcggggggtgttgataaaaatcttgagcaggtggttttttgttatatccacccgcataatctccccgtccgcctcctcgccgtctatgacgatggtcgccttggcgatatggtcgcggatgtactccaccacccggtgcattaagtagtcgctaatcatgatcgtcctccgtaaaagtaaatgccgcctcactctttagatcttgcatgtagataaattcctcctctttatccgctctcagctcgcccgctttgtggccgccgttggtgtagccgtaataatcgcgatgctggccgagaccaatcttgatgcccagttccgccgtatgccgcgtaccgagaatcttgtcctcgcgaagtgttccgcactttcgctcgccacagacagggaccgggaattttgtgtcgccgtactgtgttttcagagcgagcgctttagccgctatgattgtgacgtcgtctagccatgacctggtgttttttatcgtctgtaaagcctcataaaaatttttatcgaggacaatagggttttccccttccaagatatggattttaaaataatagggccggccatcatattcgtaccattctgtaagcccggcatttccaaacatcgtcgtcagcatattctccaccgcccacggggtgcctttgtgcttatgccaagcgattgattgcttgacgacggctctcttcttttccaagctaaagtttatatcgtaaaaatccacgtggaattgatacgctaagtgattaagcgccgtttcgggcagctcgtcaatccgcttataaattaaaagtaaaagggccatttcccagttttcgtcgagatagggctggaggatctcgcaaataacttctaatgttttatcgtgttgcaacgacgagggtagcatcttatggagcatgggcttggccttttcaaattcggtggctacctttttgggtgggctcccgataacaacgtccccgtcacgatttctatgccgcgtcattctgcctcaacccctttatacgagataactttcgggttgacgtagcaaacttcggtttctttaaggactgtaaattgttgttttacgtcaacccgcttcgcacctgccgccaccataagcgtgatcaattgagacgggttaaagtcacggccaagcctggacttttgccaggtcacaaaatcccccacagacgcgtcgacggctttttttatttccgcgacaaaggggatatttgtctcgctgatccagtagtccacctcaagatctactttgtgtactgtcggggcgaccacctcaactttgtcagtcaagggccggatggaccggtcgttcagtcgctcttttatatcgtcgagcacctcttcgccggggatggacccgtcaacgtaaagcggcacaacctgtgcaacccccggttttggtgaccacacagccacatcgcccacattcggattgacggttctggcccagtagcgataagccccgtcgggcccggcggtagaaaatttttctggggcctcgtggatccgtatccgatagtggtcgtcgtcttcgcgatccgttcctccgccagtcgccgtaacattttttacagattggtagtgtgggaaggtgtcaattacattaataatctgcccagcggggattgcgttatatttcgcgccgggctctgtgctggcggcagttactctcccggtcacctcaccgattgcgatcatgagcggttccgtcgtcgaaaaaacggccccatccatcgaccgcacgcgcgttcccgaagggatcacgtgaacataatcgaggggttgggaaatggtaaattccaatgtcgtttgcgccgggtaagcgggaaagcgaacctcttccatcaaagcccccatgtgatcgaggaacccgtcccgtgagtaggctaaaagattctgcttgcccgtgtcgtttataagctccctgtcctgaataatgtagtccagaagtgtcaagagcatgattcgctccggggatgcgggataaatatccttgcccagccgcttctccagctcatcaacggcatccgatttaattttttcaacatcaatgtctacaaattctacaggttgtagattaaagtactcgttcatctatatctacctccaccgtcacatgggcctgtccactcaagtggtcttgctccacttttacctccagcacctctacgcgcggctcatactcttcgatctgaaagtaaatggattgatacaaggagcccaaactgttaagcggctcatcaatcacgtccatttctacgcctaagcggcgatctaaaaaaacggttccgcgaatggtggtgagcagagtgtggaggcattgaacgatgtcatctacgcccttaaccccgagcctaattggggtgggctctctagttgataccgtggccctcattttttgttcgcctccttagtaactttcttttttgccaccatttttttgtcgattttatctttctttttctcttttacttttgccttattcgttacatactctttggccgtgacttgatactccacagctaaaagattccccttattgtcaatccgcttggccgaatcatctatttgtgtgacaacatacttcccgcttccgaccggtcgagagcctagaaaaaaagcaagaacttttccttcttgcatggcatccttcaatggcttgatttctttttcggggtatacattgtcttcgattcgccaaaacaacgtgaaagaaatttcatcgatccctttgccgacaaattccataaccggcttgcgttggagggaactatgttcgccccagcgcgtagcgttcttgcggcttaaatctttaaaagtttttactttgtttgtagaggactcaaaatgtataggcccaaaatatccaatcatttcacacctcctagcaatttaagcagcttgtagctacgccgttaaaaatgggagaggtaacggattcggcaactgaaaggctttttgtaatctgcacatcgccgtctaatgtaatccgcggcgcgatcaacgttatctcttctgctttcgccgtcatatggccctcttcgtaaagcacatagtccttgttgttaaagaggatcaatttcttttttgggtttttctccgggggcgggttggcatcgtcataataggaccccataataaaaccctcctccaatccgttagccaaaaagcagcaaatcacttgctccccaatgtctggcatggcgtaaactttcatgttttcgtacgtatgcagatactggattgggatttctttcgtttgcatatcgtcccgatcccgaaaaataacgcgcgcacgtgctttctcgggattaatagagagtacctctccgatcataagtagccgattgttttctacgtccacaggcacctccttatttacctacatagcggaaacagtttttaaaccgcgtcttattaagcgtcgtgtaggcgacaccggaatagcccaaagtacgtttgctattcccgccgcactcaagcacgcgcccgtttccggcgtaaattccaacgtgtccggggttgccgaaaaactggagcacatccccgcgttgcatggattcccacggcaccttttggaagccgtgagctcgagggttatttccgaggcttgacgatgtaattcgtccgccaacatccatccccgcctgcttgtagcaccaagtaacaaatccggagcagtcggcgccgccatgaagagggtcagtcccgccccaagtatactttttaccgagggcttgttccccggcagcgaaaacagcttcaattgatccgctaccacgtacggcatccgccccactttcttcttttttgtcaaaatcgccgagtttatcgcctttattgattctggtgcaatccaagtccaccgtatagccggattcactaatcttatgagatacacccatgacaaggtatttgccatcgaattccccccaaccgataacttccattacctgtttcgctgcaatggctcgaaagggcgcaaccgtaaacttcgcggtctggatttttttattctctttatccagcgcttcctggcacttctttttggcttcggcctctgactttgcttttttgtttagccggaggacttttccggatttacttttttcgcccgcgttctccacttttgttttaaagactttccctgattcggggtctttatactgattttccgccgcggcgtaggcgtggagcccggattgcgtaaactcccaactcaaaagctcatataagtcgtcctcgtagggtgtatccgcttttccgggcggggtataccgtattttgaacttcggtttttgctttatataaaatttttcttgggttatgacaactttcttgttttcgagtttgacttcgtacccttgttcctcagatatttttttaataaactccatatccgatagctggttttggtctattttgtcgtatatccgggagccctctatttcgaaagtgaccgccattttatttctggcggccacttccttaactaaatctttgtattcaatccattcccacgacttgttcttttttgtatccttggagtcccctttggcggggtgggatatggcctttaaactcacaacatttggcgaacctttcgccgtgatctcatctacttcaaactttccacaggggatgacaattttttctcccggaaagttgtagtgctccatgactattttcgcttggatttcgtcaccccgcttgggaaaccaggaatttagccataaacgatcccgattttcgaggttaagctggatgtcttccgcttccttgtcattgtcggtgtaactaaagtcaagtaaaaaggcctggatttcttttgtgatgtctttcccgtcataaactaagtggacgctcgttcttcttgcgtactggtccatcattcaccccgtttccacggcggaagtgacttgtctacaggtagtgggatatccgggcatatgatccgtacgccggagccgaagaatatggtcttgatgtgatcgggattgctggtcattagttcgtgcaaataaatctcatttccataaaccttaaaggcgatcttatcccacgtatcacccaaaaccgtcgtgtaaacatcgataaattctggaatcgtagggaccgacgacatttgactaaagcgtggatcccgagactcctctcgtctttgcatgtcgctcctccttaactaaaagccaatcgcgcgcggtcgtggtcgtatttattcagcgcttgcacgaccatacgttcaaaacgcgggcttaagtgatccatagccgcttggatggcccccgcagttccgggatcagcgccgctcgcatcgatgttaaattggatcacgacggaaccggaccgggattgcgcagaagtggtggctggcccaccaccggcagatacccgttgcagcgccccaaggcgttctccggcgtactgccacaagcgcatggagtttaagcggttgtttaaagggatgaccgcttcgtcgtcgccaccctcgccgatataggcaagctcgggcttacgaacgatgccgcctgtcgctctcggagtcgccccggtgggggctcttccgccgccgccaaagttgctgatcccacctttgattttgtcccacgtgcctttaattgcatcaattttgccggttatccagcccaaagcattatgccaggcgttggatatagcggatgcagcccgactgccggcgcttttaatggcgttccatttactttggagtccggcggcaatgccaccaaaaaagcttgcgatagcttgcatggcactattaaagccggcttttatagctgtgtagctggcgatcgcaaaggccttgattttatcccaatttcggatgatcagggccgcaacaattgccacgacaacgccgatagccagaacgatcgggtttaatcccatgataaaagaggccacgattctgacgattttatacacatcatggaatttttcgatcatttttaacactccggaggcggctccgaaaacgcccgtcgtaatgccggaaattaccagttttattgcggtggcggcaagacttgctgcggcaattgctgcggcaatttttacaatggtagaaaccaattgcggatttttggcagcccagtcgctaaacttgttagccgccgcactggctttttgtgccagctgcacaatggttggcagaagggcggagcccagttgtgcgccaacattgctcatgctttctttcaacagcttaagctggttttctgtcgtctgtgaccggatatcaaattcttcttgcatggatcccttgaatttgcctgcctcttcattgacgttggcaaaggattgctttaaggtgtccaggttgttgagcataggtgcgatagcctgtacagactcttccccaaaaaggttagttagcacagatgtctgcgcctctttcggcagggccctaattttttccaggatgccgacaaaagtaccctcagcatctgtcatcatgctggaggctacgtttttggccgtcaatcctaattgggcatacgcatcttgttgtcttttcgttgctcccgcccctttagttaggacagtggcaacttttttcatgccggtggcgccgacgtcggcatcgacacccattgaaaccatagccgtaccaatagcggcaacttgtcccgcattaaaaccggacaactcgcccaacgcaccgactttagatacgatatttgcaatttccggagccgttgccgccgaattgttagataagtaattgatcttatctgctaaaccgacaacatcttcttgggacatttggaatgccgaacgccacttggccatcatctcgcctgcagccccggcttcaatatccatggccacagacattttggccgcgtcttcggaaaacggcaaaagctcagctttctttatgcctgcgcccgccgccgaagaaattaaatcgccgtaatctttaaaggccattggaatttctgtggatagctttttgcgcatggccgcttcaaaatcagctttttccaccgcatctttgaagtcgatcatttttccgatgtccgccatagtgttttctgcgtcgatggcgagtttcacggggacaccaatggttccgccgacaagtagtgctttacgcgtgagggagccagccaacgccgacgtttgcgcttttgatttctcatacgcggcggatgcggcttgttgcgcaccatataaagccgccatcctgccggcttttttctggatcgttccaaaagcggaagtggccacgccggcggcggtaagtttcgacttcaaacccgccaaagtggcttgttccctttttaattctgagtttagacgaatggtgcctgattttgctttttcgtagctggcgccaagtgttttcgttttgtcagcagatgccttgagcgcttgccccgcctgttttgcctccagcttggctaccgccaaagcggacttaagttccctcgttggcttaacagacttggcgacttccatttcgaggttgcttacttttgcttttgctttggcggcggcctcgcctaattttcttgtctctgcagccgatgcgttgtaagcggcttttgccgctttcgtcgtcgcggcagacttagataacgcctcttttaagccggcaatggagcttttcgccttttccacaccctggatattcaggcgggctttttcaagctttttgagttccttcgccgtccgcgaagtgtccgaagcgaggttctttagcgcacttgaggcagacccgtccagttttccgttgattttaaagattaactcatggacccttcccaagtcctcaccccctcttcgccatttcattcacatcggcgaccatctcaaacaactcctctatcggcaagccctcaaaataataaatcggcgtgtatgtggcttgacttaggccaatgcaaactttgcgcaagtcgcgcttaagctgatggagcctatatccccggccaaaatttataataaaaaatccatcacctttagcgtgatggcgctatagtctttgatactggccgcttcgatcaactcgatcggtacgtccgcagcatatgcggcgagagcggcctggaacgtcttattgagctcgataaccggcgcagcttgatcttccggcggcaaggattggatgacccgctttacatcgcgcccggtcaagctgtcgaggtccatgtaaattgactttacgtctctcccctcaaaaacaaaggggcgggaaaaggtaaattcttctctcgccactgttttcgttgcacgttcattttcagcggggcggtccatccgctccatggtttcttgcagataccccggttcacttactgcatatttttgttcttccattttgtcctccttacatgcctaaatgcgtacggacttcttccaagtagtcttttccgtggatattacagataaagtttgccttatcaatttccacgagttcctcattgtccacgaccaggcgcatgtaagccacttcgccttcgatggaggtgtccgtggtggcgccaacctcaaacttgcccaattccgtcgtcttaggcagtaccacgacggttagtaaacaaggataggccgagattttagccgtggccttatccagttgttggagtgatccgcggacctcccacatcgtgcccgtgggaagtaatccaacgtaagcattcgtgggaagcgtacgaagattaaacttaatggacatggaactaaagtggccgatcgtgggcgtctccatttccccggcaaaaccggatccggatagcgtctcggtcatgtattcaagggacggcaattccacgtctgcattaaaaaggggtgcgttgtcttgataaacacggaagttaactaatttatcaggaatgtttttcatttttattcacctgccatttcttcaataaatgcggttacatagttcacgtcgtattccatgacgaaatcaatctcacgcgcgggagacggcggcgtcaagtatacgtggaaacgaacgatcccgtccatcatatcgacggtggagttttcttctttcaaaaagacgacgcgcccgcctacaatcatttctcggctttgcaaagagtttagccaaatattcgccgacgccatgacagtttctaagagtcgtttgtttaacggatcgtcaattttttgccagtaggtcaaaattagtgtattcgcgatccagtcaaacatgcggcggatcggaataaaggcgtctttaacatcagttacgcccggatagcacgcggtgcggttcccccacgatttccatccgccgatccagttaagcgcagtaataatgccgttgccgtttaaatagttggcctcgtctaaaccaagcatgacttccgttccgtcctctaacaccggtgcgttagtcttgagcaactcgttggagggggatttgtaaggtacatcttgatgggctttatctgtcttgttaattaagccaagcatttgcgtggaaaagcgataaactttgtcgcctaatttgagcttcggccagcaaaggaattggcccgttcccataatgttgtttttgtttttccattcaggagcttctgtggattttattcccgcagggatatctaccaggctttccgccttgaaaattccgttgatattgcgggccttggtatccatgatggcagccacttccgggtcgtggctaaaaccgggagcggcgataaggccggggaccagtcggaaacggggatagatctcattgacgagctctaagcccatttttttcttcgtgttgacgtcgatcccgccgataatgtcttttttcgtgatgcttgaagtatccacccgattgtaagaagcctttacttttccgtccggaatggaggagccaacggaagctactttcagccgtccttcttgatcataagaaagaacataatcctgttcgatggcataggtcttgtcccccgcttcgttcgtcagcttcacggattcggcgataacatccaatcccaaatccgcgcggccatcttttacagagacagtttcactggcaggttttttgttggtgtcaatgtccagcacattgattaagacaatgggggccatctgatataacgcaaattgcgaataaatgacctcagacaaagtgtatttttcccaatcgtccgaaataccgaaatgctcaatcgcttgctcgtagctaaagatcagcttaggctcgttggccttggcgggatctaaggcagtatggacaggtgcggtcccgacgacgaccggtaagcccacgtcagctaatgccgggggcaccaactttgtcgggatttcgtacgtataaataccatgtttgtatgccattatttacgtctcccttctcgcaaataggttttgactgcgttattagctacgtaaagcaaagagccttcggtagctaattccgcgcgcgctttcacaatgtcttccaccggcacaaataaatgttctaaaagaggcacagcctccatatgtttttccatggttttcgggatcccgccaataaaaacggtccctgtcgcacattcgacgccaaaattgtcgccgatgtaaacgacttgatcggtgcttctatattttttcaatttcttcctcctcaccgtcataggtataggtaaatccggtaaaatcagctcttacgtagccccaccactgcggccacggctgttcatcgggatagtaagtttcaaacttttcccggtcaaaaacgaaagacccgtcgccgaccgtgtagtggctatataggtgactgcggatggaatcgatgatagacaccacatctcgccagccctcatcattctgcgtatagacaccaacgacaaaatatacagacaaagtcgtcttctcccctgccacattttctccaaccggagaaataagcacacgggggaagtcttctttggttagcttccttgtcgtccacccggctgacactttgaccggaatcttagcttcttggttttttgactcataggggtataagaggatgccctcaagctcctgctttaaaatatcgactagattgcgtatatgcatactccgtcaccccaacttcctttcaatttcgtgtgcgatccgcgtcctataagcttcaattgcctttttttctgtgacttccagaacttcctcctctcccatcatctggggggcggagacagaatataattgtttaatcggataacgcggctgacctactcgcataaagacgccgacgtgcccggatcccatctgttggacaaaggccgggggtatgctaccgccctggcctttttttacaacagcttgtaccattcgtttgatgggtatcttgggctttacgtcaaaatcgatcagtggattcggcccgccgcgaacaatcatctgcccggatcccgccaaaatcgtaatgcccgcccgaagttgggcttgcgtcgtcttataagttttagccgcctcgcgaacacctgccgtcctcgcttgctctaaagctcttttagtcgccagatacaccgcatcctcgagacgagcctcgagcccatttaaaaaatgcccgaattgatcaaaactgtcagtgttaatttgcacttgcattagtaatcaagcctttccaggacaatttcatagagtcgggattcgtcgatcacatcaacgactttataagcgtcgtcgtcgatatttaaaacctcgtcaatttcaggcctatggatgctttccgccaaaacaaaaagggctatgcgtttcttgtacacaccctcaaaacgattcgggaagtcctcaccggaataggcgtcctcgtcaataacgcaaggtacgtcttcgaggtcgttaagtttgtgaacctccccgaattccgaaaggtttaaaaaaagcggtcgttcctgttcggcggcatctttaaaggtgagcactttaaagcacttttgcagagacccaagcatccaaatcgaaggaataaggcagcggtctggagcttagtcggagcatttttctatcgttggcttcatcggcccacgctttaggtactcgcacgccttcatagcttcggaagtctttgtcttccatttgcgtaatgacgccatagccgaaggcgccaatatcacgacggccgaatagtacgtaaccatcagggatcaagggcacgtcgtctcccgcctcagcgtcataatagaattcttcgtatgcgtaaacgtctacacccaaggcgttaaagcggccaatgtaagtggttgcgtcgtccaaaacttgaggcgccaagtcgccgatattaatgtgttgcttatcgagaagatccgcgatctttgcgtctgtaaagaatttttccgccacagttgtagatacgatcaggatgttcggagcaacgccagacttcttaatgcactcagttctccaggttctgaggtctttgaggatgtcggcgccaccggcgtcccattttgtagcgggagttttgggctttttcgcttccgctccgtattcaatagtggcttccatcatgtttttgttttcgtagtcaatgtaaccctttaccgagattttcccgtcgaacagaagctctttcaccatgatttcttctcggcgggtgatcatgtcgtccagttcctttaagtcgcgtcctaagatttctgcggctcgttcgtccggtgtttttgtcgagataatggattctccaagagcgcggctctttaagtcgtcaacagttagcacgcgttggggcgctactttcggcgcggtgatttgcatggtccggaatccctctctgtccatcgtggatccgccgaccttgggagcaacgaagggtgctacggttctacggcccttttttacgtctactaagatggattcggtaaggaatgtgcggtcgttggctctggggaaaaaggtatcgcgcaaaaagctatttgctttgggcattttttccaccgcttgaagcatggtcgttgtttcatataagttcattttgtgcctccttatttcacgttgtctttgaggaaaattccgagctctctcaatttgttttcgtgtttgtctgcggtatcagacccgccgaaaatcagggcttgtctgttaaactggccgctcgagtaagccggaacgaacacgtcggtttcgggtgtaatgtcaatggccaaaatgcaatcggcaacttcggatccatccgtcttcgaagaatccacggggacggccagcccggttgccttaacaatgccaaggacggttccgcgtttgagctccgtcgcagattttttgatctttacggatttttcgcttagcgggatattgatgtcattgattaagttatctacttgattttcaaagtgctctaccattttcattttgtgcctcctttagcgatacgatcgatcaagtcttgtttttgatcgaggacgtcggttgcgtctatttcggggatgtcgtctttatcgtctgtcaaattatcgatgtaggcttctccgagttttttttggtttttaaggatctccacggcgagatcgcgcgcatccataggtgcttcaaactttgcccggtttactaagtcgggcaggcccgcatcggaaagttcttcaatctcttttatccgatttctttcttccacaacgcccaagtttttgatttctgcgtacagctccggttgttccttttccaaattctcgattgttggtttgctatctttgataagtttttgtagcacctccctatccggccgtaatccattcaggaccacatccggattgacgtcttccataaataaaatgctgtcaactaaaccgctctttttcgcctcgtctgcattgaaccaagtctctgcattcatcagcgtttccagttcgtcgtcagacaaaccggcttttaatttataagcggatcggatagcatcgtccacggacttgagcatatttgagctcgcatccatctcccgatgatcgccaatagcgaaagattgggaattgtgtaccatcatcaagccaagcggactgatggagacctcgtcggcggccatggcgatccatgaggccgccgaagccgccaatccgacaatttttgccgcgaccttcccgtcatattctttgattgcagtatagatttccgctgcatcaaataccgatccgccggggctgttaatgacaagctccacgtcatcggagccgtccaggtcgttgagaatgtcgctcgggcatgtacaactgtagccgtagcctttgtacgccttggctaaattgtctgaaaggatctcacctttgatttgtatctgcttcattcgttcgcacctcctgtagtagtttctcttctttcttgatctgtcgcatgttattttcgtaatcgccgccggtcaactctacggtctctttttgtcgcgtggagaatccttcttccacccgacgggcggctgcgttaacttccttcaatgggtcaatttgcccttgtgtcggtccggaccattcgcaggtcatgtaagctttccggatcataggatcggcaaagaagcccggagcctgtatcctacccttagccacggcttcgaaaaaccattgctcgtataccggctggcaaaaatcacttaccagccaggatcttcgcattttaaacattttccacgcctcaagtaacgaagcgcgagaggccgaatacgaagaattaaactctttgagcaagagctcttttggtatttccaatgccgcgccaatttgccggcacatagcctggacgaaaccatcaaaagctgtgttcgggcgaccgggattggcttcttggactttctcgccgggggccaacgccataatagacccgttcccaagctcataggagtagtcgtcttcctggtcaacttgcatggcgtccggaatcgactccccaaagcttgttgccggcccggcctctacatccgacgtaatgaacaaggaatacatggcggacaccaccgcggccatcaattcggcgtcttggtagcggccaagttgcttcaccgactcgatgaccggggaaagaatcgggacgcctcggacttgccccggacgctccgattccatgatgtgtaaaatattcggctggcccgttttgcgcccataagctcgaatccgttttgcttttccgcccccacctaagtaattctgaccggtggtgtgaacatggtaatacgtaggctcaccgaaccccccgcgttcgattccgcctttaatccgactgtcgttggaccagaccaaatcagattcaataatttggaccttgagaccatagggccctccgcgcgtgacgtaaggaagaaggacgaacacttcgccggacataagttgggaaagaaatacgagctgctgcagctcgtagaagtcattcatgcgagaggcgtcgcaatctttgctttcgccccacaaattgaattcctgttcaatttgccgctccaaattggcggcggtttcatcatctaaacccaaaatatctctggcgaggtgcggttttggcctaagccccgcacctacaacgttggtccgtaaagtctttaaggcccccgtcgcaataggagatccccccatatacaggtcgcgggatcgcttgcgtagaagtggaagattgtctgtgatgtcttcgtccggtgatccggaatcagcgagccaaccaatcattgatttttttattcggctggcaccgtggttggaatagcctttatttttcggtggcgttcttaatagcttgtcaagtattttcattttcacctcctattcaatataaaaagtgcctaagaatgtgtaacagcatccgacgcgcatcaaaaaagcacacgccgaaacactgatcagcctgtgcattataaatctcggggaaccatgcgagtaattgaccgcgactttacccctattctgccgttttcctcttcgtccacggccatattatagcggtcttgccaatagtcaatcattttacggatctcggacgcgtgggctcgcgtcaattcccgcttgcctattttataggactgccctgttgcgaccgccgcgtcagcttgaatccacaactcgaggtgttctttgcaataattcggcgttatgatttgctctctacgtctgtacaatcttacacccccttagaaatgatctttcgtctttttggaatcggcttttgtgccattcctaatgacgccttgtaatttttttccaggtaactaaaatccggattaaaaatctccattgccgccgtggcatagttccggcagtctaagggttcgttgcgcacacccgaacgtttaacccatgttaccttgcgaacccccttttttgtgacgattcgcatggactcggatgtgatcccttcgaaaaagtcctcattgtatccggtctcttttttcatgggaaagtggcaatacccgtcgccttcaaaatttattttcaagcgcgaaatgatcgtggctttcccttgatcaacgccaagaacaaacaaggcggcattttctctgttgtttcgagagggctttcctataaaggggatgccttccccgccgcggcctttcacggcaaatattctgcggtgttctcgagcccggcaaaatttatagacttcggaggttctgtgtcccccggagtctatacaagtggatgtaatgtggatcccggccccgtccgcgtaagtaaattccttctgaaggtaccggtctagttgtttccaaacaggctcttgtgaggtgtccccgataaaaacttgatactcgatcccccacgattctttcccgtgtgaccacccgacgacttccagctccagccgatcgtcctgcacgtccacaccgcaagttaagaggagaacttcgtccggcacctgtgccatgtactgttctcgacgtttcataaccagggacgcatctgtgtcggatttttcctcccaagattcgcccaacgaagtgtttacccacgtttttaatagctcgggagagtccttcgcctttttaaagtcggcgataacttcttcccaccgtcgccacggggatgcaagttcgttgaggtggaaccctcgagagccttgattttcttcccgcgccacccatttgccgggctgcctcttccacacgaattcgtcaaagcggctcctacagttcgggcattccatggttccgtcgtcaaagcgtatctgcgaccatctaaacgcctgatactctccgcaatgggggcaagccactttccattcttcgcgcgttgaattttcatattcctgttcaatcctggaatagccttttatcgtcggcgtggatacgaaaaccatctttctgttccaaaaagtcgttgtccgcttgattgcaaggcttagtggatccccttcttctccggccgatggggggtagcgatccacctcatcagctaacaggatccgaacgggccgcgaagcaagggatgacgggctgttcgccccgacgatggtgacatggccgccggtaaactttttatgcaaaacggtattatccgaatccctggaacgcggatcccccaccttgtcttttaacgccggcgagtctcgcagcataggggccagacggtctttggaaaaggtcttggccatgtctaaagttggttgtaggaccatgatcggcgatggatcgtagtccatataatagccaatcgcattaagcagtatctctgtcttaccgacctgtgccgacgtcataaggacaacccgctctgtgctcgggtcgttgagggcatccataattccgcgttgatattctgcccgcgatgtattccactgccccggctccgccgaagattcggaagacagccggcgatatcgatccgcccaatcagatacttttaatcgaggaggcggcgccaatactttggcgatggacttgaaaagattttgtgttttattcatgggaatccaccaattcctccagctcgtcttcgtccaggtctacgtacgtatcgtcgacgaaaagggaaggatcgtaatcggagagttcttccaacgattcgatgatggcgtcttccaaaattccttcaagttcagatatcccggatcgaccaattaaaagcggcgcggttttcgtggggatggataggagtttagcccggaggttcgacaacatgtcggtcatgaccttttccacgatgggacccctgtgtagctctccacgcatttggccaagttgcagctctgcttttttccgcttggcccgttcgtgaagaagtttttcgtcgtttagatcgccgctcttcctaatatctgctttttcctgattttcagcagcccttaaaccggaaatataggtcgtcatggcatagggcagttcgtacgagccgttggcaagttttggaattttgccttcgtcggcaagatagcgtacttgtcgatctgtcacgccaagcagttggcccatagccttagccgttagctggattccctgcacatctgataatctttttccggccataggcggtcaccccctttcctgttgataggcccctttcggtcgatcagtcccttttcggttgataggcccccggttgataagccctccggttgataggccctccggttgataggccctccggttgataggccctccggttgatcggccttctggttaatcggcacccccgttaaagggaaaatttccttatgaaaaactctgtcgctagatagatttcgggcactcgctgacccgcaaaccctctagatccccagaagaacctattttttaaatttttctttcgcatcattaagccgagccgtgggagtcgaacccaccataccactactcggacaaacgcacgggcttgtggtgtccataggtcgaatgaaaggagtaaaacattgtatgttgtcaaggtgggtgttgcccgtgcgaagtagtttaaggacatactcaggtcctatgtaacacagtaagaagcccaccccgcgcgacataaagcactgtgtaccgcgcccctcggtcgatcggtaagaaaagccccacgtttttacaaccgcctgttacacaaaagatcgaccgccaccaaaaaagaaaataacaaacaaaatactattgactttgtacgtgtatacgtgtataataatcataggaggtaaggatgaaagacaaagagttgttaaagttgtttttgaaaaatggctgggaactacggcgaatcaaaggaagtcaccatcacctgtttaaagatggcaagcgtgaaaccttggccgtccatggaagagaaatcaatccgaacctagcaagaaaaattattgaacggtgcgggctaaaatagccccaccgcctcaaaggaggtatgtctatgttgttttattatccgatgatcgtccacgaagaagatggctattgggcagaattcccggatcttgaaggctgcaacgcttggggcaaaaccctggaagaactttacgaagatgccgaaggcgccatgtcttgccacatctacagcatccttgccgatggcgaaacactcccggcggcttcccgtcctcacgaaatgcccacagacggaaatagctttgtcgtgattatgtccagcgatgtcaatcttaaccaagaaaaccaatccgtaaaaaagaccctaacaatcccggcgtggatgaacaaaaaagcggaagaagaaggaatcaacttttccaaaactctacaagatgctcttgtgaacaaactctcccttgccaaataatcaacagagaaaagcgcggcttacaacagtcgcgctttttaaatgcccgtcattaccaaaaaaggccgccctctcggacgacctaatatcactgatactataatatcacgtgcgcgactgccattttatgccatctttaaaaagcaacgccaaagcttgtccatgcaatttataaacgtgtcgcggattatatccggcccgcttggctacgctcccccagtcgagacactccaaatatcgcaactccataatcaactttaactgcaagttaccatcaagttgtttaaacaactcccgcgcccgctcttttaaatccaccagccggtcgatgtcctccacaatggattgatccagcgtagcaatcttaaccgccgtcgatgccgtcggatccgataaccccgattgcaccgggcctgtatcgctcgccccggtcggaagtcgcgcccgatacgtcttaagttgatccagctgacgcaacttagagttgattagttgatccaaaaataatattgattttaagtcatcctttgtcatcgtcgcccccataaaagcaagttaccagcaagttaccagcaagttactagcaacttactagaaacatactagcaactactacgaactactacgaactactacgaactactacgaactactcttaactgccctacgccacaacagcgtttctttcccatcctcgattgccttcacctcgacaatccttcccgagtccacgcaaaagtctccatccttacctgcgaaagacaacaccttccctgtacttaatgctccgatcagttccttttgatcgtggcacgaattcatctccatgacgttgttggatatgtcataatgcattaactctccgatccagtcgccttcgccaatctcaatagtgcttccgtcgtcaagaataaacttaatccgcatctttgcctcctccatatagcgtcttagtaaatgcctctttaaatttttcaaacatgttaatcactccaccttcgcgcacctcgcccatcggctcttcttccaagctcgccagccgctcgatgtaatccatcgctttaaacagatcctccacaccgccttttaattcgtaccggatcaaatacttcaaggcattgccccgcaaaaagcccttgaattgttccttgcctaagatctttgcgatcagatccatgctgtcagatccatcctccaaaatataatgtgcaggcgtgttaaattctgtcattgcttatcaccgacgctaatttgtttcatcatttcttgcataaaaatcttcttcatgtcttcacgactaaaaagttctctaaattgttcggtaataaagtcatttaatttgctcgctagcatatcctcgatcttgtcgcaatcccatacataatattgcgtccacatctcttcaaactgatttatcatacactctttgattccatcttttacatcttgccaatcttcttccgtgaagtcagctaatattgtgctaaataatttcattcctctacctctagattctccacttcattctcgacctcatatatcgctctttctaagtcgttatatatgttgtcaatttcaccaatcacatcgcttaaatgtgtatattgcaaaactaacaatttatccgttatgtctcttaattctttaaaaagagtttccaattctaacttcattcttccacctcaatcattgcccaattgctaggtcttattgttattggggtccctgttgtcgcatcagtaaaaataataaactcgactttattgtcgtatatttcttgtaattcatttccgtaataacttttatcttcttttaccattatttctttttcaacatatgggttgtgtaattttaatttcatttttctacctcaattccccacataaacgacaatgcagtctttccatttgtcgtcatacttggacttttcttcttcaaaaatttcttcaaactcatcatcggtaaagttggaatatgcgtatttttcgcacaacatttctcttaattcttcttcaaagtatcttttatcatcaaagacaatttcattatcaacttcgttttggcaatcaaggattttacccttatgcgctctaatcatgctacacgacatatagtcaaaagtaccgtcattccctgtatcatcagcaaaaaacataagtggcaagtcaggatattctgcaatcaacctttttaattctttgcattcgttaagaaaatagtaattattcatcatcactgcacccccgtgcttccaaatccacctgtgccgcgcctcgtatctccaagcccggcggatcgctccaagtccacttgtaaatacggcacgataatcatttgagccacccttactcccggctcaatcgtaatcacatcgtggccgtgattaaccaacttaatcccgatttctccgcgataatcgcaatcgattatccccacggaatttaacatcgataacccgcgccagccgtaacccgatctgactacgagcatcccaaagcattcgctcgggatctctacagcgagatgtgtttccaactccgccagcgcaccgggcccgatggtgatctctttgtcgccgttataataaacatcaattccggcagcgccttcgcttccgtagcgcggctcctttgcgccgggtttcgtcattacatagttcatttttctaaactcctcacaacaataatcggatttccaaatcctaaaaccttacaaacctcgtaatcgctattcaccgcgttgccctcattggcggctgtgacctcttcttccggatcgtatttgctcaggatgtatatcaagtccttaactttcatcacatcctccaatctccgcttttaacttcttaagcaactcttcctgccggatgccctttccttcaagcgctttcgccacacggccgtccaccgtgccttccgtcagcaagcgataaatccgcaccgcgttcttctgcccttgcctgtgcagccgtgcgttggcctgctggtagagctccaagctccacgtcagtccataccaaataataatgctcccgccatcctgtaagttcagcccgtggccggcgctcgcgggatgcgccaaaagcatttttatcttcccggcgttccagtccctgatcgactccgccccgtccagcttcaccgcatcggggaagcgctctttgatccgctcgtagtcgctcttaaagctgtaaaacaccagaatattttcgccctgcgcctcttccctgagctcctccaaagcatccaactttcgcccgtgaacgatgtgggtctttccatcctcgtcgtaaaccgcaccattagccagctgcagaagtttattgcttaccacagcagcggataaagcggcgatggtatcgtcaccaagttccaacacggcatctcgctccatggtcttgtaaagcttcttctccttggcgtccatggccaccttcacatcgatcagcataggctctttcaaatccagatgatccttggcgctcatgctgatacaaatgtcgctgatggcatcgtcgatcgcttcctttgcaccgggcttcaacttatattccgtatacattccccgactgatcccgtcgaagtacgtccggcgaaaggcggtgatgttcttccccaatcgcttcccgcgatccaagagataaacctgcgcccatagatccagataggagttcggcgccggcgtaccggtaagaccgatcacccgcttgaagtatggcgtcacggttttcagcttcttaaagcgcttcgacgcgtgattcttaaagctggaaagctcgtcgatgaccagcgtatcgaagtcccaatcccctttcatctcgtccaccagccacgccacattatcccgcgacacgatgtaaacatcggcatccgcctgaatcgctcgtcgcctttccgccggcgtgcctaagatcttcgaaaccgtcagcgattgaaggtggcgccactttttaatctccgaaggccacgtatcctccgccacacgcttcggtgcaatgaccagcacctttccgatgtccagataatcatcacgaagaagctccacggccgtcagggaagataccgtctttcccatgcccatgtcgaggaagagaccacaggcgggatgggacagaatccaatctgtcgccgcctgctggtagtcatggggcctatagtccatgttccacctctcggataaaggaatccaccgatagattattcgacagtacccgcacatcgaaacccaaagaggcgagtctattttgttgggccgcctgcaccggcgaaagctttccgtatttcgggcgtttcagttctacgaagacacatcgcccaccgggcagaagcaccaagcgatccggcacgccgttatttccttggctcaccaatttcatacaccggccgcccaaagcttcgacaccttttctcagacgccgttccacatccttttcaagtgccatctcatcactcctttctctaacaagacagataagacagaatttaggcgacaaacttatattttcgtataggggcattaggccctatacgtgtgtgcctattaatacattttatttttctcatatattctgtcttgtttgtcttatacttgcataaacgttgataaatcaatgggttgagtacaagacagaattttacactctgtcttgtttgtcttataaaaataagacagaatccgttctacataagacagaattaaaaagtctgtcttgcccgtgcataggatctttgttggccataaatcttaaaataaggtcttccatcttccttctcccatccacgaagacttcccaaaatatcgttgatctcccgtgaattgatcggcttcaaatcgccgggccgtttgcccaagacctcgcaccatacttccatcacacagacccgatcctttcgataggtgcgggccgcttccgtgaaggtgtcggcgtctcctcgtaagaacgaaagccgttcctgcaggtccaactcgtcccaatcggctgggaagtccatgtccaggtacgcttcgattagaccggaaagaggcgtgtcttccttgtgggcgtgctgcatctcgattgccagcaccttggcctcgtcgcttaaaagtaagctcgtgccctgcttataaagcacataggcctccgcccacagttgatccacttccccggctaaatcgtcaaaaacacttttcgtcggaagcacctcatagcagtcaatgggccatgcccgcctttctcccgtcggatctcgtaaataccgctcgtcgttcgtcgtcccccaaaagacacattgccggggaaagcgcgaggtgttcttcgcgtaggccacgcggtaaatatcttcctgcttggataaaaacgcctttaccgcttccctgtccgccttccgtgtggcgttcagctcgccgacctccacgtgccagacgccctggatcagctccgccgcttccttccccttcaccgtgtcgagagagtcggaataccagcccttcgccagcttggaaatgaacgtggatttcccgatcccctgagcgcctactagggtcaccatctggtcgtacttcgtgccggggcgcatcacccgcgccaccgccgccaccatgtggcagatggccacctctcgggtatagacattgtcctccgcgcccaagtagtccataaacatggtttcgatgcgcttcgcaccgtcccatatcagcccctgcaggtattcccgcacagggtgatagcgatgccgctcaaaggtcagattcttcgcatcgtcgatcttataagccaccgtcagcccgtagttcgattccataaaaagccgaagcccgctgtcgtcattgtcccgccaatcgtgttccccgtccttcgtccagggcacgccgccggccacgtacgcccgattggcgaaggcgtcgtatttcagtttccccgccaaacggggatcgtgttctaaaatcaaaatggaatttttaatggcattttccacattgccctttttatcgatggaaagctctttcagccacgcatcgtcgtcgccctcgtcaaattcgaagtcatcctccgccgatgcaagacgttccttcccgagctgtatcttgacgccgtcgtcttctcgcgccatagccaccatcttcgtaaaagagggcaggcgatttgtcggcgtgtctgccttcgcttcatcgtccaaaccgccgaagaggtggatgcgcaccaggtcaaacgcattgcacagctggccgctggaagggtctgtcccgtgatgtgaataggcgaacttgtcgtcatagaccaccagcccgcccacggttgagccggccttataggtgtagcgcccttccgtgcccgtcgggccatagacgtcgcttaggaaagtatcgatggcatcgtgaatggagtacgtgcggcaaaaggcgccgacgatgccgtctttcgtaagcgggtcttcctgccgcttcgcctgatccgtaatgcggccgtccagcctttccgagctcggccattggctcacgtcccgccagtcctcgtagcgatccagcaccgtattcggatccaaaaaggcgccgggcacgtgcttatagatatactccccgtccgagggcgagctcggccagtacatgagccgcgacggctcgaaggtcgtcgggtcgaaataggcgaggccaatgtcctccgccaccttccgagccacggcctgatactcgtcgggcaccacttggcgagagagcgggataatcagccgaagccgcggcgcctccggacgatgggagtgggtggagtaaagcaccatctcctgattaaagaacatggtgatgctgtcccacacgtcatccaccgtcgtatcgatagcgtccatgtccaaggtaagcatggagcggttcgccacgttctccgccttccgtctgccttgttttaaaaggccgccgacgaaaccgcctacgtccttaatggcgtcgcggttggtcttcgccatggccctatactccgccgtcgtctcccgtgtgcgggtggtgcggcttagcttcttcctaaaatccgaccagctgatctcttcgtttttccaatgctttgaccggcggccggctcccgtggcgatccataagagcctgtccgcgccggtatttagttcttttttcacatccataatctagtccttttgatagtaccggcaagtaaagccgtcggctctaagaggcaaatcggcgcaccatgcgggcggcttgcccatcatggcgcaaatcgcatccagatcctccgcagccttcgcctcgatcaccacctcgtcgtggatgtgcatgacgatcttatagccggcgcgatccaaagcgagcatggcgtgacctaaaatgtctcgggccgtcgcctgcacgatgttctccaccaaagagccgccgtaggtctcgcgcttgagccaatccgttccggcgctgttgcgctcgtagtagacgatgctgtcgccgccgaacctgttctcgccgatggccggcttggcgtaaaagaggcggcgccccgacggtaagacaatctgtagcatccccgaggacacataggccgcgagcttgccgtcagcgaagcgctgcggctttctctcgcgaatggcgcgggtgacggcggactgagtctcataccacagctgcacaatccccggattcgcctctcgccacatgtccacaatgggctgcaggtcttcttcggggatccccatcttgagggctcccatggcggtgagtgcaccctttcccccttgatagccgagggcgagggtagccacctttccacgttggcgcatgtcagatcctttcttaatcgactccaccggcacgtggaacatcttcgccgccgtggcctcatagatctttccggtggtgcggaacacgtccagcacccaatcctccccggcgatccaagcgatgacgcgggcttcgatggcggagtagtccgccacggcgaagacgcgcccttcggaaggcacgatggccgtcctcagacattggctcataatatccgggccgtcgtcataggtcatgtccagggcctccaagtcccccgtcttaatcacggcccgcgccgtgtccaaatcggagatataattcctcgggagattctgcgcttggatcaagcggcccgcccatcggcccgtgcgccgtgcgccgtaaaactgaaagagccctcgggcccttccgtcgcccataacgatttcctccatcttgtaatacttcgccgtggaggtcttcgagagctgcttcctaatttccagcacttccaccacatccgggtaggcggcataggtcgatataagctcgtctatatttcccttcgtcaccgacttcaccttgtcgccggtcgccgagtgaataaaggccttaatgtcagttaaactgttgggattgtcttttcccgtgatctccttatagcgggcggttaggtgcttcaccatctccccatcgatggccatggcgccgtggactaagtccatatccagagcgatgcctcggctgttgatggcctgatccagcctgtaaagcgcccactccgaatcgggaagctcgaagcgatccagcttctcgcggatgcgcatctccacctccacgtcccggcggcagtactcgatgaacctttcccagtcctcatcttcgtccatggcaagctgctgcgcccctttttgcggagagcagaatttcttaatcagccgcttgccgtctttaatctttccctcgtcctcaccgagaccgatcgcatcgcccactgacgccaaaccgccgccgatgccgcaggcccacgccttaatcatggtgcactcccacggccccgaggtgatctcgaaggcgcgatccaaacacgtccgctcaaaggacgcattgaacgccgtcttaatcaccgatggatccgtaagggcggccagaataggagcgggaagcggatcctttgtcaggtccaccacctccacgtctccgccgtcgatggcgtaggcaaagagcaagatgcgaaaagcgggcgtgtccacataacgatacacgcccacctttccaatctcctgatcgctgaacgtctcgatgtcgattgccagcgtgcgcatggctacgccaggaagtcgtcgtcgaactcggcgtcttcgaagtcgaagtcatccgttgcgctggatgcgccggagagtctttcgccgtcggctaccttttgcacattattgagccccgccgcgacacccttattcccgcttacattgtaggggtaaaagttcacacttacattggcatagcagccgctatacacgtcttcgggtccgagaggaagcggcttacccgtgttcgggtctctcagcttgcccactacctgcggcgcgttcttgctgttggcgttgataaaataatgcccttgatagttctcgtcatccgggcgatccacgtcgccgtcacgcaacggcgtgcgcaaacccgttccgaacttcttcccgtatttttctgagcccgtttcctttgcattttccacggctttttgaattaaagcgacggtggcctcgtcttccttgtcgattaaaatcgaaactgaatacttcggctcttgcccttcaaaggcgcggggctcaaacagattggcgtagctcaaacgtgcgcctgcaataatcactttcgtatcgctcttcataacagattttcccatggtattcctcctaattttcaaattcaaaatcgtcttctacggtgttcatggccggccgcttatcgctttcagccaccagcgtcggctttccgggcggcttcaccaccaccccttcgcctaattcggcgaaagcctttttccctactaaactctcaagcttcgtcagcgtttccagctgcttcggcttgtagatactttcttcgtcaaatcctccggcgatgagcctttccgctaaagcctcgggatcgtcgatcctgcgattgcttcgtccttccaccagcttcaaaccggggaaggatgcaccggcaagcgcctcgtccagcgcataggcatcgatgtccttcagccatccctcgatttccttcttcgcgaggatgatacgggcaatctctcccgcatcgagggaggctttccgctttaaatccagatacgcctgcatctgctccgcccgtgcccggcaggtggtacgcaccttgcaaaagccacaccagtcgccggcgcagaactcgccttttcccttgtaagcgagagcggcggcgggtcttaccgttttttccaaccactcttccagctcgcccaccgtcatggtgtaggaagagatgccgtcgagccgcacctgcgccaccgtcatggttatgtcgcgaatcgtgtagtaaaaggggtgcatttcgcgataggcaccccatgcgtaaagcataagctgaggattcctctccggatccaccaccacgccctttccgaacttcaagtcgatgatctccagatggccgttttgcacgatgacgcagtctccggtgccgaagccctccggcactacgtcgctaaagtccagccgctcttccaccagcattaccgcgccggcatcatcggcggcctttgcctcattaagtcgctccaagcaatagcccgtgtagtcttccacctcgtcgatcatgccggggtaaaagagctcatgatcctttaaatcctcgtagtcctcccccttcaagatcctttcggcgatggcgtgggccaacgtgccctctcgtgcatagacacttcccgtgtctgccctttccgcttccagccttgccgacggcgtacagttcagccaccgatgagcgccggaaggggatagtaaggcatggcccatcagatcgcccccaagtccttcatcacggctgcgaagtcctcctctttcaaagaggagatgttcttcgccccgtacttgtccaggatcccttttagctgcgttcgcttgtccttcgtgttcttcgcggcgaaaagggcacgcacttcgtcgcgggagacggaggacttggcggcggcttcctctttcgcgctattttcttctgctttcgtcgtcaccgcttccacggcatccgctgccacctcagccgaagcgcccttaaaatacgccatggccccgccgagcatagcaatggcttcggttagttgatccaatccttcaatcttaatcgtgacttccatcgagaccctcctcacagcgtaaagatctaataatattcctgtattgacgaactgcattattggccaatgcattaggattagctaagaaatcactttcactaattgttataggtccaccggttaaaaaacaatcgatataaaattcatccggttcatcggcataccatctcagattatgctgaaatctatcggatcctttataaagtttaaacagaagacaaaattccccattatgaaaatgcctcttgaaacccattcgttctaatttttcttttgctgcttccatcgaaatcctccaaatgtgctataatcatggtgtgttacttcttcttgatcccgtgacggttgcagccgttgcgggatttttttatatgctgctttaatcttgtcgtaagccggccaagagacgatgatccccgttcgggaataaatccccctgatcgttgcatccggtacacccgtcacttcggcaactgcttcggtaggcccgtaggcctgcaaaagcgcgatcacttttggccgtacgtcgtcaagttgcacagatggtctatatggtctatacattctctcacctcctaaaacgggtactcaccgcgggctttgctatacgccacagcccattgagacttggtgtccaattgagtgacgcatgcgccctcggcgatggagtcaaaaaccgggtaaagcagcatcgtaataaacacaattaaggcgacaatcgccgcagccgcccaccggcgcctccgcacatacttcggcgccatggacattctcacagccctatgtttcatctcgtgcctcccttctcaagccactcgtcgagccactcttttttaaaaagccttgcgcttccatttaacgcaaacctgatctcgccgatccgcgccagctgttggagcgtgtcatacccgatgcacagatacgccgccgcttccttcggccgaaacacttctttaggtacttttacaagatcaataatttggtccaacttctcatcgatccttaaatcttccatatcacgcctcccaaaaagctacttcgtctttctttcttccgcatccaccacttccacattggcgagaccttccgaaataaacagctccgctaaattccccatcgtccaacccgtggtttcacttaacgccctaagatcctcaatcacatcccgatcgatccaaatcgccgaaataccactgcgcccacgttccttacgcttcttaatttcaatcttgcaatccataaaaacccccatttcgaaacaactacatatagattgagttgtaagttttattgattattcatactacatatagtagaattaaataaattcgatttacaaattcataaaaattttgcaagcatcgtcaaaatccaagtgcaaaacatcgcagatagccttaacatcgccgagccttaaattctgcccctcatttgaaatacgtcgatacaacgtgtccttgttcatgccgatagcctttgcaagacccgtcatattcattccgttttcggctatctttccctttaacttcaaaacattcagcacatacacacccccctaagaaccaaccggttacataaccatgtggaaaggacataatgaaatgcacaacaacctaccgcaatcaaccattgggcaacttcaaatcgcgaccgaaaccctcgaaaaaatgaaaccgatgctactgcagttaaacgctaatgttcaacagtttcaaccgctaatcgataaccttcaatcggctctgcagcttgcatcattagggcaacagcacaaaaaaacattaatggcgcttcaaagttcactaaatgtaccgctcaattgcctattaccggatcaatcattcctcgaccggctcaaagcagcacaaaccattgccgcccaagtaaccacaccgccaatcgagatacgccggaagatagaactaccgccggtttcctatccggaaggggctgtatattcttggatagagcgtgaaacatactcctcgccgaacctgaacacttccggagatgtttttctatatagagatgtctctgaagttttagattcatgcaacgaagaagcaaccacctcggcagaacgcgaattcataagcgatgtaaaatcctggatcaaagacccccaaaatttaacgatcgtactaatgaccgtgaacattgccgtagacatagccatccatttcttttcaagatacgatctggaacaagcaaacttttacctcactcttgctgtggacatactcgaggtgttaacgaattttattaaacgcatcgactaaccactttaaacgcttagaaagtgcagcttgcaatgaatcgattgattcagtcttagcattagaatctgaaatgctgtgaaaacttgaattctcactgttactaacttcagaggatctcgaacatagatcttcatattgtaggttcaaaagagccacatactccgaaaaaatacagcgatcaaaagcctcttccagatctgtaagagcggactttgtactttccgtttgactcgggcacaatcgctccgtcaagctttccttcgtatcctgaagaagccgaatgcgatcccggcattgccttttcaacttttctacgtctttatccataaaaaacctcctcaagccgaatcaagtccccttgctattcgccctgcacctcacatacaaagtcctaaatgcgattctgcaagaatgtaaatagcaaaagcaaaaaccagatgatgtcacttggcgctttaatcaccggctcccgcctagactccagcttctcgatcctcttttccagatcccttagctgttctaattcttcttccacttcacgcctcccaaccatctaatccaactcgtccttcacactttccgtccgtgcaagacccttcttaataaagagcccctccagatccttcagggaccaacccgaagcggcactcaaatccttatcgttagattcgggataaatatcaaaattcaaacccaaacccgtaagcagcaaatacaaatcatctcgcgaaaggcccttctccgaaattaggcggaagagccttttttctttctccggatcatccgtaatcacccggaaccggcgtaaatcattttccataggcacctcttttcccttatatgaattgatatagaattaaattctacttttcgggcaaaaaattaatgttgtcaatactgatgtgatacgcatccgatatggctttctgattaatcacgttcaccatccaaggacttttttcccacttgattagcgtgtccttgccgataccaatgcgttcagcggcttcgagtatcgttagcccagcattgacccgtgcagccttcaaagagatttgcaaaataatacccctcctttccttgaagttaaatccagtgtaatagaattaaattctattgtcaataggtttttagaatttaattctgtttttttagagttttagttgctattttcagaataatattctatacttaagtaaagaaaacactatgtatgggagcgattctatggatacgataaaagacattttcagcgaaaatcttggccattatatggcgttgcatgatcttaataataaagaattaagtgagatattaggcgtaagtgaaagcaccgttggaaaatggctgcttaaaaaagccatgcccagaatggggatcatcgagaaactttcacgatacttcggcatccaaaagtctgatctcctcgaacaaaaagaacccgagcttacatttgtggacctatcgaaatcaatcaaaattcccgtcgtcgggaagatcccggcaggcgttcccatagaagccatcgaggatatcatcgagaccatcgacatccccgaagactggaccaaaggcgacaaagaatacatcggcctgagagtctccggcgacagcatgtaccccgtcctcctcgatggcgacaccgtcgtcatccaagtccagcccagcgccgagacaggcgacatctgcgcctgttacgtcaacggctacgatgccaccctaaaacgcatatcccttacaccaaactcaatcaccttaaaacccgaaaaccccaactacccgccaaagacctacacccatccgggcgaagtcaccattgccgggaaagtcgtcgaggtaagacgtaagctataactgccgggcttcggcccggccctgtatcctagaaaggggaaaatcatgtcagcacgtaccaaaaaatggagtaagaaaaagaaaatcatcgtcggcgttatcgtgttttttatcttggtgagtctgattacaccgagcaaaaagaaggacactacggcggataacgcaaacgcaacgaaaacggaagaaacgaaaaaaccagaaaagaagaaaaaggacaaaaatctaagtaaggaagaagccatcgaagctatcgcagaagccgagtcgccacaagaaaaatttgacatcgccggcaaattcgcctttggaaagaattacacgtccactgaattttttggcgaaggcggcatcgatcgcgtcaacgtcgaatttaaattggccccaaacctaacaacaaatctggcaaaagaaggttttttgatcgactgcggtgagtttatcgagttgacaaaagacatccaatacaatcagctttttatgggcgctaaagctacttttacggatcaatatggcaacgaatccgagaattacgctatgaaactattgatcccgaagagcgagatcgataaaatcaactttgaaaactttaactctcagaacctggcaaacatcggcgaggtgtgggaacatcctgcaatgctcaaataaacaagcacataaaaaaagccacttaccggctggaccacggtaaaggggcgagacgccgtcaccattgtcggcaaagtcgtcgaggtaagacgtaagctataactgccgggctccggcccggccctgtgtcataaaaaatagaaggcgaaataaggttttaggcaagaggtaatttaatcaattcataggaggagaagaaatgaaaaccgcagaagaaatgttagaattcatgaaacttcataagctgggattcgggggattcagcgccaacgaaaaaagacacttcaaagtcttggaaaaacagttgaagcccaatgaagacattgacgtttgctttatgggcctgcacaattataaaagcgggagcaaccataacggctactgggcatacggtataacaaaggacaagattattatgactcagaagcgagtcatcggggaacacgtcctggtcgtaagcttgcgcaacatcaacgatgttttcatgaagaccggcattacatcggggatcttaaccattgacacccgagacgaggtcttcaatatatcaaccgacaaaaactccattcgtaatatccacgagatggtcacaaataaattatttgaatacactgaaaacctacacaaaaacgtcgtagatggtgccaatccgacgaacagcgcagtcgatgaactgattaagtggaaaaacctacttgaccagggaatcattactgaagaagaattcgaaagaaaaaaattcgaaatcctaaagtagtacattacacttataaaaaagcccctaccctgctgcaacaggataagggaacgacataatcataagaccaccccaccccattccaatttatttctaatttgttggaataaatattttgtaactcgaaaggaactaggcatggaaaaaaattacagagtcatcgaaattctgaataagaaagaacttcttataaattatgggggaaatgatggtgcaaagaagggacggcatatccgaatatcagacataggagaaccggttacagatccggaaactaacgaaaaattgggaacccttgatgttattaaaggcacccttgaaatacacgcagtatatcctgaattctccatttgtcgagacattacgcgatatgaacgtgaactgttaccgggtcttggactgaaaaccaaaactgagacggtctttcacccattaaacgtagaagaaaaagacattactaaccgatggcctaaacccatccccccaataaaggtgggtgataatattgagttgttataaatcgtgcttgaaaatgtcctttgcccatggtattatgatggcataccggaccgataccatcggtcatctacgaggctctgtggcattttgcccagggccttttgttattggagttgaaggatgactgcatacgataaaccctatttaagttttgatgaacaggtgcttcaccttcatagtgagtatgggttgattattcaggacaaatcactcggcgcaacaattcttcaaagcatttcttattatgatttaatcaatggatacaaggaatgcttcatgataaataatgcattcgaggctggaacctcgcttgatgaactctatcagttttataaactagacagagatattcaaaaacaattgttaagcaccagtgcaaaagttgaaacaaggtttaagaacatactggctcatataatggcgaaaaatttcggcgttgatgtcagtgattacttaaacccgatatattataagaaaaataaaaatgcaaacaaaatcttgtccgacctcatagcgctatcaaccgacacccatgttctaaatcctacaagacactaccagagaacgaaaaatcatattcctccgtggattttgatgaaaaatgccacatttaataactccatcgatctattcaaagaaatgaatagtcaatatgcggcagaggtttgtgaagaactggtacctagagccctcaagagtaactataaaaaggaatttgcgaacaatgcacttatcatcgttcgtaaatttagaaataagatagcacataatttaaagtttattacatttcgaacatcacacgttaaacagaataaagttgttggagaacaaattatagttaaaaatctttctcatgtttataaaggaacacttatagaaggtaatgattttaaagaaaaacgtggtcggaacgatccatatgcaatgattctatgtttaatatcattgctcagagaacctttccttgtcgcagactttattgaatctatcattttagaaattaatagaattaaaagtttacccaatggagaagatgcttttaatcgttattgttctatttccgggataccgttcaacattgaccgcagacttactcgtctttatcgtgaaattatcaaataaaaaagcccctcaccgtctggacacggtaaaggggcgaggattggaggcgtgatataacccacaatcgcaaccacattatatcacagcctccgggaaaggaggcattttttatgtcatggaaaaaaatcggtaagaacaagtacaaaatggatgttgagcggcaagtaaatggccgccggaaacggaaggtcaagacctacaccaccgacctcaagggccgtgatctcacccgctttatgcaggctaaggaaaatgaggcgtatgataaactcggaaagtccgacgatgttgtcgattacagcgagattacctatcggcaatttgtcgacgtttttatggactcccgcgaggtcgagggtaagagcgtagatttttacgagtattgtctccgcggccattgtctcaattactttaaagacaaaaaaataaaattaatcaaacgggccgatgtcgtggactttataaaaaaactccaaaaatatatctccccacgcacgggagagccgcttggaccaaagaccatcaggcaccatcgcaactgtctcgcgacgctatttaatcacgcacaataccttgagatcatcgacaaaaacccggcggactatatcaaaaccgatcccgtgcccaatcaggtcaagggccgctactacgagccggaggacgtcgaccgcctcctctccacactggagagcgagggcgactataaatactatgtcttttttgtcctccagctctacaccggatgcaggccgtccgaaatgtacggtctcacgtgggataaaatcgactttgaccgcgggatcatcaccatcgatcaggcattagttaaaagcaagtccgccggctacgtcgtaaaaagcaccaaggcccatgacgtgcggacaaaacccatgcccgcttacatcgaggttatgcttaaaaagctacaatccatcagccttggtgtcacggactacgtctttacaaacgccgacggcgatcacctcggcgagcgggcctttagagagtacctccgccgcttttgtgatcggcacggcttgccctatatcccaccatacggcatccgccacaccaccggcacacttttagccgcacgcgggatccccattgccaacgtcgccaagcaattaggccacgcctcgacccaaacgacgacaaaatatatccacgccacccagagcgtggatgaagaagccgagaacatcttggccgagatcgcaaagccaaagctgcgcattatcaattaaaaaagcggggaaaaaagcggggaagcggggtaaaactagacgtaaccagacgcaactaaacgataacagcaaaagaaaaacggctgaattgcaacgctagaagcaatcagccgtaatcaactatggtggacagtactggacttgaaccagcgacccctacgatgtcaacgtagtgctctaccaactgagctaactctccaaaccatttcggtagctattagtataccaagctttaacgaaaatggcaagagaattttacagggcaagctttttcgccggcggttgcggcgaaaggcatctgttttcaccccacggcgtccacgtagcgggcgttatccataataaacggcggcgccacgccgggatccaggtcgtctttaaatttgtcttttaaataagcgtagcaggcatctttcgtgggaaatttcagggcttggtagggctcttcaaaggagattttttccacaaacacatagccttcctcggccttcaccagcacgccgacgtggccgataaacagataattgccgtctagattgtcgtgaagcaccacggagatcatggaagcgccggcgggaaaggtgatttgcgacaaatacttttccatgacttggccctggtgggcggcttccttgctgtcgtcggttttcacgcggctgaacaatcgggtaaaggcggcggtttctttttcatcgagcaggggccgggcggcgagggattctttgtccataaagagcatggcgtcgtcgctgttgatgttctcgggaacgaccaggccgtcttttaaaaggacaaaggcgttgatccggcaattggtgtcggggccctttttcttgtttctgtcccgcgcgtccatgattgcgcccacgtcgtttttcggcacacggggcttgtcgaaagcggcgtgcaaaaggccgtcgccgacggaggcattgtagtcgcggaccaggtcgaaaaactggtccacgtcttttccgtttaatgtggtttttaatgcgttttccacttcccgcacatctgccttctccgccaaattggatgtaggctgagcggcgcgggggcgctcggtggcgggtgtttcctgcaccgcaggcggtgcggcgcaagcggtgagggccgcaacacacagcccaaaaatagcaatgatgggtcgattcatagtctcttccttcttcttttttattttatcgtggccgtgaggttcgtcggctcattttccacctatgatcttacctgtttttgcccgacaaaaaaagcccctacccatggggtaagagctttttgaaacgaaatgattattagacttcttctttagcggctttggcttttttgtattgttcgattaatttcggcaatactttgttcaagtcgccaacgatacccaagtcagctacatcgaaaatcggtgcggcatcgctcttgttaatggcgatgatgaggcccgattcttccatccctgccaagtgttggatggcgccggaaatacccagtgcgaagtagatgtcggggcggacggttttacccgtttgaccgacttgacgtgctttttcgatccagcctgcgtcgacggaagcacgagaggaggaaatttcaccttccatggcttctgccaattcagccaacaagtcgaaaccttccggtccaccgagaccgcgaccgccggaaaccaggattctggcttcggtgatgtcgagtttcttcttttcttctttagccacttcgatgatcttaacgttcatgtcggcatccgttaagccgacatcttccatgatgacttcgcccttgcggtcgttgtcattgtccatgggggtcataacgccgggacgtaccgttgccatttggggacggaagttttggcaaacgatggtagccattaagttaccgccgaatgcgggacgggtcatgcgaagcaatctggtttcagcgtcgatttcaaggccggtacagtcagccgtcaaaccggtatggatacgagcggccaaacggggtgccaagtcacgaccgatagaggtagcgccgaagagcacgatttccggttcgtatctttgaacgatggtgtaaatggactttgcgtagggctcggtcacatattcttttaaaagaggatgatcgacgacgataaccttgtcggcaccgtggtggatcaaaacgtccgcttttgctttaacgttttcgcctaataaaatggcgtagacttcttggccaaggtcatcggctaattctctggccttaccaatcagttccgtcgatactttttgtaattctccatctcgctgttcagcgatgacaaatacatttttactcatttcattcacgctccttgtttggccaatgttaaatcaggtacttttcttccaacttggagatgatggcgtgtgctgcctcttcgggagacagatctttcagtacgatacctgcgcccttgccttgttttgcttcggacttcacaaccttcgtcggggagcccttcaaacctaagttggatacatctacattgtcttttacatcttctaaagaccaaacagttacgtctttttcgtatgcatcatagacgcctgcaacggtcatgtagcgcggttcggccaattctgccaaagcggtaatgacgcaaggtgtcttgatttcgattaagtggtagcggtcttcgaattgacgtttaacacggatggtgttgtcgtcaactacttctaaaccttcggcataagatacttgaggcaggcccaagtgttcggccatttgcggaccgacttgtgccgtatcgccgtcgatggcttgacgaccggcgaggattaagtcgtagtcgccgatggtctttaagccggcagcaatggtttggctggtagcccacgtatcggcaccgccgaatgcgcggtcggacaagaggatcgcttcgtcagcgcccatagccaatgcttctcttaaagcatcttccgcttgcggcggtcccatggaaagaaccgtgaccttggtgtccggatattcatccttaatacgcaaagccatttcgatggcggctttgtcgtcggggttgataatactcggtacgccgtctctgatcagtgtattcgtcttcggatccaaacggacttccgttgtatccggtacctgttttgcacagacaataattttcatggtaaacgcctcctgttatttaacgcccatccagccagcaataaccatacgcataacttccgaagtaccttcgtaaatttcggtaatcttcgcatcgcgcatcatacgttcaaccgggtagtccttaatgtagccgtaaccgccgagaagttgaaccgctctgttggtgagttcagatgccgtttcagctgcgaataattttgccatggctgcatagtgaccgtagggaatcttctttccttttgcatcggctgcgcggtaaaccaaaagtctggctgcatcggccttggtttgcatgttggccaaggtgaattgcgtgttttggaattgagataaccgcttaccgaattgcgatctttccttcgtgtattgaaccgcttcatcgatagcgccttgagcgataccggctgcttgcgatgcgataccgatacggccgccgtctaaggtcttcatagcaacggcaaagcccttgccttctctacctaagaggttttccttgggaatgcggcaatcttccataatcaattcgcaagtggaagaagcacggatacccattttgttttcagcttcaccgacgcggaagcccggtgcgtcgcggtcaacgataaatgcggaaataccgtggttgcccttggagcgatcggtcatggcaaagataacaaatacatcagcgatgcctgcgttggtgatgaaaatcttggtaccgttcaatacccattcgtcgccgtctaatacagcgatggtttgttgaccggaagcgtcggtaccggcattgggttcggtcaaaccgaaagcgcccaatttcttgccgcttaataaatccggtaagtatttcatcttttgttcttctgtaccgttttcataaatcggtgcacagcacagagaagtatgtgcggatacaataacgcccgtgctggcgcactttttggaaagttcttcgacgagcatggaataagcgaggtaatcgccgccttgtccgccgtattccttcgggaaaggtacaccaaagaagccggcctttgccatcttcttaatgttttccatgggcggttcaccggtttcgtcaatgtcaccggcgatgggttctacttctgtttctgcaaactcccgatagagttggcgcaacagtagatgttgtttgtccataataaaatccatattcaaatcccccttgtttcgacaagatttgtacaagaacatcgtacatgcagtgtgtgaaccatttcgtttgaaagatgtcctcggacaccgcttacctctattataaacgattttttaacaatgttaagacctttttgtcagatttttcacttttatttttttctttacgccagaaaaccgctacacccgttgaaaatacaggatttacggcgaaaaaataaatttgaaaagttttaaaaaattcacgaaaaaaatcgaaaagcctcccttcgcccactttttccgctctgtgaaaggctctgaaaacatttcgatggacaaaaatttttcaaattcacaccgacccctttcgcctttttgaaaccacatcggtattcatttgtatcctccgaaaaattgccccgatcattccaataaaatgaaaaattacaagccccttttccaaagggctgttcccaacaataaacatcccccggcgtagccgggggtttttctttatcggcccaaagggcctgcattactagctgcgcctgaagggcgtcggtggtctgcccgtgctaacgttacttggctaccccttgaaggggttcgtcgtgtcgaaggttaattgctcacttatttgatcttctttcagttgattctgaatgtattcttgtatctttttagcgttttttcccgctgtatcaacgtaatatcctcggcaccaaaactgccttcccctatatttaaatttcatgtctccccatcgttcatagatcatgatactgctcttaccttttagaaagcccatgaatgaagatacagatagtttgggtgggatct

SEQ ID NO: 38 - DNA, 64157 bp, Peptoniphilus rachelemmaiella
  misc_feature 1797..1934: note = n is a, c, g, or t
  source 1..64157: mol_type = genomic DNA
tgtcattattccctcctgattgtgattggttggcagacctttcttatcataccattctgggaataacgggtgattatcgctaaagctaaacggaacccccggtctaaccgggggttttctaatgcaaaaaggaaccgagcttgcgctcgattcctttttgaccggtttagcgattcgctaaggcatccttccaagtttgattcaacgtaacccacgtttcatctacctgaccttttacggtgcgatagaacgtgtgggtgttggatgcttcgataatatcgtagtatgcccagtggcttacattgacatcattgaagggtacaatgcccgtcaatacatcacgcagacccgtgaggccgacgctacggtcgtacaatttgttgaataccgtaactgcttctgcgcgggtgatgtggttgttcgggcggaaggtgccgtccggataaccgttgatgcgtccgttggcataggcttggttgatcgccgcttcggcccagtggcctttcacgtcggcgaaaggtgccatgccggtattggccttgtcgatggccttgatcatttgtgtgaattccgcacgagtgatcttgtcgttgggtctgaacgtaccgtcgggatagcccttcatatagccggcgttgaccacggcgttgatcactgcgttgtaccagccgctgcgtacgtcgatatagttcggtcttgcactgttggacagatccaaaccttgcaagcgagccagcatggccgccgcttcggcgcgggtcatattaccttcgggacggaaggtgctgtcttcgtagccgaagatatatgccttgtgaatggcggtttcgtgtttcggtttttcaacagagggtgtcgtcgggtttgccggaatgaaccagtaaccgccggtattgtttccggcattggatccggaattgcccttggccttgacggttgtcgtcttggatgcgggcttcttacctttttccgtttgcgttgcggtaatggtttcaccggatttcaacggacgattggcgggaaccggaacattccagttgccactcttatcgaccactgtttcgccaatgatgtttccgcgttcgtcggtaacgacgatcttcgctccgggaacgcctttgccgtcaatcaccttatcgccttccgtcggttggttaaggatcggtttgtcggactgacccggaaccttatccgtcggcgtagcggttatcgtcgtcgtgatatttgtcgtcgtaccgtcagaatttgttacaggaacgatcacttgaatggcaatcggatcatttccttgatgacctgccggtacggtcacttcaacggcaccatttgctttcggtgttacagtgacaccattcggtaattgatcttggttagtcaccgtcggcacgccaacttttgtcatatccgtaatcttatttccgtctttatctttgacgtcagacggattgacggtcgttgtgctacccttttccacattcgtattcgggtaagtgactgacgattgatcttcaaccttcttcgttgcttttgcagtgaaggtggtatcggcggtaatttcaaccgtactcggatccgcagttgctgttgtttcagcgtctttgtaccatgccgggttttcgtagccttttgcttcttttccgtctaatttcgggaagttggctttcgctactttatccttcggtgcaagtgcataatatttttctgcgacggttcctgcttggatggagtctgcgtcttgtttgacggtgactctgaaccagccggtgggaatcggatcgtcttttccgacttcgtcgnnnnnnnnnnnnnnnnnnnnnnnnnnnnnnnnnnnnnnnnnnnnnnnnnnnnnnnnnnnnnnnnnnnnnnnnnnnnnnnnnnnnnnnnnnnnnnnnnnnnnnnnnnnnnnnnnnnnnnnnnnnnnnnnnnnnnnnnnnactttggctttgacttcgacgccttctttggctccgactttgactgtccctttattaacgtcttcggatttgaaggtaacgttaatgtagttgtcggggatggtctttccgtcgctgcctttggtcggttcgtcttctgtcggcaggtagggaacaacgtcgtccgtcgtatacgcttttacattgataactgctgttgcattgtcttttgtaccatcactataagttacaactaccggtacatttaccggttttccagcatctccatcaactggtgtgtaagttacactaccgtcagcgtttactactgcacctgttggagctccttcacccaaagcaaatgtcatgcctgtcggttgcggatttgcttccggcttcggttctgttgtgctcttttggtctaggaattttggtgctgctactgttgcttttgttccaactgttccattgactgctgtatattccggttcgtatttagcggagtctccgtcattaactgatagaggaactttgtcgacgtgtccttttttaattaggatttcttcatctttatcgtttttacgataaacgtcgtaagttacttctacgtttggttcatcttcggtcgcatcaacttttgctgttggcgtaccggtaatttgatcgcctgtaatcgttaaaccgtcgatggattttccatcgataaatttagctgttacatttttaaatacatagcctttttgcggtgtcggtacaactttttgattgtattcagtacctttcgctccatcggctaatggtgagtctgtaatgagatacttgtgggttctggaaccttcaatctttcctacaacttgaccttggtcagtgtcgtccattgacgctgttacttttacatcgtagaggcctgctgttgtcggtttgccggaaatatttccatttcctgcgtcgattgttaagccttcaggtaggttaactgctgaataagcagcacctttaatcggattatcgtttttgtgttcaaaatcatcataacgagatccgacatagctacttaattcgacagtaaaggagtcgatagcgataggatcttgtaaattgccttttgaatcaactctgtgaagttttgctgtatattctgtcgtttttgttacacccgttgtgtcaaatggtgctgaatcaatggtgcctgtacttgatggttgttgagcttgtccttctttaccatcaattttctttccatcaggaccataccatacgatttggtatttattcgatgtgaaggaatacggaagccctgttgtagatgtttgtgctacatctccagggatagctgtgtttgcttcattgtcatagttggtaatgtggaagtcaatttctccgggaccaaatacgaagtcagatcttaaaatacatgtggttgatttggttactcctacaccaaagcctgttgaagaccagcctgcgttaataccccaatcagagttcatggatgcgtaatagttgttgttgtacggagtcatcacgcgaaggttttctgttccatctgtagaaacaaatagccagtcgtagttaacgtgttttatttcatttttcttagcagtatcaaaagctccgttatcaggcttatctgccacggttccaagtctatcgatttgttcttgagaccatttgttgcctatagctataccgcctgctgcatctccaactttatagttgtaagatttaagaccggcatcagagtttttataaactccccaagtaccattaaattggataatgtagtcaccttctgcatcggtctttgctgttacggtttctgctatccatttttccggttctttttttacttgttctttgatccaatcttgcagatcatcttcgagctttgaagtccatttagggccacggatatcttccggttttgaaattccaccgagtgccaatatcgcttcatcgctgtagattttcttcatagcatagtcagatagataagatgctcttacagttacgccttttgctccttcagtgtgttgagttatatcataccaatgaattccaccaacacctgatttgtaatcccaagaaacttttccagtcatataaccgccggatttactttgtttcggtgtttctttggcatcagtcctgtgcatttcagccttaggtttttgcataaatagaatcttccaattgtcatgggtattctttgctgtattggaacttgaaccaccttgagtaataggtaggccaaaatcaggaaatactaccccttctcctgttatatattgaagttgataacctttcggaatagtatcttcttcaacccagaacttataccttccattaccggcagatacagttgtatctgcatcaaatttaattaattttccatccgatgctaaataaggggtacaaccaatatttagtctgccgttggcatcggatactgcggtgtaaataggcgatacatagccgccgtcttcaaaccattgaaagtagcctcttactccctctaagggtttaaattgttgacctgttgcattatttaaaggaaggtttaagtctcctccggtttgtacacctacaaatgcgtgaacggcatttctcgcatcgttgcctacgctagattcgattggcggtgcagctccttttacgcctaccggacctttggctggtgccatttcaaatttgccttccccggcttcccctcgtgcaaaagcgccataggggatcatggtaaataccatgacaaaggccagtacccaagcgatggctcgggttgcaaaggttttctttgtgctctgcataatttctcctttcttatcttttcgcatatttcttttattcgtcggcaaattcatacaaggccatgccttgtgccctttcttttttgaaagtgcatcactcctttttgtcgtgaacgccatttcttcttttttctttacatgcatacagtcttacaagttaattctaacacccttatctttgtttatctatgtgaaagaacagtttttgcctataccttccttttatttctttccttttaaaagtaaaaaataaaattctttcgggagcacttgtctttcacataaaatcgggcggttttcttctccccatcccttaaatggatacgacgtgggcggggttgccggcatcttcgataagtttaattaaattctcggctttgagccacacggtggcggtgttgtcgttgggatggatgccgattatgccgccgtttttggcaaatcgtttgtctcaatagaagtgcacggcatgttcggcgtcgtttaggaggccgaaggggctctcggcgccggctttcggatccaatttttctttcggggcggcgagctttgggtataatgaaactgtatttatgagagcaataaaggaggatgtatgaatcattttgttttttcggtaccgacgacgatttttttcggggaaggtcaagtgcgggcttttgccgaagcggtgaaatcttacggggacaaggcgctgattgttttcggcggcggctccattaagaagaacggcatttacgacgaaatcacctcggctcttcacgccgccggtgtgaagacggtggaccacggcggcatcgagcccaatcccaggatcgacagtgtgcgggcggggatcgcgcgggtgaagcaggaaggggtggatgtgatcgtgcccatcggcggcggctcctccatcgacgcggcgaaactcattgccgcaggcacgctgacgccgggagatccctgggccattgtgaagaaggaggtggcggtaaaggatgccctgcctctgtgtgcggtgctgaccttggcggccacgggctctgaaatggacacggcatcggtgattaccaatccggaaacgaaggaaaagctgggctggaagagcagcaaggtgctccccaaggcgagcctcatgaatccggcctacacggtgtcggtgaatgggtaccacacggcgtcgggcacggcggacattatgagccacaccatggaaaattatttttccgtagacgacagcgcctttatgcaggattctatgtcggaaggcattttgcgcacctgccgccacgccggtcccgcggcggtgaaagacggcggggatttggaggcgcgggccaatttaatgtgggcgtccagctgggccattaacggcctgctttccacgggcaaggcgcaagcctggagcgtgcaccccatggaacacgaactttcggctttctacgacattacccacggggtgggcctcgcgattttaacgccgcgctggctccgccacgtgttaagtgccaagacggcgccgaagatcgcccgcttcggccgccgggttttcgatattcaaacggacgacgatgtggatgcggccaatgaagccatcgaagccctgtataatttctttgtttccatgggcattcccatgaatttaaaggccgtgggcatcggcgaggaacatttggcagaaatggccaaggcctgtgccgaccatgccggcggtgtgatccgcggttttgtggatctgaaggaagaagatattttggctatttacaaggcctgtttgtaggcataaaaagaaagctgctcgcgagggcagctttttttgtaatgacaaaatccgccagagtgcgtggctcggcggatttatatgcctttattttctgtagctttttgctttttccaatcgttttaagatttcgtctttgcctaaaaggtagatgatgttggaaagttccgggccgtggacgttgccggtcatggcggcacgggcgggcatgtagaggtttttgcctttcacgccgctcgccttttgcacttgcttcatgagtttgcccgcatcttccagggaaatggcgtccatgtccttcaggatttcttccagggcgtcgatcaccgccggggcggattcggagttaatttgttccagggcgtcttcttcggtgacttcgtagtcgtcgtagaggaagccgcaggcctcaggcacttgttccaggcggtccaggccgtcttgaatggtttccattaagacgcggtagtgctcgggatctttttccacgtcggcttttgtaaagaggccggctttttcgatgtagggcatggccatgtccagaagctcgtcggcggaaagttctttcatgtagtggctgttgatccagtcgagcttcttcacgtcgaagacgccgccggttctcgcgatgcgcttggtgtcgaaggctttgatgagctcgtccatggagaagatttcctgattgtcttccggagaccagccaacgagggccaggtagttgatgaggccttcgggcaagtagccgtggcctttaaagtcttccacggatacgtcgccttggcgtttggagagctttttgtggtctttgttcaagacgccggggaggtgaatgtaggtgggtacgtcccaacccagggcttgatagaggtacacatgtttcggcgtggagggcagccattcttccccgcgaatgatgtgggtgatgcccataaggtggtcgtccaccaccacggccatgtggtaggtggggaagccgtcgcttttcataaggacttgatcgtccatttcgttggtgttaatggtgattttgccccgggcttcgtcttcgaaggtgatgtcttcgtcgtggggaagctttaggcgcaccacgtattcttcgcccttggcgatgcgctctttggcttcatccagggagatggagcggcaaaggccgtcgtagcggggcacttggcctttgattttttggccttcgcgaaggttgtccagccgctctttggtgcagaagcagtagtaggcgtggccggattccagtagctgatccacgtattttttgtagatgtccagccgcttggattgaatgtaggggccgcagtccccttcttccaccacttctccgtctttcatcatgacgccttcgtcgatggcaatgcccgcccagttcagggagcggatcaggttttcgatggcgccttccacgaagcgggttcggtcggtgtcttcgatgcggagcaggaattttccgcctttttgtcgtgcgtaaaggtagttataaacggcagttctcaggccgccgatgtgcaggtagcccgtcggtgatggggcaaagcgcacccgtacattgtccatggttcctccttatttgtccattagcgtaaatgcgttcagtatgcggtcgttctcccaagtgttgacaatgagctcctcggggtagtccagttcgttaatcagcactttggccagttcaaaattacctacgtccacgtccatgtgggcatcgcttcccacaatgactttcatgtttttctcttttcccattcccagaagcacgcgcaggttttcttccgcgccgatgcgggggccgtttttcttcagggacgaattatttaattcgcaaaagagatcctcttccacgataaaatcgcttaaccgttcgtaatccaagggaaaacgggcatcgtcggggtggccgatgatttttaccaagggatgtttgccggcgttgatgatcgcgtcggtgttggttttggcatcggcgggttgaaagcactgcctgtgcaaactgacgatggcgtaatccagttttttatggtccagatcgatgtcgatggcgccgtctgcggagaggatgttggcttccacgccgcaaagaatcacgacgccgtctaagacgcggggcacggcctggtagttatcgaaaacggcgttgttttctacccctgccatggccatggcgtgatcgctggttccgaggattcgaatgccgcgcgcccgtgctgcggcgatattttctctgagagtcgaataggcgtgtccggaggcgatggtgtgggtatgcaaatcgattgatagtttcataatgcctccctccttaacatttctattatagcacaggcttttccgtggaacaaaaagcaaaaaaagaagcccgcaggcttctctttactgaggttggcctgtggcttctaagatgtcgtagtagctccacgtgtttttgtttacgtctttaaagggattgttgccgtaggtgtccaaaaaggctttgtcgggcttgcgttgtagggctttgttcagggccgcgcagacttcctggcgggtgattttttcgctcggtgcaaatttgcccttcccccgtccgctcataaggcccgcctgctgaacggcaccgatgtagcctttggcccagtgattggctttcacatcgccgaagtcggtggattccgcggggcttaagccggcgtaggcggcgagaatgcgggcaaattccgcccgagtaatggattgatggggcttgaagctgccgtcttgatagccggagatgaacccccgcttttccataatgcccacggaggcggcaaaccactggctgtcgtctacatctttaaaggaggtgtaggcggccacgggctttgcgccgtttgccatgcgggcgatgacggatgaaacttccgcccgggtcatggcttttgtcggcttaaaggtgccgtcggggtagccggtcacgtaggcgggccgtgccactttcatggcttctgtgaggctgttttccgcgccggcaatttcaggggccgtggcgttttcttttgcgaggataaattgccccgtggccacggcggcattaacctgcagctgctcgactttggcccgtccgctcatattgaccgatgaaaggacgcggaggaagtcgtcgatttttttcctgtcccctgcgtagggggcgggggcggcgtcggttcctttcgcgccttcgcccacggtggcgatgatttcttcttgaccggctttcgtggtgaagacgaagcgcagggccgtgtcctttggctggggattgatgacaacgttgaagcggccgtcgttacccgcgacggtgctgccgattaaggtattgccccgatagacccgcacgccggcgcgggccacggcggtgccggataaggtgttggcgccgacggcgatgggatccacggcggattttttcgccgcgacaggagtcgtcccgggcgtttgtccggagggcaccgccggtatggcctgtcccgtgtcgctggcgacgtctttttgaatgctgcggtttttgccgtttttatccacggtggccatgacgtaggacatggacacttggttcacgttttttacgccttttttaaatttgccgctcattttcaaggtgaaatcccgtcgactcagggccttgacgtcggggattaccaaggtgacgatttcttttttgctgctgtctgtcttcgtggacatgaggcggtagtcgttgtcggtgaggccgccgacgaagatggccttgtcgatgtgaatggttttatcgaccataaacgacagggaaaatgtctttaaattgctttggtagtcattgggcatggtgatctttagttccatgccgtaggggtccgatgccttttgcttattggtcatgggaaggttcagttggctctgaatatcttccgcggcgaaaaccgccgtcgacgcaaataggagcaaaagggccaaaagggtacacaaactgcgtttcataaaatccctccttccatccattataatccatgaatcgcaccgtcgccgttacgatttcataacagtttttctttatttcccgaagaaaaagaaaaaaccccgcgtcgcgaggttcgtttctagttatttaatgcatctgctatgcgcaaaagggcctcctcggcaggcagcttttccacatcgccgcctcggcgctttaattccaccacgcccccttcggcatccttgcctacggtcagttgcagggggattcccaaaaggtcgcggtctttaaatttcacgccggcccgctcgttgcggtcgtcgagaagcacggcaatgcctttctcgtcgagggcatcgtatactttttccgccaattgcatttgctcttcttttttcacattggccacggtgatggccacattgtaagggcccaggtggggcgggaagttcagcccgtcgtcgtcccgatggttttccaacacagccgccatcaatgcgcccatgtgccaggtggcgccgcctaaaatatagggagcctctttgccttcactgtttaaaaagcctgcgttcatggcttcggagaagtgtgtactcggctttctgatccgcaccacttcaaaggcttcccggaaggtgtaggccgcaccggccggagacaggtcgccttccgccacatccagcaggtcgtcggcgatttcgccttcgaaatctctgccgtagttgacgttttttatgtggtaattttctttgtttgcgcccaccaccatgttgtcgattccggtgacggcgcggtcgacgatgatccgcgccttctcccccaggcctatgggcccggtgaatccggggaaggtgcccagctcgagaatggtttcctcatccaacatgtcgattttatcgccgctcacgcctaagtagttttcaagtttcttttgattcagctcccgatccccgggcacgaaaacaaagacaggcgcaccgtcgacccttagatccaccgccttggtgcagcgggccgcttccacgccgatcatgtcgctcaactctttaatggtgcgggcatcgggggtgtaaaccgcttccgcttctttcggtgcttcgccttcaggcaaggggtagcgaatgggggcctcatccttcatgtaggccgattcgccgtcaagggccagttcttctttgtagccctccgccaaagcgtagtacacgaggctatccggtgtgtccacggcgcggtagtcgattcccaacgcatttaaaagggcttcggcgcgctttttctcctcgccgaaaaatgcctcggcgtcttcgggatcgccgtcgaagcgcgcgccgtccatgaccgaataggcccgggcatcggcaaggcacgatgcgggcttcgccacgtctttgtagcgcagggctttttcgtacaaaaagaggggaagctgcttgtagctttttaattcgcctttgacgaggcctaaaaaagcttcctccgatgccggcgaaagggcggcttgtcgattggtgcggtccgccaccttaaacatttgactgccgcatttttcccaacggccgctttcttcccacaaagcccgcggctgaagggggcttaaggaaaccgccgtaccctcttgaaaaaagtccttttcaagccgcgcctcgagggcttccataagctcatggccgtagggcaaaagggtaaacaagcccacgcctgcttctcttgccatgcccgcccgaagcatccacttgtgggcttcggtgcgcgcatcggccggcgcttcccgcaaggtgggcaggtagtagcgagacagtttcatagggcctcctattccgcttgacgaatgcaatttctcacggcttccaaaaagccgtaggaagcctccgtggcaccggagatcgtgtctacatccgccgattgttttcgaatcactttgccttcaaggcgatcaaaggcatcttccacgacgcctacattttcactatgttccactacatggacccggtcgatgaagccgtcgcgcacccgcatttcgacggaaatatcccccaccattccgcggcctgcggaaacataactgccgtcttttaataaatgtcttccctcttgcctcaaatccaccgcctccgatttcttttcttcggcgacgggctcttcggcactgtagctcaaggaggtggcacagccggtgagcgcgaagcaacaggccaaactcacgacgagttttttcaatggaaaagctccttatctatatgaatactcactttatcttctgtttccattataacctattttctaccatatgtggtggttggcggaacattaaccactattttttgtcatttaaatcgacgacactttgccgcttaatgatttccacgggaagaagaatcatctcttcgcctttgtccgtattcttcttgtccagcatcttaaagagcttgcgaatggctacggcgccgatgtcgtaatagggctctttcaccgtggtgagtttgggacggtaaatgtccgacaaggtgctgccgccgaagcctgcaaaggacatgtcctccggaatgttcatgccgtggtcccgcatgacattcatcaggtgaatggccattaaatcctggctgcagaagagcacggaatacttgccgcttcgaagggcgtcttcgtgttcttcgaaaagatcctgagcgtcgccttccgtgaggccttcgcagtagaggacggagggcttcagtcccgccgcacgcatggcgtcgcggtagccgcgaatcttgtacttttcgttggtgcgatccatgtcttttcgcatggccacataaccgatggccgtgtggcccagattaatcaggtaatcagtcatattgtaggaagcggccttgttgttaatggtaacggtgggcgcctcgtctacattgtaaaagcgattgatgaccacgcagggaatgttaaactcgtccagcttatagagaagcttttggtttaaaatttccgaaataataatgatcccttccacttgcttttggctgaagagattggcgaatttaatttccacttccggatcgtcgtaggacgaggagagcagaatgtcgtaattgtgcatgcggccgatttcttctacgccccgtaagacttgggaaatgtattgattccctacgtcggagacgatgacgccgataatattactttttttcgttaccaggcttctcgccacttcgttgggcttgtaatccaatacgctgatggcgtgaagtacccgtcggcgggcctcgggactcacgggtttggagtcgttaatgacgcgggatacggttgaaatcgatacgtccgccatttttgctacatctttgatggtcgatgccatacttacctcctatttgtaatcaattgaatgcccccaggcaccacttcaatggtttgtggcaggcgagggcctttttctccgtcaatatccacgtgcatggacttgtccgcacgaatggtgatcttttttccgtggcgataaatgaaatgatcgtgatcgatgtgtctgcccaggccgatggttcggaaaaggtccagcagtttggacatggtcatctcttcgatgaccgcaagctccaagaggccgtcggtgacgtcggcttccggggaaattctcgaaaaaccgccgacgctattggaattggagaccatgaccatcatggccttggtttcgatggactcgccgtcgcagtcgattttgacgtcgaagccgctttttaaaaagtccttttcacgaaacatgcgaaagccttcggcgtagtaggccaatcgccccacagcggatttggcctcgtcgggcactttgtagccgatctccgaaaacacgccgacggcacagacattaataaaggcgctgtcgccgcaaaggccaatgtcgacggcgattggttttccctcggtgaccatggtgtaaaaatcgtagggatctttcggtatgcccatggactcggcgaagtcgttgaccgtgcccgccggataaatggccaagggcgttcttcgcctcgcttcatacatgccggagaccacttcgttgaccgtgccgtctccgccgatggagataatgcaatcttccccgtcatcggtggcggcaaaggcgcgggcatcgccgcctttttgcgtaaaattaagtaacacggctgttcccctcgaggcaaagggcgcgattagtttttttatgatttcaatagccccttcccttccgctggaagggttagcgataatttttacctttttcatttatacctccgcctttattatacgctatggggaacgatctcacaaagaggaattcaactttttccccgaaataaatcggaaaattttcccgaaaatcatgaaaaatgaccggctgttacaaatctgaaccctttttatggcgaatatgccctgttttttcccccgacctctccttctgcaggaaaagaatttattttttcccgtgcccatggcggcgtctgcggcaagcgttttttctttcttagtcggcgcccttattttttacataaccattattttcccgtaatctttttcccgtatgctactttagaaaaggcgggcattaaaaaagaagcggcggggccgcttcttccttttgctgttaccgcgtgcgcaacacatctcttaaggcttccaatacttctcgcataatatagaagtaatccaccacattgttggcgttgaaggagatggtctttgccgtgtccgaaatggaatcggtgagcacatcggcggtgttttttatttttacagacgtttgatccacggtgcgggccacgttgtcgacggtgcccgtcacatcgccgacggtggcggcgatcttttccacttccggcttcacgacttcaaccatttccgtggcgtcggtggtgaggcgagaggcgttggtggagataatggtgacattatctgtaatggtcgggagcttttgcatggtgtcgtcgatgacggcttcgtgggcctccaatttggttttgacaacctttaaaatgccggcgacgtttttcagggtaatcatcaaaaagaccagagccccgatacctgcaagatagagtaaaaagcgcaagaggtcgtgcaaattaatcatggtgtccattgtgacctccgtgttctacttatcttcttcttcttttacgaccttttcggatttcttttctgcgtcttttgccgctttggcaattttatcggcgctttctttcacttggtctttggcttctttcgcttgatctttggcttcttcgccgacttctttcgcggcatcgccgacagctttggcggattcttttaattccaccttcacattggcgccttcttcgcgaacgattctgccgatggctcttgctttggctttggcgatttcggcatcgtcgcgtacttcgtcggccttaatggcggcgcgaagtttcaaatcgtcgtaggtgtcttgaacagcttgttgtgcttcataagcccgtgcggataattcatcggcggtgtctaaagccatgtccttggcgttttctgccaattctctggagcggtcgacgatgtcttcgcgggtctttttaccgctttggggcgcgaataaaaggccggctgcagcgccgacgacggcacctaatgcaaatttctttgctcgttcttctcgtaaatagcgttcacgttctcttctcataaaatcaaatatcatggtcaacctccagtttttaagttactattattatagtacccaagggagattaaaagtatgcatttttacggaaaattcttacacgatctcggaaaggagacgcttttgctcatcgattctcacagtcactcacgcttttctttcgactccgaggcggattgcgaagaaaacattctcgccgccatggccctgggcctcgacggcctggcctttaccgatcacatcgaccgggtcgacgggcccttggattattgtttcgatttcgacgactacacccgcaccctcattcccttaaaggcccgctacgaggaccgaattttggtgcttatcggcgcggaaatgggcttgaatctcgagaaaaatcattggatcgaggcagccatgaaggatgatcgcttcgattactttatcggctccctccacaccgtggacaatcaggacgtggcctccaccctctatacgtacaaaggggatctgaaacctttttacagaaactattacgacgccatggtccatgccgccacgggaaccacgggctatcacgttctgggtcacatggattatttggaccgctacgtgcgggacaaggcggccattccccccttcgccttttacaaggagcaggtggcggcggtgcttgagcatttgattcaaaaggatttggtgttggagtacaacacggcgggcaagtacaagggtctgaattacggcaatcccaaggaggaaatcctcgccctctaccgagatctcggcggcaagcggatctgtctttcctccgacgcccacaagtcggagcacatcggccgggattttcattcggcgaaggattatctcatccgcttgggcttcacccacgccacctatttcgaaaagaagtgccccgtggaagttcccctggcggattaaacttgatctcttttttacagaaagaacaggttgcggaaacatttcgctactatacttaccatagaattcgacggagccatcggttccgcattgagttttcatttcttactcccttattgaggcggcgttttgcgccgtctttttatttgctctttaaggcaataaagtatacaatctactttgaaaacgctctaccattttaaaatagaaaaaggtatactggtaattgacgatcatatgaatcgaaaaacggcattgtcgtttcctagaccgcaatcaaggaggttgtatgactagtatcgcgtaccaattattggaaagccacttgctggaaggaaccctttctcccggcgaagagattaaattgaaaatcgatcaaaccctgacccaagattctacggggaccatggtttatttgcaattagaagcgatgggcattgaagacattcaaacggagctttccgtagcctacatcgaccacaacatgttgcaaacgggctttgaaaatcccgacgatcacgaatttattcaatcggcggcggcaaaatacggcctcgtcttttcaaaacccggcggcggcatttgccaccaagtgcaacttgagcagtttgccgcaccgggcaagaccttggtgggaagcgactcccacacgccgacagcaggcggcctcggcgccctcgccatcggtgccggcggcttggatgtggccgtggccatggccagcggcttttatttcctgaaggtgcccaaggtgttaaacctgcgcctcagcggaaaattaaagcccggcaccaacggcaaggatgtcattctcgccatcctgggcaaaaaaaccgtcaagggcggcacgggctacattgtggaatattccggcgacggcgtgaagaatctttccgtcaccgatcgggccaccatttgtaatatgggggcggaactgggcgccaccacctccgtcttcccctccgacgacgtgacccgggcctttttgaagcgccatggccgggtagaggccttcgtgcccctcgccgccacggaggatgccgtctacgacgacgtgctggacattgatctttccgccatcgagcccgccgtggccaagccccacttgcccgatcaatacgaaaaggtgaaggatctgggcaaggtgaaggtggatcaagtggccatcggcagctgcactaattcctcttacacggacatgatgaaggtggcacaaatcttaaagggcaaaaaagtccacgaagatgtaagcctggtcatctctccggggagcgccaccatcttaaatgctttgtccaaaaacggcgcactggccattatgatcgaagccggcgcccgcattttggaaagcgcctgcggtccctgcatcggcatgggccaggcaccgaagtccggcgccgtgagcctcaggtcctttaaccgcaacttcaagggccgcagcggcacgaaagatgcgaagatctatctcgccggcccggaaacctgcgccgcctccgccattgccggctacattaccacgccggatgcggtagaacctgtagacgagccggatcactacgatcacgccaccaattacttaatctatcccaaggaaaaagctttgcggccgaaggaagtgaagatgggtccgaatattaagcccttccccttggcacatcccttggaagatggttttgaaaagaccattctcctcaaggcatcggacaatgtcaccaccgacgacatttgcccctccacggcaaaacttctcccctaccggagcaatattcccgagctttccaaacacgccttctccactttggtggacgactttaaagcccgggcggaaaaacacggcggcggcatcgtcgtcggcggcgacaattacggccaaggctccagccgggaacacgcggccctcttgcccctttatttaggcgtggaagccatcgtggcgaaaagcttcgcccgcatccaccgctccaatttaatcaatatgggcattcttcccttggtctttaaagaccccgccgattacgacaaattaaacgaaggcgacaccatcgccatgaaagacttaaaggcctccgttgaaaaaggcgaatttatcttaacatcaggcgaaggtgccatcgagcttgtaggcgacttcagcgaacgggaaaaagccatgctcttagaaggcggctatttaaactacacgaaaaacaggagggcataatgaagaaagtgaccttgatccccggcgacggcatcggcccggaaatcgccgcagcggtaaaaaaagtgtttgaggccatgaaggtgcccgtggttttcgaagaagtgaacgcgggcaaagcggtctttgaaaaagaaggcacctacttgcccgatgccctcttccaatccctggagcgaaataaaatcgccttaaaaggccccattaccacccccatcggccacggtttcagaagcctcaatgtggagcttcggaaaaaatacgatctctaccaaaacattcggcccattaagcccgccgccgatcttcccatgaagttcgacgacgtggacatggtgctctttcgggaaaacacggaagatctctacaccggcgtggaggaagtgatctcagaaaatgaagcccactccattaaaatcattacacgggacaaatcggagcggatcattcgcgcggctttcgactacgccgcggccaacaagcgccgctccgtcgccgtggtcaccaaggccaacattatgaaagccaccgacggtttgtttttagacgtagcgcgagacgtggcgaaggactacgatgtgcccatgaaggaaatcctcgtggacaacatggccatgcaaatggtgatgaatcccggtcagtttgacgttatcgtcacggaaaacctttacggcgatattctttccgacttaggcgccggactcatcggcggtttgggcatgattcccggcatgaacaagggcaaggacatggccatttacgaatccgttcacggctcggccccggacattcaaggcaagggcatcgccaatcccacggccatgcttctcaccgcctgcttaatgctcgacgacatcggcgaaggaccgtcggctgaaaaaattcgccgggccattcacgacgtcttgtccgatcccgacacccgcacggtggatctcggcggcagcttaagcaccgaggcctatgtagacgctttaatagaaagagtaggtgtgtgatgctcaatcagaaaatggacccccgcctggacgatctggcggaaaagattacgaagcgcgacaccattaatcgcgagctctattccaagtacaatgtgaaacacggcctgcgcgatgccgaaggcaccggcgtcctcgtaggcattacccgcatcggttacgtcaccggctacgaaaaaatcgacggcaaaaaagtccctatggaaggggatctgctctatcggggctattccgtgaaggacatggtgcatgattttaaagcgaccaatcgcttcggctacgaagaagtagcctacactttgctcttcggcaatttgcccacgaaaaaagatttgaatttcttcaagggcctcttgcgggaagagcggtctctgccgagaaattacctggaagatacgatcctgaaagtgccggggcgcgacgtcatgaacaaaatgatgcgctccactttgtgtctgtactcctacgatgcggagcccgacggcacctccacggccaatgtgcttcgccaaagcgtaagccttctcgccaagacgcccctgattatggcgtataattaccaagccaagaaacactacatcgacggagacagcctggtcatccattacccggacagcgacatgtccacggcggaaatgattctgtccctgattcggaaaaattccgactacaccgatgccgaggccaagattttagacctgatgctcgtgcttcacgccgaacacggcggcgggaacaactccaccttcgccacccacgtggtctcctcttcgggcacggacacttacagcgccatcgtcacggcactgggctctttgaaagggccgcgccacgggggcgccaacctcatgtgctccgccatgctcgacgacatcgcctccaatgtgcgggacgtccacaacgaaaacgacatcgaagattacctgcgccgcatcttagggggccaggccttcgacggcaagggcctgatctacggcatcggacacgccgtctacaccttaagcgacccgcgggccgaactcttaaagcagcaggcaaaggtgttggccgaagaaaaaggctacagcgatcaatacaatttcattcgcctggtggaagacatcggcggtcgcctcttgcaagagcgcaacaacacaagctatccccttaccgccaacatcgacttgtactcgggcctggtgtatcaaatgcttgggatccctcgggacctttacaccccacttttcgccaccgcccgcatggccggctggtgcgcccaccgtttggaacaagtccaagacaagaaaatcattcgcccggcctacgtccacttaaactccaggaaaaaatacctgtccatggacgaccggacaaattaaaggaatcccctcgtaatatcgaggggattttttcttttctcaaatagttaaatgaagttcgaaaaaaatacatgagcagccgagaattttatagacaaaaaaagtcacgaggcatacaattgttttgataaaaagtatcatttaattaaggaggttcttatgattaccattgaccatctacataaaagttacggcacgaaaaatcaacggcttcacgtattaaaagacgtgtcttttacgctgcccgaaggaagcctggcctgtctcttgggcccctccggctcgggaaaatccaccttgctgaatattttaggaggcattgaaaccgtcgacgaaggcgaaattatcgtaaacggcgcccgattgtcccatatgaataaaaaggaactggagcgctatcgcagaaaacaattgggcttcgtctttcaattttataatttagtggaaaatttaaccgtccgagaaaatattctgaccggcgcctacctttccgacgatcctctgaacgtggacgccttggccgaggagcttggcattgccgatcaattgcacaaattcccctcggaaatatccggcggccaagcccagcgggtgtccatcgcccgggccatggcgaaaaagccgtccctctttatttgcgacgagcccaccggtgccttagactacgaaagcgccaaggcggttttgcacttaatcgaagacttgaacaaaaaacacaagactaccattcttatagccacacacaacgaagccctcgcttccatgtgccacgtaattttgcgccttcacgacggcagcttaaaatcttatgaagagaataaacacatcctctccgccgaggaggtgcaatggtaatgaaaaaccccattcaccgacggattctgcggctgttttttaaaaagcccggcacctacttgccccttttcctcatttcccttttaaccgtcactttcacttcctctttttttatcagccaaaattccattaagcccctttactacaagggactgcgggaaaacaaagtggaagacggccaatttctcatggcggatcctttaacgaaaaaggcgaaggatgccattgagaaaagggatttggatcttgcggaaaatttttataaagacgttcccttccgcattcccggcgacgaagataagcggcaaaaaacacttcgcacctttatcaaccgggaaaaaatcgacaccgccgccattcacgccggccgattgcctgtgaaaaaaggagagattgccattgccgccaacttggccaaggcgagcgatcttcgcctcggcgatacccttcgcctccatggcacagattacaagattacggccttggtggccacgccggattactccacgattttaaagacccaaggggatttggccatggacaccacgcatttttccgtggcctttgtcacgaaggatgccttcgattccatgaaggaaaaaaccaattacctctacgtctacagaaaccacgcccgcctgtctgaaaatgcagcgcgagataaattcgaagacattctcgccgatgcggaaacgtcgggccccgtcatcggcgccaccaccttctacgacaaccgctgcatccaatactttatcgacgacatgggcggcgatgtgcccatgatgatgattaccatggtgcttctgtttatatccctgggctttatcagcgccctgcaaacccgaggcctgttgcgggaagaagcgccggtgatcggcaccctcctcgccatgggctacgagacgaaagatttgatacgccactacagcctcatccctacctgcctcacgattttcgcgggggtggcgggcaatattatcgcctatgtgaagggctacaagctctacgccgacctttactacacatcttataatctgccgccctttgtgcccgttctttcgctgaaggcctttgccttaaccaccttgattcccctgggcatcatttggctggtcaatcgcctgcttctcatgcgctactttcgcctgtcgcccctacgctttctgcggcgggaattttaccgcaaaaaaagaaaaaaagccccctctctggaaaacttttcctttatgcacgccgcccgccttcgcatcttgtcggaaaaccgcctgaatatcctcgccctgttcttcggcatgttcataggcaatgtgcttcttctcttttccatggccatgggccctatgtttgacgactacatggattccataaaaaaagacatgaagtacaattacacctacttggtaaaggcgccggatcccgccattgacgccgacaaaggcttaagccttacggtggattacaaaaagggcgacgacaaaagtgatctgaatctgctcggtccggacaaagacacggcctacaaaaaagatctgccttcaaccatgggagcaaacgacgtggtgatctccacaggcctcgcccaacgggacaaattaaaaccgggggatgaaatcaccgtcaagcttccccgatggaaaaactacaaacgattaaaaatcgtcgccattgcccacgacattcactccgttcaggcattgatgcccatggatgcgctaaacaaatttatcgacaaagatgcaaagaatttcaatctctactggtcgcaaaagcccctgcacgtagacgacgaccgactcattaccaccatcgatcgggaaaaaatcggctcatacttggacgcctttttagagaatttcggcggcgccctacttaccacccgcattctggccatggtattctactttactctagtctacaccgtgagcaagttgatcttggaaaaatcccaaaaagatatttgctacctgaaaattttcggctacggagacagggaagtggcatccgtttatctcttgggcatgggaatcgccgtggcgctcttttatcccctgagcctgcctctcttcgatcctctggtgcgctacctcttcgccctgtccatttcgaagctttccgtctacatggagccacacttcgcagccaaaagttatctcgccatttatgcctcggacctcgctgtctttgctgccgcccaggccctgagccgcagaaagattaagggcttgaatatggtggaagaattaaaaaaagtcagtggctgaaaagtggcccgtgtttgacttttcctttttaactgattatacttatcattagcaagatacagtatgatttttagaagatataaggagaaaattatggctttaataggaaaaacattacccgagtttaaactcgacgcctataatccggcaaaggatgaatttgtaacagtgtctaacgacgatatgaagggttcttacactgtactcatcttctaccctgccgactttacttttgtttgccccacggagcttgaagatatgcaagaatcctatgacgaattaaaatccctgggcgccgaagtctattcggtttccgtggatacccacttcgttcacaaagcttggcacgacaattcggaagccatcagcaagatccaatacaccatgatcggcgattccaacaaagagctcacgagagagctcggtcttctcgacgactcgggcaaggcccaccgcgccaccttggtcatcgatccggacaatgtgattcaaaccgttgaaatcaatgccgacggcatcggcagaaaagccaatgtcaacattaacaaggtgaaagcggccaaatacgtcgccgaacaccccggtgaagcttgccccgccaaatgggaaagcgaagcagacgctaccctgacgccgggactggacctggtaggtaaaatctaatatgttagatacaaatctaaagaaccagttggcccaatattttgacctcttgaaaacagaggtcactattgggctttctgcgaataatgacgacgaaaattgcaagaaggttcgggaatttgtcgaagaagtggcggccttgtcggacaaaatcaccttggtggagaaagagctgacctacacgccttccttcgaaatcaaggggagcttcgagcacggcagaatcgtcttcgccggccttcccttgggccacgaattcgcctccttcgccctggccatgctccaggcaggtggagtcgcgccgaaaatcgacgcttccgataagaagcgcatcgaaggtctggcgccggcggatttcgaaaccgtcgtgtccctttcctgccacaactgccccgacgtggtacagtccttaaacattatggccatcgtcaatccgaagatcaaccacaccatgatcgacggcggcagcttccaagacctggcggaatccagagatgtcctcgccgtgcccgccatttttaaagacggcgactttttcgaagggggcaaacagtccctttcaagccttttggaaaagctgggcagcaaagtggacaaagaggaatttaaggacaagccccttttcgataccctgattatcggcggcggccctgcagcagcgacagccgccatttacgccgcgagaaagggcattaaaaccggcctcctcgccagcgaattcggcggtcaggtgaaagagaccctgtccatcgaaaacattcccggctttaaatacacggaaggccccgacttcatggatcaaatgcaggcccaggtcacggcgctggatgtagacattatgaccggcgtcctcgccgacggcatcaaatccctcgacgacaaggtggaggtgagcctggataacggcgccaagctttttgccaaaacggtgattattgccaccggcgcccgttggcggctcatcggcattcccggcgaaacggaattcagaaacaaaggcgtcgcctattgtacccactgcgacggccccctctttaaggggaaaaatgttgccgtcatcggcggcggcaactccggcatcgaggcggccatcgatttggcgggcctcgccaaagacgttaccgtgctggaatttttgccggatctaaaggccgacgatgccctcttgaagaaactaaagaccctctccaatgtgacggtcatcaccaatgcccaaaccacgggcctttacggcgacggcaaagtggaaaaactcgcctacacggatcggatcagcggcaaggccgaggagatccccatttccggctgctttattcaagtgggtctggtgcccaatacggaatggctaaaagattccggcctaaatctttccgacagaggcgaaatcctcatcggcaaagacggatcgaccaatgtgaaacgcgtgtttgccgccggcgacgtttcagacaccctctataagcaaatcgtcatcgccgccggaagcggtgccaccgccgccctcggcgcctacaactaccttatggtcaatgaataaaataaaaaaggttctctattaacccttgaagagctcggtgaaaaccgggctcctttttcgtgcgctttaacatgaaacaatccattgaggacttaatccccatggaaagtttaaagccattttgtatttatcccaccaaaaaagcccctgtaggggcttccttcgtttatatattgttcgaaaaactattcgtcgtagtcgatgacctcatagccctcgagatccggcgcctcttccatggtcatgccgtagacatcgtccccgtcataatcatagaaatcatcggcgacctccgcttcctcttcccgccacgcttcgtaggccttgatctcgccgtcgagctttttaaagacatacatcaatacgcccatatcgtcggcaaagccgatggcgaagagaaagtccggcaagatgtccatgggattcaccagataaatgagccctgccacgatgaaaaggaggtttcgcttcttcaggccccgatagcgcccggtgatcgcatctttcgcgagcctcgccagaagcaggccttctttttttacgcggcccaatttgccctcgccctttaacagggagaaactctctttggcgagcttttccatgcgctcggggtcggagacgattttcttcgcccgaggcaggtatttaaacaggaccttggcccagttcattacttataccaactttcgtcgtagggatctttgcgccacaggttcaggcggtctttttcctcttcgcttaaatcgccgcgggccacggccacttccgccagttccgggaaggtggcgagggatgcgtgtttaaagccggaggccgcgaagttttcttccgccgcctttaattcgtagctgaaaatggacacgatgcccacgaccttaaggccttccgcttcgcaggccttggcggcatcgatggagcttccgccagtggagaagagatcttccaccactaccactttttctccctctttaaaggccccttcgatgcgcttgtttttgccgtggtccttggccttggagcgaataaaacccgagggcatatccaaaatccaggagatataagaggcgtggggaatgcccgccgtggccgtgccgagaacggcttcggcttcgggaaattcccgcttcaccaacgccgccaaggcttcttcgatgacctttctcgcttcgggataggaaagaatcaggcgattgtcgcagtaaatggggctcttgatccccgaggcccaggtaaagggcgctttcggcgacaagctgacggcgccgatatctaataagtgttcgcatacggctttcattggctacctcctaaaaattcttccttaatggcatggtaggccgccacgggatctttcgcctgtgtaatgggccggcctacgacgatataatccacgcccatatcccgggcatcggcgggggtaaccacccgcttttgatccccggcatttgctcccgccgggcgaatccccgggcagaccagggggaaggcttggcgaatgtgttcccttaaatacttcccttccatggccgaggacacgatgccgtcggcaccgccttgtagggccagataggccaggtgatacaccgcatcttccgccgagcgattttcacctaaaagggcttcttttctgccgacgtcggaaaaagacgtaagcaccgtcaccgccaggagaatgggcgggcgatccatatccttcaccgcttctctcgcccgcataaacatatccctgccaccggaggcgtggagggtgagcatatcggctccaaggccctttaaggagcgcacggcccccgccacggtgttgggaatgtcgtggagctttaagtccaaaaagaccttgtagcctttcgactttaattccaccacgaactccggcccggcggcgtagaataattccatgcccactttcacaaaaggcttttgcccttcgccgtcgaaacgggataaaaattcccgcgccacattggccgagggaaaatccaaggcgacgatgacgtctttttccatagtcaactcctttgtcgtcaattcaatcaatatattatccaacatagtatataccgaaaagagggaaaaataaaacggattctcctacctcattctcccataaaaaagacgcccgcaggcgccttttcttatttgaacttttcgattttatcgacgatggcacttaacgtatccacccggtaatcttcgatgcggcctttgtcggcgcattccgccagtttcggatcgatgggcaaggcgcccaaatagggaatgcccttttcctcggcaatggcggcggttttgcttacgccgaaaatatcgtagcgcacgccggtgtccggagcgataaagtattgcatgttttccacaatgccgatgacgggcagggccatcatcttcgccattttaatggccttttccacgatcatggacaccaagtcctgaggcgaggtcacgatgacgatgccgtcgacggacatggtttgaaaaacggtgagggccacgtcgccggtgcccggaggcatgtcgataaagaggtagtctttctttccccagtttacatcgctccagaaggtggtgagcatattgcctaccaccggcgcccgccacaagacaggatctgtcgggctttccaaaatggagttcacgctcataagatcgatgcccgtggaggtccgcaaggggcgaatgcccttttccgtttgaaagaccgtgccgtcggtgccgaaaattttcggaatggaggggcctaaaatgtccgcgtccaagacgcccacttctttgtttcgccgcttcatttccgatgccaagaggccggtgaccatggatttgcccacgccgcctttgccgcttaatacggcgacggtttttttaatggacgaattggcgttcaggggtttttttaatgattgtttcttatccatgggctacactaatttcgacatcacggagttgactttttgatccaagctggcctttttgtccctgcggtcgtcgattttgaccacggagtaaacccgctcagcgccggcggcgaagacggcttcctgcattttccgcacgcaggcgaagagttcgtcgatgtcgccttcaaggacggtgcccatgggatttaagcggatttccactttgtcgttgtcttttaccgcatcgtaggctgccgcaacaaaggggctgcacgatgtcttttgggttccgatgggaacgagggttaattctactactgccataatgacctcctgaaataattttcggcaatggcgcaaaaggtgcttacgccgtaaaccatgctgtcttcgttaaatactgcgtattgattgtgcaaggggtaaacttccccggcatcgggctttacgcccaacatcatcatcgccgtgggaatctctctcgcaatgtaggagaagtcttccgacgcctgcacggcctcgccttcttttacgggaatccccgccgcctccgccgcctttccaacgaaggctacgagctcgggatcgttgtttacgatgtaggcttccgagagaaattccacgtccgccgcgccgcgataggtttcggccacgcccttcgccacttccaccaaccgctttttcacataaccgtgggtgtcttcgttgaagctgcgcaaggtgccttcgatgatggccacatcgggaatgctgttgggggcatcgccggcttcgaagtgacccgtggtaatgacggcggagcgatcaaaggccacttctctcgccacgatctccggcagggccatgacgatggcggcgccgatgtaggtggcgtccacgccgagctggggcatggcaccgtgggcgctttttcccttgacggtaatgcggaaattgttgttggtcgtggtcataatgcccggcttaatgtaaagggccggcgcatccatggtgttgacgtgaatcataaaggccgcttccggcgcaggattttccaaaaggccggcgtcgattaaggatttcgccccggcgagaagttcctccgccggttgaaagaccagtttcaccgtgcccttcagttcgctttcgtgggcctttaacagcttcgtcgccccgaggagcatggccgtgtgcatatcgtggccgcacatatgcatgttttcttccgattgaaaagaaacgccgcttgcttcctttcccggaatggcatccatgtccgcccgaaaaagaatcacaggctcgccttctcccacggtggcgacgacgcccacctccgccaagcgttggggcgtgtagccgaaatctttcagcttctcttccacaaaggccgccgtgtttttgacacaaaaacccacttccgcatgggcgtgaatgtgtctgcgccaggcgacgatgtctttttcaatggcttttgcttcttctagccaattcaattcatgaatcgcttccttccctattttttcaagaatttaatgatgtccccgatgacgaactcactggcactttcgtgtagcaaatcgtgtttcatcaggggataaattttattttcgtaatcttcataccccaatttatagaaagttttcgccgtatccgccaatccttttgcgccgccggttaagggatcttccgtgccgtttaaggcgagcaccttgagatcgggatttttcacgccgtagcggccgtagtcttttaagcgggatgcgctgtcccaaatggccatggcgccgccgttaaggtaatggttcaccaatttgtcgtcgcctttaaaggcccgcaggaaggcggggttgttgctgatggtatccagagccgccttggtcttcgaatccatgatgcggatcagggcgccgcggcgcttggggctggtgtagaagctttccaaattgccgaaaaacaagccgacgtcggcttgaggcgggtagcacaccaggcccgttaagatcaatttgtcgatggcatcgtcgtgatccataatgtagtttcgcgcaataagggagccgaaagagtgaccgaacatggccaggggcaggccggggtagcggctcttaaaaaaccgcgtaagggcatattgatccgccacaatgtcgtcgatggatgaaatataggcccggggatggtccgccgagacggaatcgccgtggccccggttgtcggaaaggagcacggtaaagcccgcccgcgccaggcggtgggcgaaggttttgtaatagccggaatgttcctgcgcaccgtggacgatttgcaccaaaccctgaggattctcggcctcgatgatggtaaaggccaggggcagaccgtccataggcgatttatacacgccggtaattgcgccgcccgcctcgtcgtaaagggccaggcgatgcagagcccccgatgcttcccatcgtgccaacttgcgggcggattgcttctttcgagcattggccgaaagctgcggcacgatggaagcgccgagaagaaggcccgcggcgaggggccatgaactgcgttttttcataggaacctccttttacttcacactaaaaattgtctgcggtgaaaaaggtgcgtactgcgtcgtagaaattcaacacgtcgtcgacgtgaaccacttcaaaaaccccgtgcatggcccatgtggcgatgccgatgtccatggcttccatgtccacgtggcgcaagctcaagggcccgatggtggatccgcctcgttggccgtggggattggcgaaagtttgcacctcgagccccgctgccttcatcatgcgcttaaatctggcgctgctgtggccttgggtggcgtagctgcggctggcggaaagcttcaccgttacgccgccgcctaaaacaggtgatgcggagggattggccttgtcccgatagttcgggtgatcgccgtgggccatgtcgcaggagaggaggaagcttcgtgccaaggcacggaaataggcttcgtcgcctaaatcgccgacgatgcggcggagcacattgggaaggaaactgctgtcgccaccgctttgggtgaggctgccgatttcttcctgatcggcgaggtaaaccacttgggtgagattttcgttgatctcgccggatagagccataaatgccggataggccgtggccagattgtccaatcgcggcgaggagagccactttttgtcggcaccgatgagggtgctgtcgccccagggataaaaatacaagtcgtagtccaagattttttcttcatccacatcggcgagggtggccaaatcctttaagaagccgccatcgtcccaggattttgcggcgaggggcaccaaatcttttcccgctttaaagacgtagccgttgttcacgtccttgtgcaggtggggcgccagatggggaatggtggccacgggctccctgaaatccacgggaatgctcttcacgccatcttccccctccacgatgacacgtcccgccaaagacaggggccggtcgaaccagtcggcgttaatgatggcgccgtaaggttccacatccattctgacgcagtctttttcgccgtgcacgccgccgggcaagaggcgcagagccgggctgtccgtgtggctgatcaccgtgcgaaaagccatggtctcggggtctctttttcccatggagaaaaggagaatcgccccgtcttcattgaccacataatacttgccgccttcttcaagctcccaggcatcttccttggcgagacgcacaaagcccgccgccgccatttgaatatgctccaccacttggtaagacgtcgggctcaagtccacaaaagactgtaaatcttcgatattcataattgctcctttcaggttctttcactcttattagtataacagaattcaattcatctcttgtatcattcttacccgtcgggggtatatactagttagaaaaggaggcatgtattttatggattccgttgggcagatcttgcccgaattacttctcattatcctactcacggcggccaacgcctttttcaccgccacggaaatcgccctggtctccgccaatcgggagcgcatcagcaatctggcggaagaaggcgacaagcgggcgcaaaaagtcttggccctgacgaaaaatcagtcccgctttctctccaccattcaggcggggacgactttggcaggcttttttgccgcggcactggccgcccgggccttcgttcccctcattcgcccatccttctcgcctttgggcgaagggccctccggcacagtggcttttgtactggtgattcttcttctttcttacattaacctggtcttcggcgttttggtgcccaagcgcatcgccctgcaaaaggccgagcaaacggcgctgaaaaacgccggcgccgcggcggccttctacaagctcatgacgccctttatcaagctgctcgcatttaccaccaccttgatcctaaaagccacgggcaattactccaaggacgtggaaaaaaacatcagcgaagaagaaattaaatcctaccttcgtgtgggccaacaacacggggtcattaacgagtccggcgaagtgatgatggtaaacatcatggacttcgacgacaagctggcctacgaaatcatgacgccgcgcaccgccctttacatgctggattacgacgaattcggcacgggaaagatccgggagatgctggagtccggctacagccgcgtgcccgtctaccgagacagccccgaccacattgtgggcaccatctacattaaagacctcttcgtggaatacgccaagcgcagctaccgctccatcgacatcgagtcggtgatgaaaaagccctatttcgttcccgaaacgaaaaacatcgaccgcctcttgcaggaactgcagtccacgaaaaattacctggccattttaatcgacgagtacggcggcttgtcgggcatggtcaccatcgaagacattgtggaagaaatcgtcggcgaaatcgaagacgaatacgaccacgacctgaagcagattttaaaaattaacgactacacctatgtagccgacggcatggccgaattggatacgatcaacgaacagctggatctggatcttcacagtgaaaaccacgaaaccatctccggcctcaccatcgagctcttgggctttatccccgaagccggagacacgaaaaaacacaaagtcctctacggcaattccgtgaagctcaccaccttgggcgtaacggacaagcgcattggccgcgtagaaattcaactcttggatcgaaaggcggaaaaagccgaggaaaaataaaggaggtcgccgtgaagaaaaaagcattggttgcgctgattttatcggcccttctcttgccccgggcggcatttgccgaaggggcacagaaaaaagacgtggcaccggcggaaaaaatccgaacactctgcgaggcgggccttatcgtcggcgacgaaaaaggcgatctcgccttgacccgccccatgacccgcgccgaatttaccaaggtcatcacctgcgcgttgaatcttcaggaagatgcggcggcacttgaaaaagaagcctcgccctttaaagacgtggcagagacccactgggccaaaggctatatccacgcacttacccttgcccaaaagacgcagcctctgcccctgattcaaggcgacggcgacggcaacttccgaccggagatgcccgtaagcggcgccgaagcatcgaaaatcgccgtgatcctcgccgacaaatcccttaccgccgaagaggccgccaccttcagctggcccgacagctggatctaccgcgccatggccttttcccttcccgtcgccgaggggccctataaagcgcccgccacccgggaggccgtctttctcaccctctacgacattctctatacccatcccgattacgacgaggccatcgcccgcttcctctacttaaccgacgggctcaatcgccgcatcaccttcgatcatgaggcctttcaaaaagcgtttttgaatcggctcaacgacgcccgcagaaaaaatcatgtgcgtcctttggttctcgacaaaaacctggaggccggcgcctacgcccgggccaaggagctcgccctttacggcaatatgcgcatcgacggcgcgcgccacgtgcggccggacaagcggccctactacacggcctacgactacttaaagcacaaaaaccccgcctatttcatcggcgaaaacctcattcaatttcccttgaaaaagagaggctacgacggaagcaccgccctcaccatcgacccggacatcctggcagaggaatgctttaaagcctgggaaatgagcccgagccatcgagacaacatgctctcccccatgtacagaaaaatgaacattcaggtctacgccggccccaacttgcgggaggaaggggctgccgacgaaggcatcctcgtcggcgccttgggactgagtcgaaactattaaggaggctgttatgaaactattcgctctcttcgtgggctttatcgccttcgccctcgtcctattactcgtgatccttctcattcgccgcctcttggccgacgaacgggacagaaaagaacgcatcgacagagaacagaaagaagacaagtaaatttgcgaacaaacgcctttcggggcgttttttcttgcaaaaatttccacaaaaaaatcgagcaagctcaagcttacccgattttcaaatagcgataatgccttagtggccttcgttaaaatagtcgttgcgcttcatgtcttggaacaccacgtggatgtgttcccgaggcgtgtccgccaatttatgaaccgtatccgtaatttccttggcgatctttgcctttacttcgtcggaacgaccttcgattaattctacatggataaagggcatggtaaacctccttcttgcctctgaaaacctgtctctcattattataaaacggcacgaggcgcccttcaagtcgggcaaataaaaaagtgcaccgtgtggtgcaccgattagtctttttccacaatgggtttgatttcagtttcgttgacctttttcataaaggtgatggcgatgagcatggccatgagttccgcaatggggtaggcaagccacacataggccaagacgccggtctttgaaaagagataggccaggggcacgataaagatcagctggcgaaccaggttcacgatcatgctcaagaggccgttgccgagggattggaagatcccggagctgataatgctcacggcggcgaagatgaagctcacggaaataatcctcaacgccacgacgccgatggagagaagctccggcgagggatcgaaaaagcccatgagctgcgccgggaaaatttggaagatgatgaagcccgcgctcatgacgatgagggccactttgtaggccagcttgatgacttcgtagattcgctcccgatgcccggcgccgtagttgtaggcgataatgggcacgaggccgttgttcatgccgaagatgggcataaagacgaagctttgcaccttgaagtaaatcccgagggccaccacggcggcggcgccgaagacggcgagaatggcattgatcaaaaaaacggacagggagtttacagagatcataatggccgaaggaatgcccacggctaaaatgcccttaattatggcgccgttaatgtggaagtggtcttgaaggaggttcaattccttgttccgcttgaaattcaaatagaggccgaagagaaaggcgatgatttggctacttaccgtggccaccgccgccccgacgacgcccagtttcgggaagaaggcccagccgaaaataaagaagggatccagaataatgttcagcaccgcgccgaaaagctgggtgaacatgctgtagagggcgaggcccgtggactgcaacagccgctccatgcagatctggccgcaaagacccacgctgaacataaagcaaatgtctaaatagcgcaccccttcttttaaaatttcaggatcggcggtttgcatgccgattaactgcgtcgaggccatggtcccgaaaacggcgaagagcacggcgacgaccatatttaacaaaaggccgtgttgggcgcagagattggcttcccgctgatttttcgctcctaagtggcggctcagaagggcgttcatgcccacgccgacgccgatggaaaaagcgttaatgagcatttgcatgggaaaggccatgcttaccgccgccagggccttttcccctaagcgggagacccagatgctgtccacgatattgtacaaagcctgcacgagcatggacaaggcgatgggcagagaaatgctcatcaaaagcttcggtatcggctcatagcccattctgttttcttccatcttccacctcctattgtttctgcataaatgaaaaagggcacctcggccctttttccattccactacactatcactacgcgcagtaggagtcaagttattccacgccttttaaggcttccaccatgtcgatggtcttcagttttctgtggaagtagcccataaggagcacggaaatcaccacggtgatcacggcgggcaagaggtaatttaaaaggcccagtgtgggatccaacatggcgaagtccggcacgacgacgcgaatgaccaagaggtgcagccccttgcccacgacaaagcccaggagaatccccaccgccgttaatgtgcccgtctctctgtaaatgtagcgggtgacttctttcgggtagaagcccaaaacgcgaatggtggaaatttcccggcgccgctcttcgatattaatattggtcaaggtggagaggaccaccacggccaaagtggaagaggccgccaagataacgaagacgatgaaattaatattccccgcgatttcgtccaccatgtggcgcaaatcgccgatgccggtgagggccacgacggaatcgtaatctttgtagtaagatacgtccgccccggaggcgtttacgagatccgcattggtcttgtagctctttttaaagaccgcttcataggtatccggatccatatacaaatagtggccggcgtagccttcggcaatggcggcgacgggcacgtcgtagagaacgtcgtcgtcgtttttcacttcgatgacgccccctgcctccacgcctttaatggcggcgagtttttccgtaatcacggcgccttttaagggaatgttttcgccggtttttctgtttctcaaggtaatgacccgcttcagatccttttcgttttcgggaacgatcatggtcacgggctggtcgatgtagcctgcatcggccacggccagggtttccacataagcgctgcatttggcgcgaatgtttttgtctttcgcgattttttctttgtaggctttgtgggcgtctttgtccaaaaggggctcgtagaaaatcatgtggtcgtaccgattcagcacgtcaaattgcttttccaccaagccgtccacggatgtgcgaatgccgaagcccagtaccaagagggcaacgcagcccatgacgccgacgatggtcatggccatgcgctttttgtcgcggaagagattgcgcgccgtcactttttggaagaaggacaggcggctccacagccacttgatccgttccatgaagattcgcgtgcccttggccgggggcttgggcatgaggagggcggcggtcttgagcttcaggctgcggcgcacgctgacataggccacaaggcccgtggccaccatgccggtgaggatggcgagaaggatgcgcccggggtagaggcccatggcgaggtggtcgaaaatgccgctggccaaataagcatcggcgatgaccttactcagcaggaaattgcccaagaaggcgccggggatgccgccgaggagggcggcgagggtgccgaagcgcacgtatttgtcggcgatggcaccgttgttgtagcccagggccttgtaggtgccgatgaccatgcggtcgtcgtccaccatgcggttcatgaccgtggaggcgagaagcatggcgatggcaaagaggaagacggggaacacggcagaaagcttgtccacccgatgggcgtagtctaagaagacgaaggtgcgcatctcttcgttgacgggcgtgattttataatcgggctttttcaaaatggtgagcagttccttggctcggtccacgtcttcctgcccttttaccaaatcttttaaaccgtcggcccgcttcttttcgtaggtggcgcgagccgaagccagatcctttctgccctttaaaagttctttttccgcactgtccagctttttctgcccatccgccttttcacgggcgaaatccgacgtgcccttcttgtattgatcttctccttcgctaagctggtctttcgcggcgagaatggcggctttgccttccaggagggatttttccttctcctttaattcaccttctttttggcgcagctccgccttgcccgcttcaatggcctttagcccttcgtcggccttggcacgacccgccgccgtttcccgcttcttttgcagaaggaaggcttctttttcggcgagatcccgcttggcggcctcaagctcttcttttttcttgcgcagaagttcctgttgggcgcggattttctccgccgtgacttcccgagcaacctgtgcctcctgttgcctccggatcattgacctgccttcggcaatggtgccgtcggttttggcgagggcggccttcgccttcgctaattcatccgaggcgctattcagggtctgcttcgccccgtccgctttttcctttgccgcaaggtagtccgaatttttcagttgttgttccaattcggcctttttattcttggcatcggcgatttttgcatccaaatcagtcttatcggcatcgggattcgacttctctttttcccatccggcgatggactgttccagtgcggcgatcttcccctgcacaccgtccatagcgaatgcctttacggcagccagtgcggtttcgtaagcctgtttggcatcttgcaccgcggcagccttttcatttaccgcagcctgtttttcggggcgggcggcctcggcggcggccacattcccttgggccttggcgatttgagcggcagaaaatggcagctccggcaaatcgggaaactgcacatcgggaatcttccccgcctcgagcttctgtttcgcttcgtttagggccgcttcttcctttaatatctgatccatggccgtttccgcccgggcaatgcctcccctggcttcattttccttgctctgaatgtctgccatggcggcggcgacggcatttttcccgtcgagaagggccttttcgccgctactcaactgatcttcctgaaagagaatgctctttcgcgcctgattcagtttggcccgagagtcggccaatttcttttcgccctgggagaggccccgggcaaatttcgcccgattgtctcgaagagcgcgggcgccgcgattcagcttccgctccccttcatcgattttttccaggccccgatccaattcgtcgtagccttctttaatgtccgcttccccttcgtcgatgtcctttcgcttgtccgccaacagggcgtccagccgcgcatcgccccggttcttgaaccggtagcgaaattcctttcggtgggcggtgttcagcgctttatattcctcgctgtagacggggagattttttaaatcgtcgaagagaaaatgcacttccgtaatggtggggtcctgaaaagccaagggtgtgacgtagccgaagccgtcgatcttgtcgcccttgggtgtggtgcccttgtctgctttgtccaaaaacatggggctcgtggcaaagcccaccaccttaaaggtatagcccgccatcatgggcggcgcgtccttgtccagaagatcctcttccttttcaaagaccagggtatccccgatcttgtaggtgttcttcaaggtggggtccaggaggatctcgtccttctcgcggggcagtcggccttcctttaacagagggcggctgatccgcttcggaagggaggagaggtagagggtttttaattccttcgtggtcaaatagcccgtgtggaaatattccttttcccgcaccccttccatgtcgtcgataaggcgcaagtcttcctcttccaagccgtcggaggcggcgaggcgcaaatcgtaggcattggatttcttcagggtgtcggctacggtgcggcgcataatgggcccggtgaccgtgaggcccacgagaacgaagacccctaatagcaccagggccaagagggagataaagcgcatcttgtgtccggtaatctcccgtataaaatctttttgtctcgcatccatactaccactcgatttcttcaatgggcacggggtgctcgtttaagtacatggcccgcaccttggcgtcggcgatttcaatcacccggtccgccgcatcggcgatggcccgattgtgggtaatgacgatgagggtgtggtcgtgtttgcggcagctttcctccaagagaaggagcaccttcttcccggtcttgtaatccaaagccccggtgggctcgtcgcagagaagcagcttgggatttttccccagggcgcgggcaatggccacccgctgctgttccccgccggaaagttggctcgggaaattattcattcgctcgcccaggcccacccgcttcaaaatcatttccgcgtccagggcgtcttccacaatggcattggccagctccacattttccagggccgtgagattggggatcaaattataaaattgaaagacaaagcccacgtcctttcgccgatacgtcgtgagctcccggtcggaaaaggccgcaatgtccttgccgtccaccaacacctgaccggaatcgttggtgtccatgccgcctaaaatatttaaaatcgtagacttccccgcccccgacgggccgacgatgacgacaaactcccctttttccacggaaaaagaaatcttgtcgttggccacggtcttcgccgatcccgcaccgtaggtttttgtcgattcaataaattctacataggccataaaaatcccctcctttgcttaagactatcttaccacgtttaaagccgcgaaacaccttgcaaggctccatttccttcagtacaataaatttataaaccaacgactgaaaggaggcttcatggacgaagtatttacccttaccgaagacgactactttgcctaccaatggcacttatttaaacacaatcccacggcaaaacgcagcatgaccattcaaatgctcacgcccatcgccgtctttgtcgccattaccatcttttacatcgccacgaaaaagcccgtcgatggcctttatcccctgggcgccgccattaccctttggccccttctctaccgcttcttttttaaccgcagtatgcagaaaaagctcagaaaactgattcgcaaaatggaaaaagacctgcccatcggcgaacaccatgtggccattaccgaggaaggcatcacagacggcgacgtgaagtttagctacgacgatatccgcgacctcatcgcaaacgaaaactacctctacctcttttacaaggacgccacccaggcctatttgcttccgaaaaatctggccaacgacaaaataaacagctacatcggtagtaaaaacaagaaaggatgattcccgtgaaaaaacgcctgaccctactcttcaccctggccctccttttctttgcggcgcccgccgcatacgccgccgacttcaccctgtggatcaacggctccaatccggccggcggcgaagacatgccctacattaaacaaggccgcgtcatggtgcccttgcgactgatctccgaaagcttcggcttcgacgtcacctggaacggtgctgagcgcaaggtaaccatggccccggccaacgatcgcgtgaaaaacatgcccaccttcagcgtaaaaatcggcagccgcgacatttatgccaacggcaatccgctttccaccaccgatgttgcggcggaaattcgaaacgactacacctacgtgcccctgcgcgccatcgccgaactcttcggctaccctgtgcgctgggacgatggcgatcgggccgccattatcggaaacgaagaccccgtgccctatgtcaatcgcttcggcgcgaaagacatggccctctccctcgacggacaatcaaaaggcaagatcaacgccttcgccgaaaagggacagctctacgttcgggccgatgcctttgccaaagccatggccatgagctacaaacaagaaggcatgacttttagcgacgatcccctggaccttacgatcaatatgaaagccaaagacggcttcggcatcacctacgactgccgctacgtcacatccaccgacggactgaacttcggcatgtacgccatggacaattatataatccgcgggaacaaagcctacattgccatcaactgcttcgtcgatgcgaaacacatgaagctcaatgtcgaaggcgattccatccgcctcacgacggatcccacgccggagacctaccccatcaccattctgaaatacgaagacgagggccgcagagtccgctatctgccctcgaaatccggcatgaccgtggtgtggagcggcaaaaactatcgattaaaaaacagcgcaggaaaagaagaaaacctgggcaaatacatggaacggatctttggcgacgacagcctccatcaatcgcccccatccgacaaaaccttccaccgcgcccttggcatgaacaaccacttctacctcatgcgccaaggcaaaatggtcatcggcggcatctccgactgatcgaaacagaaacgacgcccgaaaaggcgccgtttttttgtgcaacaaagcccgccggacatccgacgggccgtaaaccacgttttataaaattatgccgcacccttttcgcccatggcgcaattcaaaacagggtagagaatgtccgccaacaaggcaccgccgatcccctgaatcaaattgggcacgaaactggcgatggccgtggggaaattataaagaatcagcccttccgcgagcaaatagcccacagccataactacgccgccggccaaaccgcagaggataaagctcagccgcgtcttttcgtgcaagagccctgccacaaagccttccagccccttcaccaccaaggtaatgggggcgtaatagccgtagcccgacaaaagatccgccagggccgagccgatgccgccgatcagcccgccggccatcttgcccattaacagcgccgatgcgatcaccaccgtgtcccccacatttaaataccccttcgtggcgggaatgggaatttgaatcatcatcgtcgccaccgtagtcagcgccataaacatggccatcatcgtcaacttcttcgtcgaaatactcttcatgtcttcacctctttcgacccattatagatcaaaagaaagacgaccataagcagcagtctgcagtttttatagggtaccacagggggcttcccttgcatcttcaaccacttttattggacgcgctcggccagggttttcaattccttcaccgccgcaagaaaggccttcggcaaatcgtcgtggatgtcgtgatcggaagcgaaaccggattttaagacactcccccgaattaatcggtttactttccgcgcatcgtcttcatccatggcggacaacagcacgccattatcgtcgtaataactcggggccgtggacttcgggggcgccacgtgaagaatcaaggtggggcaggtaatggatttaagcgtggcttcctgatcgaatcctgcgaaccatgaaaaatcatagaaagcttcgccgaatcgcaaatcgtaagcaccggttttatcctgtagattccgcgtcatcaagaccagctgatttaatttcatcttcggcgggtaataccacaccacgggcatttgtccgccgcgctctttcatgcgctttagaaacggcttcttgactaagatagaccagtggtctttcccgtctttgttaaactgctccctcatcgccgaatgatcgaaataatacaccgtatagtttctcaccgcatcctgtgcgagaaaatccgccatcacttgaaattcgctataggcgaaggtcttctccgctcgccccggctccgttgagaaaaaggggccgtcttccggcagaaacccaaccacctggtccttgtttattgcggcgatccgcgccccgatcaaggcgccggaggaatggccgcttacataggctttttctaccatgacatttttcataaattccgtcaaatcgtcggaaatcgcgcgtatcgaatacttgtccggatccttcgacgaattgccgtggccgtagcagtccacggcgaacacgtgaaagtcgcgagacaaggccggcagtaccttggcgtaatcttccttcgacaccatttgcccgtggatcaacaacagatccggcccgttcccgggcccttctaaataggcaatggtgctaccgtcggcggttttgtaggttctttctttaaagccgctactctttcccttcgtcgttaagaaccggtcattgctgtaatcgtgatgaaggtttctataggcgaagatcgcgagcaatagcaccgccgaagcgagcaatttaagtatcatccttccccactttccatcacccgttcctcgttgttgtaaagcgccaccctaccgggattctccgaaaattacttctctacggtttccaagtactctatcaccatacgattgatctcgagcagggtttgtggtgcctttcgcttatccaagccgccgtcgatttgatccgttaagatcggtgagatcctcgacaaatccgtaaggcccacatgccccacgcctttcacgtggcggttctcaaatttcggatccttcgcctgaatcagttcctcgtttcgtgcgtacgtggggatcgcccccgtctttccccacagggcgtcggaataaatatgcagaatcggccgcggataaggcgtcggcgtaaatttgtagccatcgccctcgacgccttcgatgtctttcacaaaaggcgcctccaaaaccaccaggtccttcacatcctcgggccgcgcgcgacccacggccaaaaccgccccgccgcctaaggagtggcccgaaaggatcacttgtcttctgtcgatcatcccttcgtacgcattgtcggctttgtcgtcaaaaatcttatccataacgaaatcaatgtcttcgatcctcggatctatccagcggttcagatcggccaaggcggtctctaaatcctcagatccttgggaccgaatgacctcgttaagaaacgtcctatccgcaaacaccgtctttccggtcgacagtttgctgaaaaatgcgtgatggggatggtccaaagacatgaccacatacccacgggacgccagttcgcgaaataaagtttcgttggacgtgcccacgccgaaagcgccgtgagaaaagagaaagaggggatgggcgccctgcctcatcttctccggatggtacacgtggacggggatttccctttcctttccctccgtggccatgtccgggtaggcggtttcgtgtttgtaatacactgtgtctacgcgaaccgcctcggatcccgtcggtgccggcgcgggaagcacgggaaagaccaccctgaaagtcatgcacaagacgaggccgatttccaagacaatcgccacgggcttggcccgccttttcggaaatttccgccttacagtaaacagaagcaataaaattgaggcgatcagagccaaggtccaaactgtcataagacgctccttcatgtaaaaatcgcgataaaatggcggcaaaatcgtcaaacgttccgcctccgaaaaagagaatattaagaaagaaaacaagggctaagggcgcaaccgctccttatcccatggttcgcggggctttatttgctcaaatagctgcagtacacgagggccacggcgatggtcaccaaaggatagatccacgtggccaacaggctcggcgccgcttgctcccgagagaagacggagaatgcgtccaccagcccgtgggcgacgatggcgggccaaagacttttcgaacgatagacgaccatggtcaagataaatccccaggcgacggcaaagatcacttgaataaaggtctccggagccaattgcccggtaagtaaatttacaatgtggccaatgccgaaggtaattgacgaaataatgatggcctttcgatcgtcgtatcgcgagagcatggccgaaaacagcagaccgcgaaaaataaattcttccacgtagccgataaggagcatggtcgaaacggccacaagctgattccacccggagtagaccggttccacgcccccccacagattgccggtggccaaaaaccacatgggaataaaatacaaataccgcttgccatccttcggaaacggccgcaacccgattttctctgccaggtgatttcttttgacaaaaagcgtaaggatcagggcgacgatcaaaagctcgcccaccaaccataggctgtcgtctccgaaagcttccctgagcggcgcggtgacggcgcagtaaatgacgatccacaacagagcgaaatacaagtcatttttcgcgtaaagcttgttcattggccttcctttcccgagtattttttattgacaaaaccatccactcaccgcgtataaacatagcggccttcctcatcaagtggaagcaggtgaaagccgtcgcagcgaaaggcggcgaaggttttttcttcgaaggattccatggcgagaaggtgcgccgccagttggccgcggagttttttgcaggtggcggagggggcgcgctttttcatactcggatccatgtaaaattccacgtcgatccaccgggccacttgctttttgtcgatacgctcggaaaattctttggaggccaaattgtagatacagcaatcggccagtttgtcggtgaagtttttcttctgcaagcttttcaatgacgcgccatccacattcaggcttttggtgaaatccagccgatagggattgatgggcgcatcgggggcgatgggccgtaaagggcggaaagaatccgcaccctgtcccgtgcaaatggcgagaggaggatctcccgatccatttggcgaaaggcgaggccccgataggtgtccgccgccgctttcgccgtgggaagcgccgccttttgggtggcgtcgtagatgattcgcgcctgctccccgctcagttgcagttgcgccgccagcgcttccaggctcatgcgttgcaaggcgcccagaatttttttcgccgcctcgtccaaagcgggcagttgatcgccgagggcaaagtccatttctttgctcggcgaaagaatgatgatgcttttcatcggacacctttcctttacaagtcttccacgtccacggttcttatgcctgcttcctcgaccatggcggcaaagacgccttttcccttcaccagccgcccggtgaaggtgccgtcgtagatttctttcacgccgcaggaggggctgcgggactgaaggatcgcgagttccgccccggcatcttttatttttttcagcgccgcccgggcgcctgtgcgaaattccgcatccacggagcggccgcttttttgccgcaccacgccgcctacgatttccgcgggatccctcggcgtgggcatgccgcccatgacttcggggcagacggcgaccacagtgtggccctttacatagtcacgcagcttgtttgattcgttgtttccgccgttgtatttgcagttttcgccaagcaaacaggcgctcacgccaataatcatcttcgctccctttctgcgtattttttcttcattcgttctttatctattcatatcctattggcccggcccttacgcccttttttttcgaatccgacagggcgagggaaatttactttttcggaaatgaatgaaatttacagacacgcttcgcctaatgtattgcaatcagtaagacatcgaattacaatataggcaatgggaggtgtcatcatatgaaagattccacagtaagcgcacgcgttgaaaataatataaaaaatgaggcggaggatattctgaagcagctcggagttcccgtctctgtcgtcattaattccttgtaccgccagatcatttatcgtcacggcatcccattccccttaactgttccgtcagaaccgaaaacaatggataccatgtcggatgcggcgctcgacgaaatgcttgaacgcagctatgcacaatcggtccgcggcgaaggcagacccatcggggatgtgttcgatgaacttgaaaagggcctgcaaaagtgaacaactatgaaatcatccttacgccggacgtggaagcggaccttcgcgggatcaaagattatatagccgagactctgcaggtgcccgaggtcgccttaaattacatccgatctctgcgcaaagaaatggaaagactttcctacatggcagacagcatggcaccagtggaacgtgaaccgtggcacgcgaggggtgtacgtaagatcactttcaaaaatttctatatctactaccgaccggacgccgcctccggaaaggtttatgttttgaatctaatctatgcaagacgcgatcaactcaaggctctgaaaaatatggacctctatgaaagataaaaagcagttctctaccggggagctgcttttttcgattgccggcgtgttatattacgctgacatcaatcttccaaaatcggaatgttccgctttttcaaatcggccaggtttttctcgtggtctttttcgtccacgtaggcgacgccgggaaggtaaagggcggcgttcaggccctcttcccgaaggcccaaaagggtttcgcgaacgcagtattcgctggcgaagccggctacaaggatgtcgcctgtgacgaaatctttcagcacgtcgccggcagcgttggtccccaaacaaccggagtattcttccacgtcgtcgcaacggccttttttaaagatgtttttgtcattgggccgggcgtcttctcgcgacagggtgtaaaagccttggtagagaccggcgccttcggtattttctacgcagtgcacgggccaaatgccgccgtttttttcgaaactaccgttggtggggctgtgccaatccgccgtgtagaccacggccatgtccgggttgctctcgatcaattccacgagatgcttcaatgcctcatcgctccccttgcaggccaaagagcccgaaataaaatccacctgtgcatccacaataatcaatgttttcatgcttcgccccttctacatattgtcctttacggccacggccaccatgtgggcctcggcccgcacgtcccccgccgcttccatgaccatgtccaccaccactttccgctcgccgatttccttcgccgtggcggtaatggtgacggggctttccatgggcacgggctttttaaagtcgatggcaagatgggccgtaatgaagcggccgatgaccgtgtcctttataagctcgaggcccttgtcccgatgcttgaaataggccgcggaggccgtgccgtggcagtcgaagagcatggcgatcatgccgccgaagagatttttcggcacgccaccggtgtatgccttccccggcgtaaaggtgcagatgcacttctccccgtcgggataggattttaagtgcaagccctcgtcgtttttcgggccgcatccccaacaatgttgaaatcgctcgccgtaggtttcctgaatcgccaatttatccataatacgctccttatctttgcaagtttatttgctttatcaacttatttttaccccttcgccgaagattccatcgcctttgccgccaaataaaagaggggcgccgcggccaattgggcggccacggaaacggcgatcatcaaccccaaattcacgtcgtagaggctgcctaaaagccagctgcccataaaccaaaagacgccgaaggcgcattcgaaaatgccgtagcccgtggcgcgggcggatttgtccaccatggtggccacggcagctttcaagacggattcctgggcgcccatgcccacgccccaaagggcgacgccgagaagcaaaaggggcagggactcagcgtaaaagacgagaatggcgaagggcgatgccgccaccgtggccgcgaccaatgccccgacgccttttttgtcgaagagatggccgaaaatgacggccgctgccgcatccaccaacatggctcccgcgtaaatcaggggcagggtgccggtggtgacgagaccgccgtaatggcccatgtgcttggtgatgtgcattaaaatcagggcgtagtccataaagccgaaggcgaagaggctgatccccgccatataaatcttaaaggcccgcttcagcttcaggggctcgtagactgtctttcccccttcgaattcttccggattcggaaattttcttttcgtcacgaggagcaaaaccaaggtcatggccccgggcacggccaagacggcgaaggccgcggaataaagctcggccttgggcagtcccgactttgcgctcatgacggcaaagaggagcaccggccccagaaaggccccgatttgatccagcacctcctgaatggcgaagctccttccggccccttcccgactggcggcaaaagacataatcgtatccttcgccggcttcttaatggccttgcccatgcgctgaataatcaaaagcgccgaggcggccacccagccgtgctcgcccacgagcgccagagccggcaccgcgagaatgtccagcgcatagcccccgatgaccatgggccaatactttcccgtcctgtccgtgatggcgccgaagacgtagcgcatggcgtagcccaccagttccccgaggcccgagacgaagccgatggtggcggcggaggccccgaggaaggagagataggccccccgcatgctggcggccccttcgtgggtcatgtccgaaaataaactgaccatgccgaacatgaggataaaggtcatggccggcgagagcgtgcgactttttttcacgatcatcttcctttctcatttcatcatagaccaaggatcggcaccaaacaaggcgacgggaaaaaagtgcggcaattcagcggattttacattttatgatgaatcttctataatcaaatgggggtacttatgacacattttttactcggcatcaacattatttttcccatcttcttcgttcttttcgtgggctacggcgccaaagaaaagggctttttagacgaggccttcgtaaagaaagccacctggatcgtcttctacctggccctgcccttgaagcttttcgataatatgcgcaccgccaccattcgcaccctcgacgtgccctatgtggtctatattcttttaggcatctccattatcttcttcggcacatggtttttcgcccgcctttttattaaagacccgaaaaaactctcttccttcgttcactgcgcctttcgctccaatttcgtttacgtgggctttcccattttagacgccctctttaccacgccctcggcggaacacgtgatgatcatcatcgccttcggcctcaccctctacaatatttacgccatttttctactcacctactacagcgaagatcccgatgcgaaagtgcgccccgccgccatcgccttgaaggtgttgaaaaaccccatgatcatcggcatcttaacgggccttctcttcaactttctacatattcccgtctacaaaggcctcaccgacggcatgaacctcctcgcccgcctgtccacgcccctgtctctgctgcttatcggcgcaagcctggacttctcgtccctgaaagacgacctgggcctcatctttgcagccgcatccattcgcaccgtcctcgcaccccttgccctcgtgcccctggggatcttgatgggcatgggcaaagtggaactgggcgtcgcctacgtcttttggtccaccccctgcgccattaactgctttatcttcgcccgggaaatgggctccgactaccaactggcctcgaaaatcattacggcgagcttcctcctcgccatcgtcacctaccccatcggcatcggcgcacttcagctcatcggcatcttataaatacgccacacaaaaggccccttgatttttcaaggcgccttcttttttttccgtttcacggctcttttcaaatttacatttgccgcacaaaaaaacgagcccgaaggctcgtatcgtggaaggaatcggtggggcggcggcggaatttaaagactttcccaaaagccccaccactcggcccaattatttttggccatagtaccgggacaaatcttgcgagaggcgtcgaagtggcgcaccacgtgatctttcgggatgcgataaaaagccataagctcctttaccaagctgcgggcataggccaaggcagccttgcggtcgatgccttgattgatgcaaatctccacgccgatggaattgcgattggtgatgccgtgctttccgtggccgtcgccgcaatgccaggcggcgtacgcgtcttcgatgatttgcaccacgcccgcatcgtcgacgaaataatgggcgctggccttgcgattgccgccggagaaatagcgaaaatgggccatggcatcggcaccggcggcgggattgcccgtgtcgtggaccacaatgtaggcgatgcgcgcgccgtttctcgacgaaaaattatagtgaatcaactgtttgtttagaatcatagatcctccttaaatgcttcatggcacgagactttgtgttggccaccgtttgataggaaatccccaggcgggcggagatttccgaaagagacaaatggcagaagaaatataaactcaccaccgcccgctctcgatggggcagatcattgacgatttgatgcaacgcctccgcccgctccaggagaataaaatcctcctccgtgtccgccacgtcggcgacaaggccttccatttccgtggtaaggggaacggtggcctcctttacactgcgctttaaatcgtccataaggaaataagagagacgcttcctgtaaaaaagatgaaaaggcacgccccgatcgggatcgaaatcctccagggcatctaataaaatcagattcgcctctccgtataaattatccggatctgtcgcataaggctgaatgcgacggatcgtggcccgagtgatgggcgcgagatccacgagcaattgggccaaagcctcgggatcccgagatttggcacgagcgatcatttggctttccatagagactcctttcacgatgaagttgaacaaatgtttcgtttttctttttattttaccacaggataaacatatgttcaatgtggggaggttataagggcgagatgttatctcgcccttataaccgggaagaatgaggatattattttcctttttgtgtcttgcgttttattttttctttcgtgattcttgaatgcaaagcaaacgtaaagaattcaagttacttctttcgcttaaaaaatattcttacgtggctttgagacccggggaagggcctagggcgttgcgatttcatgacctatcccgacaagcgcagcgtgtcgtaggaaggtcagatgcagtcttacaccgtttcggggaggcgaagccttcacgaagcggatgtatagttgtacgccctctggcccttccccggggccccatccccctccaccctaacgctttttagatgtgcgaagccctacgggcttcgatttgtattgggctgtgtcacctacgaaagaaagtgagttgggatattttaggttagtggttagtaattcaattgaagtttttgataggcatctattagcttgactttgcaatgcataggccatataatttcttaaaaggaggctcatcatgtcaaagacaactactttcagcgttcgcatggataaacaagtgaaacaagacagcgagcagatttttcaagagcttggaatgaatttaacaacagccattaatgtttttttgcgtcaagcagtccgcacagggggctttccatttgaagtaaaattggaacaacccaataaaacaactatgcaggcaatacaagaagcaaatttaatggcagctgatcccgataccgtttactattccgacgtagaagaagccctagcagagttaaataaatgaagcgagaaatcagctggaccaggcaatttaaaaaagactataagctcgccaagaagcgtggactacccattgatgaactgaatcaagtcatcagattgttagcggaaggtcatccactacctgaaaagcaccgtgatcacgctctttctaataattgggcggggcaccgtgagtgtcacgtacggccaaactggctactcatttacatggacgatagcaaacacttaatcctaaccttgactcgaaccggatcacattccgatctattcgagaaataaatcaaaactttaaatcatctgcacatctacttttgttgctttccttctatacgatctgtcacgccccaactcacaacgtccgtatcgcgacgcagcccaatacaaatcaaatgccgtcaggcatttgcactgctaaaaggcgtttgtgggtggatggggatggggccccggggaaggggcagagggcgaatcgcaacgccctagccccttccccgggtctcagagccgtaaaagaatcaatttctaagcaagaaagtaacttgaatccattacgtcaactacgcaatttaaatcgggtcacggcgggattttccctgcccccgggtctaaaagccatgaaagaatggaattgtgaattaaggaaagagggatcacggatcacaagggatgtgccattggaaggcaatagcaaacggtatgcgagagaatatctaagtgcaatcaacaaaacaaaatcgacttttcgcaaaactgtgtttttttgcaatgaaatgagggaccaaagcggtccctctttcattgcattttgctttcgattgtgtggctcaaggcggcgatggtctcggtgagctgatcgagtttttcttccatgcggaggatgaagtagctggccacgacaatgggaaagccggtatttgcgatgagggagaggatttcatcgagggtcatgggcggcctctttaggcttgaaagagggtggacgtggtgacggtggtgagttcgcctttttccacggcggtgaatttgcccttggcgcggaagacgccggaatcgatgatggcttgggcaccgactttggcggcgttggaatccaggccttctttcgggtcggtgatgcgcagggtggcggatttttggccttcgtcaacgaaggtgaatgtcaggtatttcttttccatggtttacctccttagttgatacgctcattggtgatgacttcggcgtaggtcattttttgattggtgaggccgtcgatggcttgagcggcttttttcatcgcttcgttatcggcatcggggaccaggccggagtaggtgttggcacggcggcgggttttgcctgcgctgtcggtatccaggtagacgacgcgcagggatttgtttttgtcggacatttgtacctccttgagatagtgtagggattgcggacggaagggacagcgcccggggcggggctttactcccttcacctattagatagaaattcgcggggaattttacctacggtttcggaaggaaagggagaattttttctcgggcacttgccccttcacctattacatagaaatcggcggggaattttacctacggtttcggaaggaaagggagaattttttctcgggcacttgccccttcacctattacatagaaatcggcggggaattttacctacggcgaagggattttatttttttattcttaccttttttctttcccttattctttttcttcgccttccgctttttctttatcatcttctgcttccttttctctttctccggtgaccttgtaattttttcttttgcgcgatttaagaggtgaaggatggctctgcctagctttatttcgaatttattcaggcaagtttccacgcttaattccacgctcgctaaagaccaccctttccgctgaatgatgtagagcaccagaaggcacaagagcaccaccgccgccatgacacacgcaggaaccattaattgctttaattttttctttgacatatttttcctcctattattactatttactaatcgagcccggtgattttatattccgtcaccgcttccggggattctgtgtttagatccactttttaatccctgaaggtatagacgctttttgtggcgaaaaaatctttttttcgattttttaatagtgtttagaagtttcgtgccaccgaattttcaggctcatagtctatatgtcagaatcagaagtttttttattttccccacacaggtatttaaaacaaaaaaaagagcccacgcggggctctttggtattcgtattctgtggttttgttatggtgttatgtagcatcttagaaaatttgggcacaaaaaaagaaccccgaagggtcctttttttagttaaccgaataacttattgaactggatcaattttttcttcggtcttaaccttaccgtctgtctttgcttgagcagctgcttcattgaaagccttgatagctttgttgagagcatctttagccttttgaacgtcttctgctttaagttgatcagtcttgagttctgtaaactctttcttcagatcttctacttttttcttttcagcagcaacgttagcatcggtaagagctaaagcatctttgtaatcttctttagctgccggtacttttgcaacttctttgttgaaatcatctaaagctttttgttgtgcttttttcatgtcttcaactacagtttttaccggttcccaagcagttccggtatttacttcgatgtcatagatttcaatgtcttcttttgcagtgaaaggtttgactttgaaacgaacttcatctttaccggcctttgctgcaggcagtttttctaaccaaactttaagagcatttgcttcgtcattgttcagtttaactaagtcatagaaacgaccggagccaagatggaagaatttgtttaatgtgtcaatcttaacaagagttctgccatggtctacttcgttcagaatgtctacaagtgcaatgttaccaactttttggttcttttggttgccgtaaacaacttcttttacattgcctttcaggccgcccttgtattctttaggcattacagatacgatttctaatctgtcagtgtcagtagcgttaccgttcttggtgttgttagttacggtacggaattggattaaagcgccttccttaagttgacccttgatgaacaggtcatattcggatcctaattgaagtccggctctattaccatattcgtctacaacgaatacatttctaccgtcgatttcttcaaccttaacgataggatatttgtcggtatcgctgtgtttaatcttaagttcaacgttgataccgcgtgctgcgtttacagtgtactcaacaacgttaagttttgcatccttgtagttgaagggataagcttcgcggtagcttgcaacgttcttcataacttcggcaccatcggtgttttcgaaggtgatgtcatatttagaagttgcttcgtttcttacacgcaaaagttcagcgtggttgttgtctttttgaactgcgttgaatacaactacagtcgcttcgttgtaaccttcaattgcatgaggttgagaagtttcatgagcaggtctgccgtcaattttgttataaccggcatagacattgaagaaccagttggaagcacttacgtttccaaggatacggattgcttcgtctacgtctttaacttccgtcagttggttggagcgaacgtcagctacgaagtagcgggtgtccttcgtcaggcgaagatcaactctttcacctaaagttgttccgtttacaggaacgtagctattgttgtaacgttctgcaccggtttcgttaaccggtctacgaccaaagtggcctagttggaaagtaatggatgtcggatcgctgttggtgtagttaatcttagcagctgctccgtttacatggccggtttgagcttctacgcctgtgacgcgagtttctacagtagcgtcagcaacatctgcccaacgtgcgttgtcgccgttccagccattaataccgatagccaggtattccgggttaccgagttctaatacgtgagtagcttcacctttttcgttggtaataacgcgcattaaggaaccgtagtagaattcagggttaccaattgcgcttgcagtagtaattctgtatccgccgggaagttgtctttcgttggcgtttacatcgttacttgtgcgatagtcataaagaacgaaggtggtgttcggggtgatcttagccgttttagctttgtcaccttggtttaacgtgatttcgccgttcttaatttgagacaggatacccatggtttcagcagcaggcatcttcttgatgtatttcagtttatacattgcgttgtagatcatggtgaaagcatcttcacgcactgcagggtcgttagaatttttcacgtctacgtcttcaagaatacccatttctgctgcccaagccatccattgacgaggccaatctttgttggctttgtcgtgcatgtctttggtgagatctgttttggctaaggtaaccaacatttttgccaattcggcgtaggttacgttgttagccggtttgaaagttttgtccggataaccgatcaggaaagccagctcattcgcaggggacttttcagtagaacctacagtaatgaatccgttagcccagtgcttgttgtcaacatcagagtagggtttgaaagtgccggcgattttgtttgccaggttttctctaccaatagcgtacacgagaagtttactaacttctgcacgttgaatgtttttgtcaagtgccagatcgttgtttttgggatcttcgttgactttacgtccttcaacgtatccgttgtcttgcagccattggatctttgcttttttacctgtgattttaggaacaactttttcagttgccttgggagcttctttagcttcctttttttcagcaggttttgccgcaaagacggagctgaatgtgccaagtaccatgactagtgcgagtacaaggctaagaaatttcttgttcatcttgtctttcgacctccttatgaattttcagattcttccaggcatattcctgtgaatcttacatcattataccattgagcggcccttgcttcaagcattgaagtaaagtcgctccatgtcatgagaatgccatatactttcggattctcaatgtagcttcattatacacgagtcccgcagggttttaaattacagttctatgacaggggtttattttttattgttttgtaacttttccagggcgaggatggcgcaggcggcttcgtccacggtggtgttttttacgatgtggtgggcggcggcttgatagatgggttttctttccctataaagttttcttagggtttcgatgccgccttttgagagggggcggccgtcggtggccagctcttccagtgggcgggtgatccagtagagggtgcctgtggcctttaaggcggcggtgttttcgggatcgaggaggcttccgccgccggtggcgatgacgacggcttcttcccccgcggcttggatgacggcccccttttcgtaggcgcggaaggctttttcgccttgttgttcgaagattttggggatgtcgccgtgttttttgatgatttcggtatcgatgtcgatgcatggtatgccgagtttttcggcgacggcttcggcgacggaggttttgcccacgccgggcatgccgatgatgacgatgttttttgtcattggttttctcctattttttcaaagagggcgatttctttttgccgctcgcaccacagatcgaggatttcaattgcggcggcggcttcgagcaccacggggatgcggcacacgagggcggtgtcgtggcggccttggatttgtatttcggtgtttttcccctctcgatcgacggtgtgttgttttttgccgatggagggggtgggcttgacggcgacggtgatttccatggcttctcccgtggtgatgccgcttaaggttccgccggcgcgattggttgtggtgtggatgtggccgttttcttctatataggggtcgttgttttggctgccttttaatcgggcggctgcatctcccgccccgaaggccacgctttttacggcgccgacgctataaagggcctgggccagagcgctttgggcggagttttctcgggggccgccgagtcctgccggcacgcctgtaatgcttagctttaccatgccgccgaggctgtctttttcttctttggcttgtgctaatgctttttgttgacgcgcggggtcttgttctcccccgatttctgttatttctgatgtgatagatatgttttgtgtctcgagaaagcccgctgcgatggcgcctgcggcgacgaggggggcggtgaggcggccgcttcggtagcctccgcctcgggggtcgtcggcgccgaaggtttttatgtgggcggtgtagtcgccatggccggggcggtagggcaggttgtcgtagtcttcgctttttgtgtctttgttggggatccagatggccagcgggtcgcctgtggttttgcctttgtaggtgccggagaggatttcccagggatcgggctctttgcggggggtggcgtaggggccttcgggtctgcggcgggcgagggcgcgatcgatggcggcttcgcccacggggatgtggggcggcatgccggtgataagggcgccgacgcctttgccgtggctttcgccgaagagggtgatgtggatgttttttcccatggtgttcctttctgtttctattttttgttttctgctttgtgtgcgccgatgagggggagtttttctacggcggcgtagaagccgagccagcttttgtttgcggcctcggggtttttcagggtgatggggccttctgaggtgcaggcggcggcgaaggcggcgaaggcgatgcggtgatcgccgaaggtgtctacggtggcggggcgaatttttcccggggcgacgatgagtgtgtcttccgtggctgttgtgtttatacccaggacgcggagcatggcgacggtggcggcgatgcggtcggtttctttggtgcggaggcggcggatgcctgtaaaggtggcgccgtgttttgtggcgaggacggcgagggccatgaggaggtcgggggtgtgggtgaggtccacgggcttgtgtgctttgatggattggatgtgttggtgaatttttgtgtcgccttggagactatgggtggggaggttttcaaggcttattttgctgcccatggcgttggcgacgatgaaggcggcggcgtggctatagtcgccttctatttcggggcttgtggcgtggatttcgccttttttgacgataaaggcatcgtgtttttcgtctacggcgatgccggcttcggttatgagggcggcggtcatgtggatgtaggggcgggagacggggtgtttcacggtgagggtggcgccttgtttttgtgtggcggcggcgaggagggcgcctgtggcgaattggccggtggtttcggcgctgatttctgcgcgttcaaaggcgaggcggccttttgttttgatgggccaggggcctgtgacgtttacgccgttttctttcaggaagcggatgccttcatccatggggcgggcggcgaggcttttgcctgcggtgaaggtgacggaatccgccagggccggggcgaggatgagggcgatgcgcagggtggtggcgctttcgtttacgtggatatggacgggggcggtgatgtgtttcggtatcggggcgatggttatgtgatgttcgttttttgtatttgtgatggttatggtggcgcccagggattttatgagattgatggtgtcctcgatgtcctttgaaatttcagagagatgcacttctcccccacggggcgccagggcggcgagaattatttttctgtgggctagggatttggagggcgggaggaacagggatccctcccgaggccctccccggaatgtgtggagcatgggtttttcctttttctttttgttctttctgttcttttgtcttcgcgactaagggcactatcaccctgtttgtcgctttccttttttcttccgcttcttttttgtcatcgatttcagagcacttacactttgtgtttcgaaaccccatttttgtcttactataattatatcttcgcgattcttcccgggggagggaaaaagggcgtttgtttgtgatggttgattttttaattgcttagcgaacggagtttcgtggtgctttctacttcgcttaaaatatgttcttttatggctctgaaacccggggaaggggctagggcgttgcgattcgccctctgccccttccccggggccccatccccatccacccacaaacgcct

SEQ ID NO: 39 - DNA, 58809 bp, Peptoniphilus rachelemmaiella
  source 1..58809: mol_type = genomic DNA
ttgcaatcaatggtaatcaggcgtctttcttctgaaacaccggtgacctcgacatcttggattcctaaaagtaatgtggtaatattgttttgcacttgtttgcccccctttattattttgtggtgatttaattttaggtgattaggaaaacaagtgctatctttttgcacaaaaatatccattaaggaggttactccccaatggatattatagagccttttttcatgcccgaaaattcaatttcaactatggtataatgggaagaactgtgaattaaaggagtaagcatggaagaaaaatttcaacaattaatcgatcgtgtgaaagacattcacggcggtcaaacctacgtcatcaccacccacggatgccaaatgaacgaacacgattcggaaaaaataaaaacattattaaataccatgggctttaaagagatcgatgaggaagaagatgcggatttagcgatcatcaacacctgttccgttcgccacagcgcggaagacaaagtcatcgggcatatcgggcgcttaaagcacataaaaaagaaaaataaagacttgaaagtagccgtctgcggctgcatgatgcagcgaaaagaatccagagataatgtgctgaacacgtttaatcacgtggatatcgtcttcggcacgaacaacatctaccgcttgcctcagctgattttacaaagcgacgacaaaaaaaacgccgtggtggatattgacgaaagctatacgaatttcgacaatcaaatttattcccgaacgtcgggaaatgccgcttacgtgaatatcgtctacggttgcaataatttctgtacctactgcatcgtgccctacacccgcggccgcgaggtctccagagagcccgaagatattttagacgaaattaaaaatctcgtagcggacggggtcaacgaagtaacccttttgggtcaaaatgtgaactcctacggaaaaaacttaaaggaaaaaatcacatttgccgagcttctgcgcatggtgcacgacgtggaggggatcgagcgcatccactttaccacatcccacccgaaggatatgtccgatgatttaattgcctgctacagggatctgccgaagctcgcaaattacctccaccttcccgtgcaatccggttcgaatcgcgtgttgaagatgatgaaccgtcactacaccagggaagattactttacattgatcgacaaagtgcgcgccgttcgtccggacatttccctttccacggatattatggtgggttttcccggcgagacggaagaagatttcgaagatacgttggatttagtgaagcgggtaaaatacgacaatgccttcacctttatctactccagacgggaaggcacccgcgccgatcaaatggaaaatcaaataccgaaggaagtgaaggacgcccggtttcagcgccttttagatgcggtttatgccattcaacgggaaaagtatgaagccctgcacggcacggtgcaagaggtgctttttgaatcggcgagtaaaaacgatccgacgaaaatgagcggccgaaccgccggatttaaattggtccacgcgccctacgatgccgcatctatcggcaagatggtgccggtcaagatcacgggaggcaatacattctctttagaaggagaaattgttcatggaaagcagtgaatttgaaaaattaacgccggccatgcgccactacgttgaaacaaaaaataaaaaccccgatgcctttttattttatcgcctcggggatttttacgagctcttttttaaggatgccatcgtcgtttctgatctgctggatttaacgcttacgaaaaaaagcggcggactggatgaaaaaattcccatgtgcggcgtgccctatcgcgtggccaatcaatatgtgaagcgcttggtaaaaatgggctattccgtgagcatttgcgatcaggtggaagacccgaaactagccaagggcctggttaagagagaaattaccaaggtcgtcactcccgggacgtttattgacgaagatgaaggggatgaaacccgcattctgaccagcatcgcccaagagggaaagatcgtagagttggcacattgcgattatccggcgggaaaagtatatatggatcgaaaagtctgctgggacaagcgggaaatcgaaagctttctcgaaaaacagttttctctttaccgcccggcggaaattctctacagccatactttctcaaataaggcgacgattcgaaaactggcgaagcgctacgatgtcttaaaaagcagcgaagtgtctcgcgagcacagagaaattttggcgtcctatgaagagctgaatcggagcatcgattacgacagccttgccctcgccaatcttctcgattatttggaggcgacccagtatcatcaacagacccacctccatatctccgcacgagaggatcacgatgcggccatggacctctcagagacgaccattcgaaatttagagcttgtaaacaataatcatgacaatcaaaaggaacactccctctacgccatcttggatcactgcaagacgagaatgggaagtcgctacttgcgcacgtctattttgcgtcctttaatggatgaaaaaacattaaatgaacgctacgatcgcatcgattcccttcacgacgatcgaattttattcgacgatttgcaggagcagctgtcgggaatctacgacatcgaccgcctgtccatttacattgccaatgaaaccatgacgccaaaacagattgagcgactcgtaaagagtttggaggcggtgcagctgattgttcggcttcttaagaaggcagagaacaaagcgctacttaaaatttttgacggtgtggatcttatggaagacatctcggatcagttgcgggaaatttttatcgacgaacttccggcaaattatcgggagcagcgcttcattgctcatggcgtggacgaggagctggatcgacttttcgctctttctgaaagcggcaagcaatggattttgcagctggaagaaaaggagcgggaagccagcggcattaagaatctgcggattaagtacaataaaatactgggttactttttcgaggtgtcgaaatcctatgtggatcaagcgccggagtattttatacgaaaacaaaccctcgtgggaagcgaacgatttttcaccgaagagctgaaaaatagggaagaggaaatcctccacggcaaagagcgcgcactcgatcgccaattggagcttttggaggccattcaaaagcgcatcgcatcaaaactctccgccattcaacacttgtccgaagccatacagaaactggatgtggcctgtgccctggcagaggtggcggagcgttacaattaccgtcgcccccgctttaacgacggcggcgtactctttattaaagacggacgccatcccgtagtggagcgcaccatcgaagagccctatattcccaacgacacctacttagacgacgagaaagttcttcttcagattatcaccgggcccaatatggcaggtaaatccacctacatgcgccaagtggctttgattcagattatggctcaaatcggctcatttgtcccggcggaagaggcgaatctgcccatggtggatcaaatctttacgcggatcggcgcctccgattacctgacgcggggtcagtctacttttatggtcgagatgacggaggtggcggaaattttgcgcctcgccacggcgcgttccctgattctcttcgacgaagtggggaggggcaccagcacctacgacggcctttccatcgcctggtccattatcgaatatatttataaagacgttcgcgcgaagaccctttttgccacccactatttcgagctcacggaactggaaaatcgctacgacggcattttaaatgtgaccgtggccacggaagaggtagacgacgaaatccgattcttaagaaaaattatcgtcggccaaagcaattactccttcggtatcgacgtagcgaagcttgctggcgtaaaagaagaagtcatcgagcgggcgcgaaatgttctcgatcatttggaatccgacggtcggggcaaagccgtagaatctgtaggaaacgaaatcgtcgtcgccgacaacggaccggatcccttgcgggaaaaaatccgctccatcgacattaatcaaacgacgcctctagaagccctcatgcttctcgagtccttaaaggaggatgccgatgcgtgaaatttatgcattaagcgatcagaccatttctcaaatcgccgccggtgaaattatcgaaaatcccgcctccatcattaaggagctggtcgaaaatgccatcgacgcaaatgccgatcgaatcagcattcgtctgtcggataatcttttagacgaaattcgcatcgccgacaatggcgacggcatcgaaaaaagccagattaccaaggcattttcccgccacgccacatcgaagctccgcaccatctccgatttggatatgatcacgagcttaggctttcgcggcgaggccttggcgagtatcgcccatatcagccaaatggaatgcgtaaccaagaccgccaatagcgacttcgcctatcgattcactgtggaaaaaggtgtcgtatcccgaggggagcccgtgggcgctcctgtaggcacgacgatgatcgtgcgggatattttttacaacacgccggtgaggaaaaagtttttaaacactacgacaaaagaaattcgccgcatcgtcgaagtggtggaactattggctctgagccatcaggacgtctccatccacctgtcccgcaatcaaaagaccctgctgcattcgaaagtttccgacgacaagatcaatcatatctattccattctcggcaaggacattgcgaaaaatctcctgcctatttccttcgatacggaatcctacaaaatcgagggctttatcggcaataacttgcttcaccgtgccacgccggatcgtgagtttttattcgtaaacggccgcggcgtcaagagcaacgacatcgcccgagccattcgaaaagtgtaccgttctttaattcctttgaaccattacccggtctatgttctttacattaccattgatcccatattaatcgatgtgaacattcacccgcaaaagcaaaccattcgactgtctaatgaaaatcaactgacgacgattttgcagcgtttggtggaagagaaacttctgcctaagcgggagatcccttcgatcgatgccctaaatgaaaatactaaagaaggggaagcgcaggtaccggaaaaaacaatctttgagctgagcagagaacggaagatcgagagagaaaagccgaaaacaccgacttttgatttttctgatctcgcgcctcttgcggcggaagacagaagaacgtacggggataaaacagagcctttgctcccggaacccttcgccgatacatcagcaatcaatgtggatatggcgccggaaaaagcgaggccgctggatgtgagcctctaccaatttttagccgtggtgttcaaaacctatgtcctgtttgaaaacaaaagggatcaccgcgtccttatggtagatcaacacgcggcccacgaacgaatcctttacgagcgctacagcaaacaaattcgcgaccgcgccgtagcgacacaactcttgcttgcacccttgaccattcacttaagtcccgaggaaatgcacgccgtaaatacccacatcgccgattacgaacagctgggcatttttcccgaagtcttcggcgagcaggacatcgtgatccgggaggtcccggagcatttattaatcgacgattttcggcaattctttttggactccattcatctactggacgagggcgtcaatgtgaaggagcagaacatttataaaatcatgcgcctcgcctgcagaagcgccattaaagccggagataggatttccgaagaagaagcttatgctcttctcgaggaattaaacgacgcggatacgccctttacttgtccgcacgggcggcccaccatgattcacgtggaaaagcgcgccttcgaaaaactgtttttaagggagggactatgaagcctttgattttaattaccgggcccacgggttcggggaaatcggatctttccgtggccctcgcaaaaaaacttcaaacggaaattatttccgcggattccgtccaggtctaccgcggttttactatcggtagcggaaaaatcatgcctcgggagacggtgggcatcatccatcatctaatcgacataaaagagcccgaggaattttattccgccgccgatttttacgaggccgccgcgccgattttcgaagatctatggcaaaggggaaaaatacccatcgtctgcggaggaacggccctttacattcacagcttgatttacgatttgaatttttctgaaaaaccctcttccgaaagtcggaatcagcttaatcgcctttatgaaaaacatggcctgagctacatggtggatttgttgaaagaaaaagacgtgaccatggcggaggctgtggatctaaacaatccccgccgggtgattcgcgcccttgagcggatcgaatccggccacgtggaaacagagcaacttcggaaaaaacgcaaaggcatcgatcctctgtatatcgttttggattgggcgcgggaggacctctatacgcgcattaaccgccgcgtgctgaaaatggtggatgccggactctttgatgaggtggatgagctctataaggcctatggtagtggtgtaaagcccatgggatccatcggctacaaagaagtagtgaagtatttaaaaggggagtgggataaggccaccgccatcgaaaaaatccagcagcattccagaaattttgccaagcggcaaatgacctggtttcgcaaggaagaagacgcggtgttcattcccatgtctgaactaacgaaagatgcggcacttgagaagattttagaactggagagagaaaaatatggtagagattgcggatttaaaggcgattgaagggagccttcaagaacctttcgctgtccttgacgaaatatgtctgtttaatcaagaaaaagtattaaaggccctgcagtccgtgcgcttggcgtcgacagatttcaactgggcgacgggatacggctacggcgacgtaggcagagaaaaggtggaggccgtttacgccgccctttttcgtacggaagatgcattggtgcggcccaatatggtatccggcacccacgccattgccctggccattaaagccctcacgaaagcgggagataccatcgcctccgtgtccggctctccctacgacaccttgcataaagtccttggcaccgcaggggatgcgccggggaatttaagatcccgcggcatcgactacagagagcttcccttaaaagacggcgccatggattacgaggccataagcgattttgtatcccatgacgcggatctcgtgatcatgcagcgctccaccggctattccaatcgacgggcctttaccgtcgatgaaattaagcgggcggtggaagaaataagaaagagctatgacggcattatttttctagacaattgctacggagaatttacggaaaaaatcgagcccacggaaatcggcgtcgatgtcatggcgggctccctcattaaaaatcccggcggcggcctgagcctttccggcggctacgtagtgggaagtgaagagaacatcgaacgggtggcggcggacctgacggcgcccggaataggcaaggaatgcggtctttccttcgggcaaacccgaaacaccttaatgggcctgtttctcgcgcctcatcgcgtggcacagtgtattaaaggcgccatgcttttcgccaaaaccttcgagaccatgggctatgactgcgttcccgcggccacagacccgagaagcgacatcgtacaatccatcgccttagagacgccggagaatctgattcgcttttgccgcgccatccaggccgcatcgccggtggattcccacgtcacgccttatccctgggacatgcccggctacgaagatcaggtgattatggcggcgggcggctttatcgaaggcagcagcattgaattgtccgccgacgggcctatgcgcccgccttaccgcgtgtatttccaaggcggccttacttacgaacacattaagctcgccctgattcaggtgctccaagcactagaagaagcataaaaaaaccccgagaacttccgatggaggggaagctcggggtcattttttattacgaataaacggcgagtaagcgcttagattccaattcagttaaaggattgataaatttcttatttacttctaactcaaattcaatacaattatgattatttaattcaagaccatgatcttttctagatttttttccttccgactttgtagatattatttcttttcccctaaataaatctagaaaagaaatagcatttgatgcattatctttaacgtaaattccatattctccatcatccggaatagtaaactttacctcatcttctgggctttctaccctcttttttataggagcaccataatcattatagccccagccagcgttaatgtcttcggcaggcaaaatacctacttctaaatcgtttccttttaaagactttaacttaatgactacgatatcaccttttttccacttttctctagcaaaagtagctacactttcttttaacaagcggatttgaaaatccgtagatccttttgtatctctagattctactaaaaaattcttgcttgaaaagcattttgcatcgttgctttttttcgcagccattaccacattcggattaaaaactaatgcaaaaagcaaaagtgctattgaaaatttttttatattcttcatttaatttcctcctatgcctttatgacactgttcacactcaaacttatcaaaatcaaatagtgtataaatacatgtatttagtttgtttgcaatttcaattgccactgaaattgtagcttgagcctctccacgttccaaaagactaatgtattgtcttgttacacttaactcataggctaattcttgttgagttaatcctttttctttcctaacttgttttattctatttcccaaagtattttgaacctacctatctaacattctcaatttaaccttaatatagcatattcctttttatgatgcaattatatttgcaaaattattagaatttatcaaagtcctcttgtatagctacttaccaacacttgaactcgtttttcgaatcggcatcatagccctgtaataaacatcccccggcgtagccgggggatgtttattcatgctaaagcgcacaacaaaaaggagcctagttttcactagactccccaatggttgacatagaaccaaaaaaatccccgagatcttccgatgaatgggaagctcggggatttttgtattacgaatagatcgaaagcaggcgctgaaattctagaatatctgtgtagcccttttttgtgccggagcctaagttgtagccatgctttttgagccttatatcgcggcataagagctgcagctcatggggcgagggcagttgaccaaaggtatacacggggacaccttctttgacagattccaccataaagtccgtaatgattaaatcgtagggcaattgcgtcaattgattcatgtcgatgcggtagccgtcgtacaattcggcatgaattaaattcgacgatcccttgttgattaagtggaccagcgattcgccgtagaaggcgtcgttttgacagaccaccagtgccttaaggggttcgcgtccgtaaaaaagctgggaaagaagatccggccacaaactgtaaaaagccaaagtcaattcgtcgattcggtaatcgccgaactccggaaactctgaaacaaattctttaaaaatagccgtgacctcggtgtggagctcgggatttgccaaagaaacataggcgagaagataggtcgatctcttgaggaaaaactcctttttcttaaaattagacaggcggtaggtaaagtaagccgccaaggaacgatacaatccgtcgcgatcctctaattgcaaatgaaattgatccaaaaagccgggtaaacgggactcaaaaaaggcttcgcagcgtttaatggattgcagccgttcgtctaaaagatccgtatcgtcgaagagcatgggattttcttccgcgtaaaagatagataagacgctgattagaagatccacggtggaatccacttgttgcttcggcataacatccttcgccaaatcattgatgacgctgtccgtggccagtccttttgccttggcgactaaatcatcgcggaaattctccgtatggatcggatgcccattaagcaaacggaaaaaagagacggcaatcgctactttaatgtaaatgtgttgcgcacagggaaggggagaagtggagataattatacatgcgttgggcgaatgtttctacgacatcttcccgtatcgttccggtaaagggccagtctctgggatgcaacatggtctccataaacatgttcacgtaaaatttctgaatctcctcttcctcgccttgcagtttgaaatcagaataggaaaaagtgaggtcataaacgtcgggcaatagctcgttaaactgttgtacgtggcggtaaatagaggtctcgctgaagcccaattcaaaagcgagatcgttttttttaatattaggttcaaaaaaagagttgagaagaatcttatagagcaaagattcgcgaagcagcaattttttcatgccgatcaggccaaaattcgaacggaattgcacgtagagcatggtgccgctatagtaaaaatcggcgtaatccttgaacttttcctctataatctgaacatagttgcgcatcgtctttttggtgacgccgatgacgacggccagatcagccaattgaatccatttattttgcgctttataaagaatggtcagaagatccattaaattcttttcctggtttaaaattaacataaagccccctgtttaaagagatcctagtcgtatttattcattataatataaggtttaatatacgaaaagccgtaaaaatcagctaaaagaaaacctgccgccgagtcggacccgacagcaggtttatttaaaacaggcgataaaggccgatgacgcggcccaacaccttgagatcatccacgtaaataggcgccatggtgctgttttccggctggagacggaagcggtgattttcttcatcgcgatagaaggtcttgatggtggcctcgtcttcaatgagggccaggataatttccccctcattggcagaagaagtgggctcgattaacacttgatcgccgtccaaaatgccggcttcaatcatgctctcgccctgaacggttaagaagaagagattgcggtcttttacaaaatccgtagctaaaggcaccgtatccgaaatattttccgaggctaaaataggcaacccggcggcgacgcggccgagaatgggaatgtcggtggttttctttttcgcagaaagaaaatcgtcgtcttgatgaatcacctcgatggcccgattaatggtggcgccgcggcgaatataatttttcagctccagcttttctaaattggagtgaacagtcgaggtgcttttaatattgcaaccattgcagatttcacgaatagaaggggggtagccgttggaatcgataaagcgtttaatgtaaaagagaatttccatttcccttttttcaagatcttcatacatagtttataatcgctccttttcatggggtacatttagtatatcagagacgaacaaacatttcaaacatacattcaaaaaagcttgacaggaaacaattgttcagatacaattggaacaaacgtacgaacatagattcaaacatacgaccgaacatttagttcatggaggcatgaaatgaataaacgaaaaaccatgaatcatccctgtcaaataaaaaaacgcccttctgcacgggccattaaaaatagaaagcgtcttcgcttgctgcccatcattctacttttgttaatgagcattatgggaaccaccgttccgaagagcatgggaagctatcaggtgcgggaagcctattgtgtgaagccgggagataccctgtggtccatcgcatcgtcttacgccgacgagggagacgatttgcgcctcatgatccatcgcatggtagaagccaacgacttagcggacaactgcaccctgaagcccggagagacgatttacgtcgtgttggatgagcgcgaattgggaaattaattgccccttaaggatgcatgcaaattaagttccgcacattcagagacgatgctttcgacgaatccctaggatataaaagcaaatggtaaaaggaccgatcttttgccatttgcttttttcgtgcatttcttgtgaatgaaagaagacagaagaggcccgcataaaaggatggcgtattaaaccaacaaatatttagtcacaaaacataaattttgtgactaaagcaggctattcaaaacagaaggagcccgaagttcgctttaaggcatttaaagcggccacgtgatgtccctatgcatccctatgaattttcgatttaaaggctttaaatttgatgctgcgactttattttaagctaaggatggatcctttagtcagccttgattatactataaaatattcgcgtgcgtctgcctcagtatgatccgacaaactttcgccggcaatctttattcataaagagcctcgctttttaaatcaatcttacttctcgacattggccatcatgagatacttaacaaattttaaaacctcctctactttattgcagaggaggtttttgcttgactaatctcagttcaacgacgtattggcttatcgtttaatggatccggacaaggatgtcgtcgtttcttgaaattgacgccgtaggatcgaactagcgggctttttattcgtaaggcatatggatatgcccggctaataataaaaaccgctattcgttacctgtaggccatgaaaaaataagttctatatttcaaagaatcgttttgttaaaaaacgaggcaccgaaaatagatcgaatgttcgaacatatgattctcccaaaaagctacatcttttctttttttgcgtcctcaagcatcttttccacatcttcgatattggccagcgggttttggctcatggtgtggcgaatatcttccatattgacgtgggtgtagatttgcgtcgtggaaatggattcgtgaccgaggatttcctgaagggacttcaggtcttcgtcgccgaattgatacatcaaggtggccgccgtgtggcgcagtttatgcacggtgtattttttcgtatcgaatcccgcgttttttaaatgtttttccaacatatgctgaatggagcgattgctcatgcggcttttgcgcatacttaaaaagagggcttcctccacttccaagccttcggcctttcgttgcgccaagtaagcgtcgatggcgcgcttaaccgtgtcgtttaaatagaccagccgctccttggaacctttcccccaaatgcgcagggtgcggtctttgtttaggtcttccacatttaatgacgcgagctcgctaaggcgcaggccgcagtttaaaaatagggtggcgatggcgtagtcccggcggcgaaagatttctttctgcttaaaattttgaataaaatgcaaaagccgtacggcctcttccaatgttaagtagacgggaagagagcgttcgattttcggcatgtcgatattttccgtcgggtttttatccaagacatccactttgtaggtcaagtaatcgaaaaaagagcgcacggaagaaatttttcggaatttcgttcggctgctgttttgcctttcccgatccaagtaggaaatgtaggcgtaaacatcgcccttatcgatctgttctaaaagggccttatccaccccatcgatgtccacgtcgtctagggaatctacagcgaggccttcttttcgaacgcgcatatagcgcagaaactgccgtatgtcgtagtaatattctttaatcgtgccgtcgctgcgtcccttggcggcacgcaggtaatttaagtagtcgtccagtatattcgagcgaatcatgtctcacctcgtaactatcatagcaaagaaaacaagaaaaaacccgcccgtaggcaggtttttttatttggcgtattcgatggcgcgggtttcgcggatcacattgactttgatctgaccggggaaatcaagctgtgcttcgatttcgttggcgatgtttctagccgtggtcaccatgtgggcctcgtcgatttccttgggttttacgataatacgcaattcccgaccggcttgtacggcgtaggatttttcgatgccgtcgaaaccggtggcgatttcttccaattgttccaatcgtttaatgtagttttcgatggtttcacgtcgtgcaccgggtcgagccgcactaatggcgtcggccgcctggactaagacggattccagagaatcgaattccacgtcgccgtgatgggcttcgatgccgttgataacggcttcaggctccttgtagcgccgcgcaagttccacacctaattccacgtggggtccttccacttcgtggtcgatggattttcctaaatcgtggagcaatccggcacgtctcgccagtttcgaatcgataccgatttcttcggctaagtagccggcaattttcgatacttcaacggagtggcgcagacagttttgtccaaagctggtacggaatttcaaacggcccaagtacttcaccagttcagggtgaaggccgtgaacaccggcttcaaatgccgcttcctcgccgctttccttgataatatcatccacttcctgtctcgccttttccaccgtgtcttcgatgcgcgtcgggtggattctcccgtcaagaacgagtttttccagcgtcaggcgtgcaatttctcggcgaataggattaaaggaagagacgacgaccgcttccggcgtatcgtcgatgattaaatcgacgccggttaacgcttcgatggcgcgaatgtttcggccttctcgaccgataatgcggcctttcatctcgtcgttgggcaagttgaccacggagaccgtggactcggcaacctcgtcggcggcgatccgttgaatggcgtgtacgataacgtcttgggcgatttttttgctttcgtctttgacgtagcgttcgtattcacgaatcttcactgccgattcctgtgtcaactcattttccaattcgttgagaaggatttgcttggcttcttctttcgataagccggagatccgttgaatttcttcggactttttgtccaccaattcgtcgatcaaatcttccttctcttgaatacgtgcttgttgatcgaaaatttggctttcctttttttccaaggtagcacttttcgattgaagcaggtcttctttagaattcaaacgatcttcatagcgctgcagttcgatttttcgagcatcactttcctgttggaccgtatcccgaagcttgtgaatttcctctttcgcttggaataaaatatcgcgtttattgttttcggcttcacgttccgcatcaataatgatattcttcgctagttcttccgcatggttgagctttccttcagccaatgatttgcgtaaaaaataaccaatagctactccgaggattccaattaccaataatgcccctataaagggtactaaataggcgggcatatggaacacctccttatttaattttcatgattcagatggtataaaccacttgtttattatatcataatttgaatcttttgttttgctgatttatgtttgcaccattctttgcagtaaaaaaggaccgcaatgggcagtccctttgtgtcatgacgacgcttcggcctcggcaatgagctcgacgacgtcgcttgtgccgtttcgtatgtcgacgcgaaaggccttgtcacagatatttgtcaggtaatcgttgtgggtgaccatgataatttgtctggaaaataggcgggaacattccttcacgaattcccccatgttgaaaatgtagtcgtcgctgatgtgcttgcccggctcgtcgagaaaaaggggcccgtccattttcggctggtgattctccaaaaaggcgatgcgaagggccaggcttacaatatccactacgcccccgcctcggctcatttccggttttgtctttaccttatagtcgccgtaatcggattccacgaaaaactcggcgatgggaagcccgcgcttttcggagagatccacaataaatcgggagctgttttgcataatgtaggcgatggattgggtgacgatgtcttcgatttggtgtgtggcctgatttctcgagaagtcggctgctttttggaggagaaagactacgccgttgagctttttttcctccgcttccacttctttgatcgccactcgttttttttcaacctgttcgagaatggaatcgcgaatgccctcccgtcggctgacttcctttgaaaagcgttcaaagcgttggcaggcctcttcgtaggtcatgcctgttcctcgggcagaagtttttccgcctcgtcgagcaggcgaaggatttcggattccatgcgcttaatttcgtcttccaaagtgtccggatcgaatccaagggccttgatcttttcatttaattccttttcttcacgctccagctcttccattcgccactcggcgcgcttgcgcgtatccttggcctgttcgtagcgctgatttaattcgctgatccgttgttctaaattcatcctaatcctccaaactatgtctaatggcgtgtagggcatccccgtcgattggttgcttacataagggacaggtgccggctccggaaaggccgtttaaatacgcgtccatggcccgtttatctttatcgatgaaaccttcgatgtcaacggaaagtttttctttttccgtattgagacttttttgttccgctaaaaggactcgaagggatcgatccttttccaaggattcggtcatttccgtgctcaatttgtccagggcgtctaactgcttgaagcgtgccagaaaagcttcgcccatgtttatccgccggttcaattcagaataggcaagaaacagcgctcggtagtcgataagttgatcgaattttttttgcagatccatggcgtgaacggcatcaacgcccttggtcgaatccaaaagcttttcattgatcttggccgcgtttcgagccgatgcaagggaatggcacagtgggagcatggtgtcgtaagtgcttttataggaagccatgtcgcgaatcttctcctcaagcaatcccatgttttcataagtacgcaagaccgatgccgcctgttgccggttggcagcgttttgcttaaataaatccgagagcagccgctcccggccgtattgatttaccttattgtgcagggaatgaatgctttcctccaaagcatccagtacagcgtagcgatttgaaatttctttcgcctcacggcgtgccttttgtatagcgcaaagggtttcgctatacgcctttgccaattccactttttcgcgatggtcagacacagcaaaaagaatctcgtttaccttgtccctcacggcaatcttatcgtctaagtcagaaaaggccttgagtgactcttccgtctcctctaaatcgccttgaagcatctctcgtcgtatggaaatctgcttcttgtcccgaagggtatcgcgcatggtttcgtccaataaatcgacgcccaccatacgcccgatggcctgggccttgtaggcgtcggtttcctgcaagagaaagggcccgtccagttgatcggaaaagttcagaggcagagactttttatcatccaacatgactttttttatgccgatggcctcttcgatttctgccggcacatttttgccgaagccctcaaagatcaattcctcttcacccggttgacgcaaaatgtattgattcttcgaccggctgcgccgacgttccacttctaccttgttttggaagcgaatggtaacggcgacttccgtttccccttcccgtacaaactctacgccggaaggatcgttaaacatattccagcgcagggcacgcataatggcagtttttccgctgtcggaggggcctacaatgacattgacgcctttagaaagagagagctcggagtaaacgtgggattggaaattcacgagaataattttttcgatggaattcataccgtgcttctcctctcctgaacctgggcgatgcgcttcatggcctcttctttaatggcggggtccaatttttcgttggcggatatgtcggccaagaggtcaaaaaaattgatgcgatcgtaattgcccgaacgctcgatggattccttaaactcggccagttcctggcgcttaaatttgtgcatttcgatttccgagcggtccaatacttcagcacccggtagggcggatttcagctcccttacctcgatactcgcccggtctttttccacatcgataagaacaaacttcggccgtcgcttcaattcggtcatggaattggaaattcgcaccatggcgccggggttaagaaaggccttgccctccctttcaaccaacggaaagccgtcgtgcaagtgtccggacagggtaagatccgccttggtgtggataatatcgtcgatggtcgtgtgggaaaacatagcctttacttcaccggccattaaaaagccgtgcaccaagtgaatggcatagtccgcatcgggatctttttcctcgacgatataaagatgacggttttcctcccgatccaggccgtaaatatagggggagccgcttaattgcaccgtggtattttcgtcttttaagagaattttccggtggttaatcaaatgaatgatgcccaaggtgtccaagagccccatcatggtcctgggcaaggtgacggggttgtggccgtaaatatcgtgattgccgctaatggcgtagatgggcgcggagaatccctttaaaatgggaattatctcattcatgacggaaatagatacgtcgggacgatcgaataaatcgccgccgtgtagaatataatccacggattcttcccgtgccacggattgaatttcctgtaatttagttttaaccgtatggaaaaacgaatccgttcttgatttcggattcgtccctcgaatatgactatctgtgaagtacaggaatttcaacgactattcctcctcggaaggttcgccggccccactttcgttgacctgtttgttgcctaaattgtagtggatacgcactttttcatcgatttcagccaaaagatcgctattttcgctgagataggccttggaattttcccgaccttggccgagctttgcatcgccatagctaaaccaggagccggatttttccacaatgcccgcttcaacggcggcatccaggacggagcccactttggaaatgcccgtgccgtacatgatgtcgaattccgcttttttaaagggaggggccactttattttttaccacttttacacggacgcgattaccgataatgtcatcgccttttttcaggctgtcgatgcggcgaatatccatgcgaacggtggtaaagaatttaagagcccgaccgccggttgtggtttccggattgccgaacatgacgccgattttttcgcgcaattgattgatgaaaattacggaggctttggatttgctgatggcgccggttaattttctgagcccttggctcatgagacgggcctgaagccccatgtggctgtcccccatttcaccttcgatttcggctttgggcaccaatgccgccacggagtcaacgacgatgagatccacggcattgcttcgaaccaagctttctgtaatctcaagggcctgttctcccgtatccggttgggaaataattaagttttccgtgtcgacgcctaaatttttgctgtactggggatccagggcatgttccgcatcgataaaggccgccgtgccgccgagcttttgcgcttccgcgatcatgtgcagtgccagggtggtcttaccggaagattcgggaccgtaaatttcaatgatacggcctctgggaatgccgccgattcccaaggcgatgtcgagacttaaggagcctgtgggaatggattcgatgtttaaatttgcgttttcgcctagacgcataatggcgcctttgccgtattctttttcaattttcgcgatggcatcgtctaatgctttttttctactctcgtccattttcttctcctaactcatgtaataaaatccctgccaaaatgtattttgaactacgatattgaatcgtggtgcgatcgcctttgtacatgcggctttcttttaacacttcttcgccgtcttttcgaatggagtaaataaccgtacccacttcttttcccgtggccgattccggtccggcttctcccgtggtggccacacagtagcggctctttgtcttttcgtagagaccgcgactcatctccgaagccacagcttcagataccacggtatctttggaaattgtggcgggtttcacgcccaataacttttcttttacctcgtcgctataggtgatgtagctttcgtggagcacattgcttgcgccggcgacggaggtgatcatgtgggccatattgcccccggtgacggattcggcaaagctgatggtcaaattcttttttgtaagacaatctaccaaggtttcaaagacatcgctttcgccgtcgccgtaaataaactcggcgaataattcccgaagggcgcgaagggcttctgcgtattccttctcgataatttcggcttccccttcatcttccgcatgggcgatgacttttatttccacttcgccggtcttggcgaaggtgttgatttccacattttccgtttcgatcttcgcttcgcggaacatggactcacacttggattcaccgatattaaccaggcgcaaactggtgataaagtttttcccatgcaccggattaaggtaattggcgacaatgtcgtcggccatgggctcgaattctcgcgggggcccgggaagcataaagaattgcttgccctcgtagtccagcatacatcccggagccgtgcctttggcattgggaataacgacggcgccttccggaaattccgcctggcgcttgttgttttccgtaatatttttagaaaagctcatggatacattgcgaatatagtcccattgcttctcatcgaatatcaagggcaaatccaatgcgtgggccagggcctgcttcgtcatgtcatcctgggtcggcccgagtccgccgcaaagaaagataacattggatctttcaagggccgtctcgatggcgtcgcgaatggcttcatacttgtcccttaccgaggcgtgatactccacgtcgtagccggcatcggtgagctttcgcgacaaataggggccattggtatttaaaatggatccgatcagtatttccgttccgatggtgataatttctgctttcataggtgctcctatatattttctaaatccaagacacccttattcttcaccaagtagtccacgccgcttaataccgtgagcaggacagcgacatagaataatacgatgccgatggtcgtgggaatgggaggcgaaaataataaggcgattaaagatgccaattgcgtaatggttttaatcttaccgaaggggctagccgctatggtgatattatccgatgcggccaaaatgcgaaagcccgtaatggccaattctctggcgacgataataattacgccccatgcgggaatgactccttcttctaccagcataataaaggcggagatcgtaagcaccttatcggctaagggatcgagaaattttccgaaggtggtcactaaatgatacttccgcgccaaatgcccgtcgagaaaatccgtaaaggctgccacgcaaaagacgaaggaggccatgaggcgcgttgccggggtatttattaaaaacaagatgacgaagacaggcacaagaaataggcgcataatcgtcagtttatttgcaatgttcaatataatcaccacctaaatcatatgccgtcgactcggtaatttcaacttttataaagtcgccgacagctaaattttcatctgtgtaaatcgaaaccatgccgtcgatatccggcgcatctaaatagctcctaccgatggcgccttcttcggttatttctgtcaccaaaacttctaatgtgcggcccacttgtttttccatgaggcgctccgattgatccatttgcgccgccataaaggcatctacgcgggcttcctttacatcatcggccacttgatccgccatggcggcagccggcgtgccttcctcacgggaataggcaaacgccccggcacgctccagaggataatcttctaagaaatcaaggacttcttgaaaatcttcgtccgtctcgccgggaaagcccagtaaaaaggtggagcgaatggctatgtcaggcatggcgcttcgcaaacgggtaattaaggactcgatggcgcggcgatcggtctttcgattcatcccttttaatacgggatccgccacgtgctgaatgggaatgtcgatgtagggaaggattttcggattattcttcatttcatcgatgagggcatcgtcgaaatgatccgggtaggcgtaaaggattcgcacccaacgcaggccctcgatatctctcaatgcctttaacagatccaccaaggcgtatcttccgtaaaggtcgatgccgtagtctgtggagttttggccgataagaatgacctcgcgagtgcctctttcaactaagtggcgaatttcatctaatatatgctccatggtgcggctgcggttgtttccctttagaaagggaatgatgcagtaggcgcagcgattgttgcagccttctgaaatttttacgtattcggtaacggagacttcttccctgcgggcctcttcaatatagtcattttcaagggaagcggcaaaaatcggtttttcgtgattttccgcctgttcaatggcttcattgatggagcgaatatgccccggtcctaagatgccgtccgcttccgggatggattctaatagttcatcggggtagcgttgcgccagacagccggcgagaagcaaggtttccagtttgcccgattcctttagcttggccagatccagaatggtgtcgatggattcttcctttgccgcatcaataaaaccgcaagtattgacgacgattacctcggcatctgtcacctgatcggtaaacagaaaacgagattcgtctaagaccccgcgcatttgccctgaatcgatgtcgtttttggaacaccctaaagtaacgatggacacttttttcatatattctcctgatttttcttcatttcttcgatttgttcttttgtcatgagcagcttccgcggcttcgtaccctcgtttggcccgacaatgcccatttcttcgatttggtccacaatgcgtgcggccctggcatagcccacttttaatttccgctgaataaaggaaatggaagcctgttcttgagtcagtacgatatcgacggcgtcatacaagagaggatcttcatcggtgacggccatttggactttcttttccatggtatccagggcttcttcgtcgtattcagcagcttccgtatgattttttacgaattcaagcacattttccacttcttggtctgaaacaaaggccccttgaaggcgcttcggtttcgggaagcttgaaggataaaagagcatatccccttttcctaaaagtttttccgcgccggacatatctaaaatcgtgcgggaatcgatggaagaggacacggaaaaagcgatcctcgagggaatgttcgccttgatggttcccgtaatgacgtcaacagacgggcgctgggtcgcgagaattaaatggattcccgccgccctggccatttgtgccagtcgcgtaatatagtcttccacttcttttgccgccaccatcattaaatcgcttaactcgtcgacgacgatgacgactttcggcatggtcttttcccctgcggccttcattttttcgttgtagccggatacgtcccgtaccccggtttcggcaaacgccttgtagcgtttttccatttcgtccacggcccatgccaaggcaaaggccgccttcttcggatccgtgacgacgggaatcaaaagatggggaatgccgttgtaaatcccaagttccaccactttcggatcgatgagaattaagcgcacatcttccggtgccgatttgtacaaaatgcccattaaaatactgttaatacagacggatttccccgaacccgttgcgccggcgattaaaaggtggggcattttatcgatggatgaaacgatggcattgccgctaatatctttacctaatgtaaggggcaccgtggaatccaaggcgtcgaaaacattgctttcgatgatctcgcgaagattgacgctgtctttttccttattgggcacttcgatcccaatggcacttttccccggaatcggcgcttcaatgcggatgcccggactcgccaaggaaagactgagattatcgtgcagggagactatttttgaaatcttcacgccgggagaaggttccaattcgtaggatgtaatggtggggccgcggttaatggcgcgaacgcgacaatccacgttgaaattatccatgacttcctggataattgcggcatttttccgaatgtcctcgtcgccggccacaggtcctgcaccgggttttttcagtaattttatcggcggaaaatgatagaccgattcctgaacttccgtctgcatatctttcgcgaaggcttctttttccgtttcattcagggtttccgtgcgcttcggtttttcctcggcggacggtcgataatcgcgaatttctacgggctcggctgccttttgtttcggggattcaaattccttaaaggcctcggcgccggaggaaataactttctttgcttttttgtttttccctgtcggcttcttctcttctttcggctcggccttttctttttcaatgcgcagcttttctccggcctctttcttctcgcggaaatacgctgccattttttctttcatcatggtgcgccgcgctttcgacggtaggtgatagatcgtaaagaaggtgattaaaaccatgaccgtgatgcttcccacggtacccagaagaccgacaaataagcgggcgaagttttcacctaagaagcccggatccacataagggcccgtcaggtttaatcgcgcgttccagcttaaactcgggcgcgcggggtcgtaggtaattaaaattgccatgagaaaaacagtgatacccagggccaaaactttaaacttcgtctttacgtcccaatcggtgatgaaaaaaaggccgataacaaaaagcagggcacaaaaaacagggccgacttttccaaataagacaccgatgaccgaagaggtgagatctccgaatacgcccatttgctcgctataaaggctcaacatggaaaggatggccaaaatgattatgaagcccccgatcatgtaagccttttgttggctctgagcgacggtcttttttttcgtggtttttctttttcttggcaagggaatcctcatttcatcaaatatatgttcggatttattataacataatttacgtccctctacctaattttaacggaggcccgtgtggccgaatccaccttcgcctcgctcagttttcgagagttcatccaggctgtccacctgaatccagtcggctaccttgtaggccataaagaccatttgggcgatgcggtctccgtcttcgagggttaccgcttcatcggataaattcacaacgaggatgcccagttccccacggtagtcgctgtcgatggttcctatgccgttgattaatgtaatgccttttttcagggaaagaccacttctcgcccgaacttgcccttcgatgccctttggtatttcaaagtaaagccccgtagggatcatggcacgttccaagggttttagggttttcggcgcatctaaattggcgcgcaagtccatgccgcaggaaccttcggttttataggacggaaggggatgatgggatttattgactactttgaccttcatagaatctcctttttataaaaaaaaccgccgaagcggttttcgttttatttattgtctttatcgtcgaactttttttctccggagttttgtttccgttccggtttcggcaaaagtgcttttctggaaaggccgatcttcccccgctccagattcataactttaactttcaccttgtctccttctttcaggacatcatccactttggcgatgcgcttgtggtcgatgtttgaaatgtggagcagaccttcgcggccccagaggatcttaacaaaggcgccgaagtccacgactttcgtaaccgtgccttcgaagatttcgcccacttccaattcgtgaacgatgtcttcgatgattttcttcgccacgagggcgccgtcgtcgttggcaataatggatacgcggccgtcgtcatcgatttcgatttgtgcgccggtttgttccgtaatcttgtgaatgactttgccaccgctaccgatgacttcaccgattttatcgggatcgatttgaagcccggtaatcttcggtgcatagggagaaagttctgctctcggcgcttcaatggtgcccttcatatgggccaagagttccatgcgggcgtcgtgcgcttgtttcagtgcacgggagaggatttctctggatacgccgtcgattttaatgtccatttgaagggcggtaatgccttcggaggtgccggcgactttaaagtccatgtcgccgtagtggtcttccaggccttgaatatccgttaaaattacgggatcggctccgttgtcgataagacccatggcaataccggccacaggtgcgtgaatgggcacaccggcgtccattaatgccaaggtggatccgcaaatacttgcttgcgaggaagaaccgttggattccaaaatttcattgaccacgcgaatgtagtaggggaattcatcttccgtggggagcacgggaattaaggccctctcagctaagtttccgtggccgatttcgcggcgacccgggcttctcggcgggcgcgtttccccgacagaatacgaggggaaattgtagtgatggacgtagcgcttcgtgtattccggatccaaaccgtcgataatttgcccttccgttaaagccgccaaggtgacggatgtgagggcctgggtttgaccgcgagtaaagagggcgctgccgtggacgcgaggcaaaaggccgacttccgaagagagggggcgaatttcagtgaagcttctgccgtcacttcgttttctgtcgacgagaatttgttttctgaagatttcttgggtgaagtcttcaaaaatcgtattgacctgaacctctctgtaatcttctttttcttccaaatcggcgataagggcgtctttgatcttcgaaagtgcgtggccttgttccgttttatcggcgatccaaagggcttcttccactttgtcgtagacggcatcataaatggctttcttgtagtcttcgtcgatgacgaggcgttcgtattccatgttttctttgcccacttcgtcgacaatggagtcgataaaggcaactaattttttaatttcttcgtgggcatagaagatggcatcaagtacgtcgctttcttccagtaaatccacttccgcttccaccatcataatggcatcggcggtgccggaaacggcgagatttaagcgggaacgcttttgatcctccaccgaaggattcaggaccaattcaccgtcgatgtggcctacccgcacggatcccgtggggccttggaagggaatgtccgaaatggacagggcgacggaagatccgatcatggctaagatatccgtgggatagtcgggatcgtaactgagtacggtggccgtcacttgaatgctgtgatggtaatccgacggaaaaagagggcgaatgggccggtcgatgagtcgactcgttaaaatggcgttggtgccggggcgaccttctcttttgttaaagccgccggggattttacccgaggaataatatttttcttcgtaatcgcagcttaagggaagaaaatccgccccttcgcgagcctttgtcgatgccgtggccgttacgagaacgacgctttcgccttgtcttacccaacaggcaccgttggcctgcttggcgaccttcccgatctctatatgaagaggctcgttatttaacattgtcgtatatgttttatacatgtcactctcttttctctataaagaaagagcggtcgcccgctctttaaaatactgtcttaacctctgatttccaagcgttcgataagggatctgtaacgttccacatccttgttctttaaatagcggagaaggttccgtctcttaccgaccattttcaaaagacctctacgagagtggtggtcttttttatgttcctttaagtgttcgttcagcgtattaatggtgtaggttaaaattgctacttgaacttcgggagaaccggtgtctccttcttctctttgatacgctttgatgatttcttgtttcttttcttttgataacataatttcctcctaatttaaattcggtttgaccaagtaagcgtcgaggatcgacaaactgagccaaactaacaataccttgttattttaccattaaccggctactttgtaaattcttcttgatgaatttgttcttcaatgaacttcagatcccggtccatgcgcgcttttaattcttccacgctattgaaggcgatctccggtcggatgaaatccaaaagagctacgtccatgatttttccgtagagactctcgcctttgtagtcgtaaagataagtttccacttttatcccctgctccgcaaaggtgggattggtgccgatgttggtggcgccgtagtaaaattccccttcgacggtaacgctggtaagataaacgccgtatttcggcacgacatagttggcgttgtaaaggatatttgccgtgggaataccgatggtgcgacccagttgctttcctgggaccactttgcctcgaatggtaaatggccgcgtcaaaagggcttcggcgagtttaacatccccttcttttacggcggaccgaatgcgcgtactggatacggcttctccgtcgtaggtgacggctttttttacagccagatccagattatgggccttgcaaagcgcatccagggtattcacatcaccggaggccttaaagccgaagcggtaatcgtagccgaccaccacgcccttggccttcaagtgaccgactaaaaaatcgacgacgaaggcttccggactcagccgcatgatgcgctcgttaaattcaatttcataaattacatcgatgcccatttcacgaagaatgtcgtgtttttgtgaacgcgaggttaaaagttcttgggaaatgccgtcagtcatgttttttgtgtgggtcttaaacattaaaacggaagagaggcaatttaatttctttgccatcgctacgacttccttgattaatgtttggtgaccgctgtgcaatccatcgaaattacccagggcaatggtcgcctcacgggaaatttcagaatctaaatcgacttgaataacctccataaacacctcaaactaaaacttttttcatgcaaacattcgtcgtgccatcttcttcgttcacgatgcccaagccgataaacacatccccggcgtaaatgcggtaaaggggagatttttccacgggaaatgaaattcgcgaagacattccgttggtcatgggctttagccgctttttcggcaaatgaatcggcggaagatggtcgagaagccggtccatgggaagtaacaggctctttcgttcattgaggctcatggcctccaacgcctcgatggtataggcgctttcgacggtggcgtttcccacagacactcggcgaagatccgacatcgttaaaaaacactttgccgccacaccgatatcgtctaaaagggtgcggatatacgtgccggaggagacttcggccagaaggctgatctcctcgtcgtcttgttctaagcaagcaagcttcgtcaccgtaatgggccgcatttctctcggtacgcaaatgcctttgcgggcgtactcgtaaagctttttccccttgtacttcagagccgagtgcataggcggcagctgcagctgctctcccataaagccttgaagtacatcgtcgaaattctcgggaatcggcgattcgctcttggcatagatcacgcccgtcgtatctgccgtgtctgtgcgtatgcccctcaccgcccgtgcgacataggcttttttatcgtcggaaatatactccgccacctttgtcgcctttccgatgcagataggcaaaaggcccgtagccatgggatccaaagtccccgtgtgtccgacttgctttgtctcaaacaaacgacgcattttctgtacgacgtcgtgggaagtccaatcggcgggtttatccactaataaaatgccgttcatcgttgttgattttctattttttcccgcaccaaggattccaccttggccagaacattttccagcgaatccctttgcgatgcaccggaagcgcggatgtggccgccgccgccgaagacggaggcaaattccgtgcagtccaaataactttttgagcggaaagacagcttcacttcctcggccttttccttcaggaaaatggccatttcgacgccgtcgatgttacgcgccttttccacaatgccctcagtcgcatccttcggcgcgccggtaacatttgtatcttccaggcggcaaatcgcgatggagactttcccgtccgccataaatttcagattggagagcacacgagcgtgaagggccagtttttcctttgacatagactgatacaccgatcgcaccatgatgttgtgatcgcagccggcatcgtagagagcggctataatgcggtgggtgtctccggtgacgctgtcgtattgaaagctccccgtatccgtggacatggccgtgtaaagccccgtggccatagccggtgtgagctggatatccatggcctcaaagatccgaaaaagcacttctcccgtggaggtggctttcggcgagacatagtttaaatcggcgtaatgatcgttgctcatgtggtgatcgatattcaccgtgtaggccgcttttttaaagagcgcttcgccttcgggtccgaagcgatgaacgtcggaggaatctaaggcgattataagaggtaggggctcgtgaatgtcgtcgatggctacacgggctttcgtggagggcaagaaggtgaaatctgccggcacatcgtcgttggagatgtagatcacctttttatccatgcccattaaacagccccacatggcttctaagctgcccagattgtcgccgtcggggctcttgtgggaaaggatgccgacgacgttcgcatcttcaatttttttctttaattgatcggcgaataccttgatctcactcaccgcgatgctccgattccataaccttattaatggtttcttccaaggccatgcctttttcgatactctcgtcaagctccaaaatcaattccggcatggctcttaatttcaatcggctgcctaattccttcttcatgaagcctttggcactttcaaggccctccatggcatcttttttcgcctcatcgtcgccgaaaatggagatccccacggtggcgaaggaaagatcccgcgtcacagagacgaaggagacgctggtcaagggagggatccgaggatctttcaatttattttgaatgatgtcggagagttccctcttcacttcttctgagatacggtgaactcgtttatccttcataattaaatttccttcttaatttctttttcgatatagcattccaacaagtcgttgacttgaatgtcgttgaagttttcaaccataaggccaccttcgtagccttgggcgatttccttggcgtcatcttggaagcgtttcaaggaggagatggggccttcgtgaataatgacgtcgtcgcgcaggactttgacaaatgcttttcgtgcaatttttcccttgaggacgtaaataccggcgacgatgtcgttggaaggaagcttgaaggtttctcttacttcgcagcgtcccaagacttcttcggtaatttccggcgtcatcatgccgctaatagcatttttcacgtcgtttagaatatcgtaaatgacgcggtaggtgcgcacatccacttcttcttgcttggccagctcgatggcattaatgttcgggcgaacattgaagccgatgaccaaggcgttggatgcggaagccaggttaatgtcactttcattaatcccgccggtacccgagtgaatgatgttgacttgtacttcgtctacttcttcgttgtcgtttaatttcaacaaagattgagtcagggcttcaaccgtaccctttacatccgccttcacaaccaagttcagatccttaagctccccttctttaatcttgtcaaagaggttgttcaaggagactttgttcttagacgccagtttttcttctctttcgtgtgcgatgtttcgcgctgcgatttctcgtgcggtcttttcgccttgaacggcatagactgtatcccctgcattgggaacgccgtcgagacctaataccacaaccggagtcgcagggcctgccgtcttcaagcgtttcttcttgtcgtcggtcatggcgcgtatgtggccgtagcaggtgccgctgacgatgtagctgtcgccggttaaagtacctttttgcacgaggatcgtggccatggggcctttgcccttgtcgaggcgggcttccacaatggtgccgatggctaagcgatcgggattggccttcagctcaagcacttctgccacgagaagcaccatgtctaatagctcgggaatcccttccttcgtcttggcggatacttcgaccatgatggtgtcgccaccccaatcttcgcagaccaagccttcttcggtgagctcttggcgcacgcggtcgggattggcgccatcgcggtcgatcttattaatggcgacgataattggtacgcctgcagcctttgcgtggtgaatggcttccctcgtttgaggcatgacgccgtcatctgcagcgaccacgaggatggcgatgtccgtaatggaagcccctctggagcgcatggccgtgaaggcttcgtggcccggcgtatccaggaaagtaatgagcttaccgtttgcggatacttggtaagcaccgatgtgttgcgtaatgccgccggcttccgacgccgtaacatggctctttttaatgacgtccaaaatcgaggtcttcccgtggtcgacgtggcccataaccgtaacaaccggcggtctttcaaccaggctttcctcgggatcttcctgatccaaattgtagatttcttcgatgttcgaatccgattcggaaataaattcgatttcgatggcgagttcgtcggctaaaatttcaatgacatcccgatcgatggattcgttttgtgtcgccataacacctaaaccgattaacttcgttataacttgtgccaagctgatgccgactgtgtcagcaaattccttcaccgttaacggtgccttgatcttaatagccccgtccccctttacatcttcctttgccatacgctctttacgcttctgacttctcgactttttctttggcgctttcggcttctcaaaatcttgattacgtgcgccgctttgttcgttattacgcgatttttttgcttctttttgctttttcttcttacttttctttttatccgaatgttttccgcccgttccgtccatgaattgtttttcttcgtgaacgtcggtaacaggcgcactcttcgcaggctctttgcgtgtgggcgccggcatatcattcgctttttcttgtgccgctttcttatgagattccggtgccttgggctttacttcggctttttccggtttcttttctactttctgcggcttcttttcactctttacaggcgcatcttctttttcagacgacgcctccgcttttttctttttctccggtcgttcttctctttcgggctctttcttttccgctttttcttcgccgggctgttgtgcactttgcgcattttgcgccttacggataaagcttaaaagatccttctgctgctcttcagttaaagtactcatgtgacttttcacgtttatatttgcctgcgccagaatttccattaaatccttgctggccatgccaaattctttagcaaccgtataaactctcttgttggacatgagaacacctccttagtataaggggtctatagatctgaaagtgattgacggagcgattctattgcctcttcggacaagtctttacccaatgccttggcaatggcctttgatttaatcgccttatttaaacactttatatctttacaaacataagcgcctctgccgtttgcttttcctgtttcatctataaaaacctcttgttctttattttttacgattcttgtgagctcgtttttcggcttcgattcagaacacccgacgcatttgcgcaagggaactttcttctgcttgttcattgatgaatcctcttactcatcttactccacatcttccgcttcaacctcgctgtcatcggatgcctcttccggtgccttttgcgcatcttggaacaattccgataaatccatgcccgttaaaccgccgatactggcaaaattatctgcctcatgggcttcgggtttttcgtcggccggatcatcgttaataaccgactcttccgctacagaggtttgagtgttttcaaaatatgttttaaaatcttccgcatccatacccagggaatccaagtattcttcgaattgggtttcggattttatatcgattttccaattggttaacttcgccgctaatcgcgcgttttgtccttctttaccgatggccagagacagttgataatccggcaccaccaccatggccgatttttctcgctgattaatgaagacctcgacaacttttgacgggctcagcgcattgccgataaatgccgcaatgtccgattcccaaatgacgatatcgattttttcatcgtgcaattcgtcgacgatggtcttgacgcggctgcctttaaagccgacgcaggcacccaagggatccacttcatcgtccttactgaacacggcgatcttcgtgcggcttcccgcttctctcgcgatggagaaaatttctacgatgccgtcatgaatttcaggcacttccagctcaaagaggcggcgtaccaaattcggatggcttcttgagagcacgatttgcggccctttcggctgcttgttgacttccaagaccagcattttgtagcgatcgccttggcggtaggtttctccttgaatttgctccgatacgggcaaaatcgcttcggtctttcctaaatccacgaagacattgcctttggtgactctttgtacgtcgcaggtaatgatttcattttccctatcggcgtagtcgtcgtaaatgacttctcgctcggcgtctttaattcgctgaatcacgacttgtctcgccgtttgtgcggcaattcgaccgaatttttccggatcgattttttcgtagtaaacatcgccgatttcaagccttggattttctaatcgggcatcttctacggcaatttccgtgttttcgtcaaaaacttcatcgaccacttctttttcggcagccagggaaatttctcccgtgtcgcgattaatttcaacaatcacattttgcgatgtgccgaaattcttcttgtagctggacatcagtgccgtttccaatgcttcgataatgacttcttccggaatgcctttttcgctttctaattgcttcagagctaaaataaactcttcattcattgttttttctttgcctcctaaaattcaatgacctgtcgcattaatgagatggagtttgaatcaaaggtgacaattgttccatcttctgtgcggatagccacggtgtcatcgccgtaatccgctaaaatacctacatattctttttggtcgtttacttttttgtacaggtgaacctcgacctttttccccatattcctgcggtaatcatctttcgttcgaatgggccgatccaatcccggagattgaacctccagagtgtacttcccttcgaataaatccttgtcgtcgatcatgtctccaacagcccgggatatatcggcgcagtcgtcgatttgcaccccgtcgggatgatacaccgtgattatgatgcgcgacggatttttattggtgatgtcgacttccaccacttcatactctcgttcggtggccgctttttccgccgcctccgatacaatcgcgcgtacctgagaatgtttcaagaactcacctcccataaaaaactagagtggtggacccactctagttctactcgtctatcttttctttagtatatcacattttgccactatcgccaataagatccaacaggcttaactggttatctttcgggattccgtcgagggcgccgtgagcctttagggtttccacgacggttttcgacgcaccgcttcgtttaaccatgtcttctacggaaagaaaggcttgttcgttcatggccttgtagatttctttggccacggtgtgcccgattccctgaagggagctaatgggcaaaaggactttgccttcgtagacggaaaacttcgagtagtgggatgcgcctaaatggatgggctcgaattcaaagcctcgcgccatcatttccagtacaacttttaaaatgggaatttccgataattccgcttttgtcgcctcgtcatttccctcgatccattccacacgcttattgacggcatcaaagccttgaaccaaaatatcgccgtttagatccgaaagttttgtggtgaagtaagcggcatagaaagccagagggtagtgaaccttgtaccaagcaatgcgcaaactggtcataacataggccacagcgtgggcgcggggaaacatgtacttgatcttttcgcaactttcgaagtaccaactcggtacatccaaggtttttaacacgtccatgtatttttcaggaagaccccgccctttacgcacggcctccatagtatcgaaggccactttattttcggcaccggctacgatcaagtagttcataatatcttcccgcgtactgatgacttcggagatggtcgctttgtttgagtgaaccaggtcctgtgcattgcccgtccatacgtcggttccgtgggaaaggcctgaaatattcaccagctcgccgaaggtagagggcttcgtgtccataagcatgcgcacgacgaagtctgtgccgaactcgggaattcccaaggtgcctgttggtgacgagaacaaggactcgtcgacctttaaagcgtcggcggatgtaaacagactcataacgtcgggatcatccatgggaatgtcttccatggctacgccggttaaatcttccaacatgcgaagaatcgtaggtgcatcgtggccgagaatgtccagctttaatatattttcactaatggagtggtagtcgaagtgcgtagtgatgacattcttcttcttttcatccgccgggtactgaataggcgtgaagtgatgaatgtcctcatccttcggcaccaccataatgccgccggggtgttggccgcttgtgcgcttgactccttcgatgcccttggccagacgcaggatctccacgggatttttttgaatattattttcttcggtaaactttttgaccagcccgaaggcggtcttttccgccaaggtgccgatggtaccggcgcggaagacaaagccttcgccaaagtaatcttcgataaatttgtgggcggtaggctggtattcccctgcgaagtttaagtcgatgtcgggctctttatcgccgtaaaaacccaaaaagacttcgaatggaattttatggccttcgcgaatcaatggctcgccgcagaccgggcagtttttcatcggtaaatcgaatccggtgctcactttcccgtcgtcgataaattcgctgtgcttgcatttgccgcagacataatggggcatgaggggattgacttccgtaatgcccgtcatggtggcgacaaaggaagagcctacggagccccgtgagccgacgtaatagccgtcggcgttggatttttgcaccagctgctgggcgattttatacatgacggcatagccgtttccgataatactttccagctccgtgttcagacgatcttccacaattttcggtaggggatcgccgtagatttcccgcgcccgattaaaggcatcggccttgagatccacatcggcatttttaattttcggcgggtattttcccgaaggaatgggcggaaatacctcgatggcttctgcaatcttcttgggattgtcgatgacaatggcctcggcatcgtcgcctaaaaaagagaaggcgttaagcatctcttcggtggtcataaaataggccttaccatttgtaaaggggcggccacggaatttcgaatattccaaaatttccaagaactcggcatcttcagcattcatataccgaacgtccgacgaggcgacgacgggaatgtccaagcttttggctaattccattagatcgcggatcatggcttgtccgtcttcttcgcttcgcaacaggccgtcggcaaaggcccgctcgtagcgcgcaacgggcgccacttcaatataatccaaggtcgatgcgatgtgcttcagttcctcatgggaggcgccgcgcaggtaggcatcgattaattcaccctcttctcccccggatccgagaataaagtcctctttcgatttcataatttccgacttcagcattcgtgccgttctgaagaaatggtccatatgggaggcggaaattaaatggtacatggccataagaccttgtaggtttttcgggaaaatcgtgagcttggtcgggaaggttttttccggcgactcaggctttaagcggtttaaatcttcaggcttctccacgccgacatttgccgccaaagcctgaagctgaataaacaattccgccgtggcctctgcgtcgttcacggcgcggtgtgcaccctgcagattaatgccgaagcgctttgccaaggtacctaatttataatttttaacttgaatgtccaaagacctggccaaaagcagcgtgtcgatggtggcatagggcactttcccctttcgtctgaactcgataaatctggagtcgaaggaagcattgtgtgccactaaaatgctgtcgccgataaatgcttcaaagcgcggcagcaccacatcgatgggatcggcgtctgccaccatgtcgtttgtaatatgggtcaactccacgacccgcggcggaatcggttgcatgggattgacgaaggtggaaaagcgatccacgatgcggccgtcttgaattttcacggccccgatctcagtcacttcgtcgaaacgtggcgaaaagccggtggtctccaagtcgaaaaccacatagctacttccgtattgagcctcaccgggatttttaaagatgcactctccgtcgtcgaccacatcggcatccacgccgtagagaatgcgaatgtcgtgtttttttgccgcactcatggcatcgggatagccttgtaccacattgtcgtcggtaatggcaatggcctcgtggccccaggccttggcctgcttcgcaaattcgtcgatggtattggtgccgtccatattgctcattttcgtgtgaacgtgcagttcgatccgctttctttcgcttcgatcttcccgcttttgtgcggccgatggcttcatgtttcgcgccataatgctttctgtgcgatcgaagctgtcgaaatcatatttcccgtggatgcagacggtctttcccttggagaaggtgcgagcaaaagcttcggcttcctgatttttaacaaaggcctttaccttcgtgctgtccgttccgtcgtaaacggagaggataaagagggttttgtcgttttttacaggtcgttcgtcgaagtcaaaaaccgatcccataatggttaccatctcgccgacgcggcattgtgccagaggcgtcggcgcttcaaatttattttttccgtaatggtagacctcgtcgcccttatccctagcttttacaggaggggtttcgatttttataccgtcgcaaaagacggattcctcgctttcgatcatctcctctaaaaccttaaattcacattcccccgccgcacagtcgcattccagaaagtagtgtgtaccggtaaactcctccaatcgattttcgatttccatagactgaagggttttttccaccgtggcattggggacttttagggtgatgcggctttcattcatcgaaaaacatgccctctccagccaggcttccgacgaaataatcgatgtcttcagaaaatgaaagatctcatcttcagaatactccttcatctcccgcttcttctctaagtagtgcacttcgatggataaggttggataacacgccgtaagaagcgattcaaatgactcacgccaatctcctgcttcacaatccatctccaaggccataccggacttatcccgctgatagaccactttttttacgggcagagatttttctaaaataaaatccatcaggttacgctctgatggatggttgttttgttcgatcaccgatgatccctttctattaactcgattaaagcatctaagagtttcgactcttcgacggttttgacgatttcgccttttttgaagatcacgccgcggccgttgccgccggtaatgccgtaatccgcttctcgtgcctcaccggggccgttgacgcggcaacccataatggcgatttttccttcaaaatttaaagacttaaagcggtcttcagcggattcaaccaaatgaatcagatcgatttccgtgcggccgcaggtgggacaggcgacgatgtcgatgccttcctgccttaagcccagactttgaaggatggccttggcgcagtacacttcatcgacgggatcccctgttaaggagacgcgcatggtatcgccaatgccttcctcaagtaaggtgcccattcctaccgaggatttcacgatgccgttcatgccggcgccggcttcggtaatgccaagatgaagtggatagtcgctgacgcgggaaaattcccgatagctttcgatggactgacgcacgtccgatgattttaaggagaccttaatggcgtcgaaaccgaatttttccagtgtggcgatttcatcgagggccgattccacgatggacttcggattcacgcccctgtatttttcaataaaagcaggcttcacggaaccggaattgacgccgatacgaatggagacgttccgcgtctttgccgcttccgccacttcttttgccttccatgcctcgccgatgtttcccggattgatacgcaggccgtggacgccgtgttccaaggcataaagggccaagcgatggtcgaattgaatgtcggcaataaccggaatggaaatagcgggaataattcggtccaaagcctcggcatcttccgaatcgttgaccgccacgcgaataatgtcgcaaccggctttttccaatcgatgaatttgatcaatggtggaaacagcatcctttgttttcgtattggtcatggactgaatgcttaccggagcaccgccgccgattaatacgtctccaacagcaatctgtctcgtatgtttagacaagttcatcgtcctttctagtgtataaatcgcgcaatatcgccgaaaatcgtcacataaatcataagggcaaaaagcaaaacgaagctcgccacggaaaggccttgctcgattcgttcatttaagggcttgccgatgattccctcgatcaaaaggaacacgagttttccgccgtcgagggcgggaatgggaagcaggttcataaagcccaggttcgccgaaatataagccgtaataaaaagaagagaggcaaaaccgtatttcgccgaatcgccgatgactttcaccacgccgacgggaccggacaaattatcgacgctcaggcttcccgtaaataatttacctaaaacatcgaagatcgttacgatgaccttacccgtcattttaaatccgtcgccaatggcctttgccggatgcttttcgctggtaggctgaatgccaacaatggagcggccgtctttttccgcgggcttcacggaaaaagagaggtcttttccttggcgatgaatggtgatggttatgggccttttagaagcggccacggtctttgaaaaatgatcccagtcttcaatgggctttccgtcaatggagcgaatctcatcccctttttgaattccggctgtagccgccggagagtcgggaagcaccttgtctacggttcgcgtgggatagccggtaattaagagaaaaagggaaaaggtgacgatggccaagacaaaattcatgccggcgccgcttacaataactgccgcgcgctttagaaggcttgcgttattaaacgaccgcgggtcatccgatgccgactcctccccttccatggccacatagccgccgatgggcagggcccgcaggctgtattgtgtttcttctgtctcttttttataaattaaaggtcccatgccgatagcgtactcattgacgcgaatacccacggcctttgcaacggcaaaatgaccgaattcgtgtatggcgataatcagtacaaagacaaatagtgaaccgaaaagggtcgtcatataacctcctaaagtgcgaagtggtacaaaatataaaccatgggaatgattaagagcatgctgtcgaagcgatccataaatccgccatggcccggtaacaagttcccgaagtctttgatccccgtggcgcgtttgattttcgatgcaaataaatcgccgagctgtgacgttaccgaagccagtccgataaacagaccgtgaaggaaagtaaccggaatgtcggcaaccgcacagtagatcaatccgcaggtcaacgcgccgataacgccgcccaatgcgccttccacagttttattcggactgatggaaggacagagcttgtgttttccgaaggccattcccgttaaataagcgaaggtatccgtggcaatggctatgacaaagaccaagtacaggtaatttgtcttatccaatgacatgatggggaacaaaaaggtgggcacataaatcaggattaaggctgaaatgcccatgtcctcgatggtaaattgatcttcttttaaataatagagaatgagaaaaaataagggaatggtgaaggcgacaaaccaaggccaaccgcgctcaaaaaccacaaagtgaaaggcacaggccaagagaatgtagtgttcgggaatttccttccccttgtgtttaaaggcgccgatcaattcgtggcacagcaccaatgaaaaaaacagcacggcaaagtgcagcacacgtctgccgaaaaagagaatcgtccctaagagggcgagtagcaccaaacccgttatcgttcgttttaacagattactcaattatacgcctccaaatcgccggtccctggtctgataatcgtcgatggcggtctttaatgtgtcctccgtgaaatccggccacaaaatatccgaaaaccaaaattccgcgtaggccatttgccaaagcataaaattgctgacccgaagttcgccgctggggcgaatcaataaatctaaaggcggttgatttttcgtgtaaagttccctttcgaatgcgtctttgtcgatggcttcaacggcaatttcgccgtctttcaccttttgcgccaatgcctttgcggcacgaaggatttcatcttgaccgccgtagtttaagccaatatttaatgtcagcgccttattggattcggtgcgccgtacggcacctaagaccatggcctgcgtcttttctcccaaagccgaggtgtctcccataatattaagcttcacgccgttttcgtccaattcgtcgatgtattgatcgatgaaggtgcgcaaaagaaacattaagttggatacttcctgctccggtcgcttccagttttcagttgaaaaagcgtagagggaaaggtagggaatatttaatttgtagcaggccctcaccacttctaatacccgctttacgccctctttatgaccgtaggttcggggcaaattacgttttttggcccaacggccgttgccgtccatgatgatgcccaggtgtttgggcatggcttttttatcagaatccataatttctcctaaaaagaaagaacccccgcaggggccctattcagttgtatttaaatttcaagtaattcgtcttccttagctttcgcaatggcgtcgatagttttgaccgcatcgtcgatgaccttttgaatttcttcttcataatttttttggtcatcttcggaaatttccttgttcttttccgctttcttaatcaaatcgatggcttcgcgacgaatgttgcgaatggcaactttcgattgttcggcatcttttcctacgactttaatcatgtccttgcgtcgctcttccgtcaaagcgggaatcgccaggcgaatcaattttccgtcgttggagggatttaatccaagatccgactttaagatttccttttcaatggcgggaatcaacgaagcatcccacggttgaatggtcaacagacgcgcttccggcgccgtaatgccggcaacttgatttaaaggcgtttgttggccgtaggcttccacggtaatccggtctaaaagagagggattggcgcggccggcacgaatggatgccaattcttcttttaagcgatcggcagtcttttgcgttttgctttgaacctcttttttaatttcgctaaaatccatacaaaatcctccttattccacacgggtccctaaatccttgcccatggccgcatcgtagagattgctcgattcatcgatgccgaaaacaagtaagggaatttcattatccatgcatagagaagtggctgtcgaatccataatttttaaattcttgcttaaaatatcgaaataagacaaattgtcgaatttcacggcgtcttcgaagaggttggggtcggaatcgtaaatgccgtcgacgccttttttcgccagcagaatcacttcggcgtcgatttccgctgcgcgaagggctgccgtggtgtccgtggaaaaatagggattgccgatgccgccggagaaaatgaccacacggcctttttccaagtggcgaatggcgcggcgacgaatgtagggctctgccacctgcttcatttcgatggccgtcatgacgcgggtcaccacgtccatttgctcaagggcatcttgaagggccaatgcattcatcaccgtgcccagcatgcccatgtaatcggatgtggctcggtccatgtccttgctgtcgcgaccacgccagaaattgccgccgccgacgacgatgcaggtttccacaccggcttcggagatgcgtttaatttccgaggcgaagagcctgactacggaagaatcgatgccgattcctttttctcccgctatggcttccccactgagttttaagacgatcctcttatatttaggttccatggtccggttccgattattgcatttgctttgcgacttcttctgcaaagtcttcggagcgcttttccatgccttcgccgacttcatagcggcagaagcgacggatgctgatcttttcgccgatttttgcaatcagttcggttaataattcgttaacggttttgtcgccgtctttaatgaagggttgatccaaaaggacgatttctttgtagaatttttccaaacggccttcgaccattttttctacaatgtgttccggtttaccttcgtttaacgcttgttcctttaatacggcacgttcgtgttccaattcagcttggggcacttcgtcgcgagtaacgtatttcggattgacggcagcaacttgcatggccatgtcgcgaacgaattctctgaagtcttcgtttttagcgacaaagtcggtttcggagttgacttcgatgagtacgccgatgcggttgttatggatgtagctttcgacaatcccttcagcggcgatgcgatcgctcttcttagcgaccttgcttaagccttgttctctgaggatgtcggcagcgcggtcgatgtcaccgttggattcctttaatgcctttttgcagtccatcatgcctgcgccggatttgtctcttaattcttttaccatttttgcagaaatttccattttacagtcccctttcagatacgagttgcactctcaaaaaaataagagttctaatggctcagaactcttataatttaccttattcttgttcttttgtatcagccgcactatccgtgatttgattttcagtttcttcagatgcttcaggcgcttccgcaacttcagcttcttcttcagcgtggtcttgagccccttgtttaccttcgagaacggcattggccatggtttccgtaattaattttacggcacggatggcgtcgtcgttgccggggatggggaaatccaattcatcgggatcgcagttggtatcgagaataccgacgatgggaataccgagcttttgagcttctttaacggcgatattttctttcttcggatcaacgacatacatgacatcgggcagaccgttcatgtctttaatgccgcctaagaatttttcaagacgttctctttcgtgacgaaggccgataacttccttcttgggaagaacgtcgaagcgtccgtctgtttccatttcttctaaatctttcagacgggcaattcttttctttatggtttgatagttggtgagaagaccgcctaaccaacgttggttaatgtagaattctccgcaacgctttgcttctttttcgatggcatcttgcgcttgctttttggtaccgacaaataatacttgtccgccgttttgagcggtttcacgaacgaaatcgtaggcttcttcgattttgcccacggttttttgtaaatcgataatgtaaataccgttacgttcggtgaagatgtatttcttcatcttcgggttccatcttctggtttggtgaccaaagtgtacgccggcttcaagcaggctcttcatagatactacagacatattacctccaaatgttttttcctccacagcccgtatgagcaaggcgacccttaggcaacggccaagttctgaggctgtgtgcgtatttgtaccgatatattataacatggccatcaaggccttgcaagaatcctttcctctttttcgccgccggattgtggtatactttcagaaaaaggaggaactatgaatttcaacgaacaactaaatgcttatgctgaattattaataaaaacaggccttgctttgcaaaagggacaggatctagtgatccgaagccccatcgagggaagggacttggtcgtcgcctgtaccgaagcggcctacgcccaaggcgctaacgatgtgcgcgtcatttggtccgacgacgacctcactcttttaaaataccaacacgcgcccgatgatgtattgaacacggtacatgatttcgatacggccttgtaccgccattatattaccggcggcgccgcctttttgtccttcacgggatcggatcccgatttattaaaacaaatcgatccccacaagcttcaagcagcttctatgagccgttcaaaagccatgcgcttttattccgaagccattatgaaggatgaaaatccctggacggtggccggcatcgccaccaaggcatgggcgaagaaagtgtatcccgatgccgacacagaagatgccgtaaaaaatttatggcaggcgattttcgacatgtcccgcgtctctgaaacaaccatcgccgattggaaagaacacacgacgacggtggacggccaggccaaaaagctcaccgaggccgcgtaccgctcccttcactacaaaaacagcttgggaacggatttaacgatcacgctgcccgaaggccatatttgggccggcggcggctctactttgcccgacggtcgctactttgtggcaaatattcctacggaagaagtctttacccttcccctccgcatgggagtcgacggcatcgtctacgcctccatgcccctggcttacaacggcaatgtcatcgatcacttctggttacgatttaaagacgggcaggtcgtggatttcgatgccgaaaaaggaaaagatgtgctggcacggttattggacaccgatgaaggggctcgccacttaggtgaggtggccctcgttccctacgactcgcctatttccaatcgcaaccaattgtttttcaacaccctttacgacgaaaatgcttcctgtcacttggctcttggcaaggcctatcccaccaatttaaagggcggcggcgatttagatcgcgaggctcttttagagcgaggcgccaacgacagtttgatccatgttgacttcatggtaggtacgtcggatctttcgattacggcgacaacattagaaggagatgaagtgcccatatttgtagacggcaattgggcataaaaaggaccccgtaaggtgcccaaaacaaaacccccggcttaaccgggggcttttaaatacaagaaaagcttccgaaaaatcggaagcttttttcttatacttcttcagaagttgcgataacttctttgccatcgtagtaaccacagctcgggcaaatacggtggggcaacttcgcttcgtggcaattggggcactcagcgacagtcgttttattcagacgataagaagatgcacgtctcttgtttttacgttgtttcgaagttttactcttaggtactgccatgtctacacctccctatcttatgctttttcatcgaatagatttttcaaggattcaaaggggctgatgccttccgattcacaatggtgatcgggatgttcgtttaaatcctcaccacagaccgggcaaagtcccttgcaatcatcatcacacaaaaccttgatcggcacggatgttatcacttgcgagaatactatttccgccaaagggaattcatccagagtactgacgagcagaacatttccgtcgtcgtcctcttccccatttgtggtaacgaccacgcgggattcactgtcgatggtttcttccaccgtcttcaaacagcgatcacagggggttttaatgtcgtaggttacgcgaacatcgacttccaaatcgccgtcgactttgtaaatgtccatatcgtagtcgacgggatccacgaaatcgagaccgtccaaatcaagcggactgtcttctttcatcagctgaccctcgacgtgtttgtggatgtcacttccttgtaaaaaatcagaaaattctctacgcaaaggtatcacctctaaaactgctgcaagctattatatgacaagaaatggtctcctgtcaaggaaattaaacgagtttagccgtttccatggcgattttcaattcttcgttggtgggaatgaccaaaacgggaatggaggaatcgtcgcttgagacgacggcttctttgccgcgcatgttgtttttatcgtgatcgagcttaatgcctaaggaagacaagccgtcgataacccgttctctcgtggaaatggagttttcgcctacgccggccgtaaagatgatgccgtcgcagtgatccatttcagttaaataagcgccgatgaatttgcggacgcggttttcgaaaatatccagtgccaattgagcgcgatcgttgcccttttcagctgcttcttccaagtctctgaagtcgctggagacgccgctgatgcctaaaacaccgctctttttgttcatcacattggacatttcgtcggtcgagaggttttctttgtccataatgaagggaacgatggccggatccatgtcgccggtacgggtacccatggccaagccttccaagggggtgaagcccatggtggtgtcgtagcatttaccgccgacgacggcgctgatgctggagccattacctaagtggcaggtaattaagttgacttcatcgagctttttaccgagcatttcagcggcacgtcctgtaatgtattggtggctggtgccgtggaagccgtagcgacgaactttgtatttttcgtagtattcgtagggaagggcataaatgtagtttaatgccggaatggtttggtggaaagccgtgtcgaatacagcgaccatggggatgtcgcccatgatttctttgcaggcttcgataccgataatgttcggcggattgtgcaagggtgcgatttctacattgtcgttaatggctttcataaccttttcgtcgatgatcaccgattcggcaaatgcttcaccgccgtgtacgacgcggtggccgacggcatcgatttcgtctaagctcttaacggcgccgtattcggcgtgtttgagagaatctaagacgattttaagggctgccttgtgatcggcgagcatttcttcgatgacgatttcatctttgccggctgcttcgtattttacgcggccgccttcaatgccgattcgttccgctaagccttttgcgagaaccttcttatcttccatatcgattaactggtatttcaaagaagagctgccacagttaatgactaaaattttcatgtgtttcctccttaagcattttcattttgaccgcagttattatatcatataatcgttctctatcgaagaaaagtgaagaaaaggattgaatcatgccctatgcacttatcgtggcggagatcaaccccctccattacggccatacttatttaatcgagcgggccaaagaaagcggctatggcgtcgtggttttaatgagcgcctcgttcacgcagaggggcctacctgtggtgaccgacaagtttacccgggcccgtgaccttgtggaaaacggcgccgatgtggtaattacccacccggtgcaatcggccacttccggcggcgagtatttttcctacggagccatggccgtggcgagtaaactgccccttgtggacgccgtgttttgcggcacggagttcggcgacgagaccacctttcacgacatttacaactacgaaaaaaccgaacaatttcatacccggcttagggctttcatggagagcggcgcatcctacgccgcagcgtacaagcaggccttggaagtggaaaaaacctcttggggacaggtgtttcaatccaatgccctattggcctacggctattataaaagtttgaagcagctggcaccgcagattcccctcgtcatggtgaagcgcgcctgcgataaggaccgtatacgcaccgcatcggccattcgcgccatgagcgatgtaagggagatgacagaattttgtgccggatccccgcctcagtacagggaaacggagttggcggacgctttataccgattttatcggggcctgtggcttttaactcccatggatctttcgtccatggccggctacgaagtaggattagacaagcgcatactagcttgtatgcgaaaggccgcgacttttcgcgaatttacggagctggtgaagacccgtcgctattcccgctggcgcatcgctcgccttctgctccacgcttctctcgctatggatcaagaatccatcgaggatgccatggccagtcagcagacctttcaggttttggccttttcggaggcgggcaaaaactaccttcggtctgcaaaacaatcctccgttactcttctttccaatttcaaacaagtgaaaaagtcttcccccgatgatcaaaagtttttggcctatgaggaaaaggccacggatctgtggagccttttgaccgccgggaaaatggggcgggactttcggggcttttaagcaaagaaaaaacggcgcgaggccgtttttttaaagctcttttctgttttcgttaatggttttaatcatgtcggacaagtgaacttgggtgttttccaacatgctgtccacgtagtcgcgagccgaaagacgaatttgatccgattccagttcggcgcggttcatgatttctctggcttgttcttgagcggcgagggtaatttcgtcttcatttacaagcttttgtgcttccacatgggccgcctgaatgatttgttttgcctgcatattggcttcgttgacgatttcatccttgcgatcgcgaatgctttgggcttcggctaaatcttgaggaaattgagattcgatttggtttaaaagttcattgacttcttccttatcgaccatcacttttcccgtcaacgggatggtggaactcacttccaataaatctttcaaatcttcgatgtaacgcataacttccataagctaccttcctctcactttcctcttcattgcttctcctaccacttccggcacaaaaagcgacgtgtctccattaaacaaagccacttccctggcgagggaagagctgataaacaaatgctcctgcgtcgtcaacagaaagacggtctccaaattggttccgtaatttttgttggccatggcgacggtgtattcgttttcgaaatccgaattggaccttaaaccccgaaccacagtagaaatgtttctctttttcgcataatccaccaggagtccttcgaagtgatccacttcgatgtccgcctccccgttaagcgtttctcgcaacagcgccagccgctcgtctacggtgaagaagcccggctttttcttattatccaaaacggcgacgacgacctctccgaaaatggcttttgcccgtcggataatatccaagtggccgtaggtgaccgggtcgaaacttccggcgtaaataactttcaaatcctaatcacaactttcataaatccaaatttttttcttaccataggtcttttcccgcaccaaagccaaatgctcgtagtgggaaaaagtatattccttcggcgcctcaaataccaggcgaccgcctgaagacagtagccgatgcgcaccgatggtttgggctgcgcggtcgtaaaaatcacgattcgcatagggaggatcgacgtatatgtagtcgaatgccatctcttcattcacggcaagttcgaggcagtgctcgaatgatccttccactaccctgctcttgtcattataccctgttatctttatattttcacgggtaattcgaatactttctcgatgattatcgcaaaaccacgccgatgttgcgccgcgacttaaaaactcgatgcccatatgaccggttccggaaaataaatccaagactgaaaccccgctaaaggggccgtagaggagattaaacacattttccttaatgcgatcttccgtgggccgtatgcgatcgcctttcggcgtctttaatcgttgtccttttttctctcccgcaatgacgcgcatggccacttcccttcaaattttagcataatctctttcctataacaattatatcccttgggttcgcgcctcgtaggcctccaccgcctttaaaagatccggttcttcctctgcattgaggtgtccgccctgtaagatggcatcggcctccactttggcgtagcgcataatgtccatgttctcgaacagatcgccgacgcgaaattccacggtgccggattgccgtgtgccgaagaaatcgccgccgccacggagcttcatgtcttcttcggcgatgtagaagccgtcattggagcgttccataatgcggagccgctcgtcggccttcaagctgtcgttggcactgtgcaaaatgcagtaagccgcctgatccccgcggcccacacggccccgaagctgatgcagcgtggcgaggccgaagcggtcggcgtcgtagacaaagagcaaattggcgttgaccacattgacgcctacttcgatcaccgtggtggagattaaaatctgcacttcatttttttggaaggcttccatgaccctgttcttttcctcggaggaaagggcgccgtgcatcagtccgacggcatactttttaaagcgatcctcggaaaaatacttatagatcgcctccgccgcgtgaagggggaaatccgggttttcttcgatgagcgggcagaccacgtaaatctgttgtccgctttttaaaaagcgctccataaaatcgtaggcgttttttaaacccgattcgttaatcaccgtggtctgtacggcttttcgccccttcggcatggttcgaatcgaggagatcttcgtattcccgtacatgacaatgccgaggcttctgggaatgggcgtcgccgtcataatcagacggtcgcttttcgactgcttctcttgcagggcttctcgctgcatgacgccaaagcggtgttgttcatcggtaatggtgaggccgatgcggtcgcttttcaaatcttcgttaaacaaggcgtgggtgccgataatcacgtcgcagattccgctttcgaagttttcgcgaatggtttttttcttgctttccttggtgctccccgtcaaaagctctacccgcacgccgagaggcatgaacaaatcgaaggcctcttcgtagtgctgcttggcgagaatttccgtcggcgccataaaaagggcctgatggccggaggccacacaagtggctatggcgagaaaggcgatgacggttttaccgcttcctacatcgccctgcaccaatcgctccatgcggctcgatgaagccatgtccttgcggatatcgtcccaagcctctttttgccctctcgtaagctcaaagggaagcttcgataaaatcacttccgccaaatcggtttttgccatggaaaagcccgcttcgctcctgctttggtggaagcgtcccaatgccaattgaaaacagagaaattccgaaaaaatcaaagactgcagcgccactttcgcatcccttaactctttcggtccgtgaagcacctgaagggcttccgtctccgtcataagaccgtagcgcttccgcaagtactctggcaccaccgacggcagggccacctcttttagagcctcttgaataaattttgccgtggccttttgccccacgccgcctaatatgggatagatgggagagatggccagcgcttcttttcgcttcgtctcatcgaaaaatttcggtgtggtaaaggacagacgatttttgaaaaactttggttttccgaaaatatagtaatcccctccaaggcgcaaactcttgtccaaatagggcatattgaagaaggtcatttccccttcccgggccccgtcggtaatcacgaaggtctgcatgctcaagcccttttttaaatagcggcgaggctttttctccacgagacgaacgtaataggtggcgggcttgtcgaaatccggatgggcaaaatcccgcatctcactgccgtcttcgtagcgaatcggcaacgtgtacaggaggtcttccaccgtaaatagggatgctttatttaatttttccgcaattttcttgccgattcctttgatctctaaaatactcgaatgtggttccatagggcctccaatgaaaaagcaggcctgcgcctgcttctcactcgactgaaattaaataataataaattggctgctcaccgcgcatgatctcgatgtccatgtcggggaaagcttcatccaagcgttcctccaaggcttcaacgtcctcggcgcttacgtcttctccggcgtagagagagacgaaggcggcgtcctcatccaccatttttttgatcatttcgatggtggtgtcgttcacggattcgccctttgccaagatttttttaccggaaaggccgatgtagtcgccctttttaatggcgatgccgtccatctccgtatcccgtacggcataagtgacttggccggtggttaaatcgtctacggcttccatcatggtttcgacattttcctctacgctcttgtcaggcataaagtgaatgcaggcattgattccttccggaatggagcgcgtctttaatacggtaacttctttttcggatatatccgccgccgcttccgccgcaaggaaaatattgctgttgttaggaagcacgaaaatgtgtttcgcattgacgcggtcgatgccggccaaaatatcttctgttgaaggattcatcgtttgtccgccggtgaccaaatagtctacgccgacttgtcggaaaatttcctcgatgcccttgccggcacatatggagacaaagccgtagggcttcatttcttcaggttccttcgcattggaagcttccacttcatagtcggtaaacagtcgctcggaatgttgcaggcgcatattatcgactttaatgtcttttaaaaagccgtagttcagcgcactttgaatggcgaggccgggatcgttggtgtgaacgtgaaccttaatcatgctgtcgtcgccaacgacgatgaggctgtcgccacggggaattaagtccgctttcaaatcatcgacgtgattggactcggtgttcacgataaattccgtgcagtagccgaatttaatgtcgtcagtggaaatttctctccgttcgattttctccttgccttgaggggatccctcttccataccgcctaagacagcctcgccttttaaggctttcagcgcaccttccataatggtcaccaggccttggcccccggcatcgacgacgccggcttcttttaagacgggaagaagattcggcgtgttagccaaagattcctttgccttctccaagacggcctcgccgaataaaattaaatcgctgtatttcttcgcgtgtttcacggcgaaatcggcactttcgcggcccactgtaaggatggtgccttccgtgggcttcatgacggcgagatacgtcatttccgaagcgcttttcatggctgcggcaaggacgggcacggtgaggacgtcgtggcccttcaggccttcggcaaatcccctgaaaagctgggaaagaataaccccgctgttgccccgagcacccatcagtgcgccgcggctcatttcagcggctaaggcgcccagttccttggcgtcggattcggtcacttgtttcacggcacttttaatggtcttcgacatattggtgcccgtgtccccgtcgggtacggggaagacattgagatcgttgacgtgttctttatttatttctaaaaaattcgaagcactgatcagtgcttccttaaattctgtaatcgtaatctgatccataccctacctctagttcattcgtataccttcgaccaaaacctcgatttgatcgacttctaatcccgtcattgactcgatattaaattgaacggtgtcaataatattttgtcccacggtagaaatgcgaatgccgtattcgatgatgacgtgcaattgaatgtgtacccgttcgttttcagtgtacacttcgattcctctggttaagttttcaaatttaagcaattggaaaattccgtccgtggcatttttgctggccatgcccacgacgccgtagctttccatggcggaaacgcccgcaatggtggcgatgacttgattatctatggtaatattgcccttttcgtttgggatcgtaatttgcatgattcgtctcctttccgctattgggaattaccgtcattatatcacataagcctcccggaaaaaaccgaagcctaattgcattttatttttctctgtggtaaaataattcgagttgaaaaaatgtcggaggaggtgtaagtatggcaaaaagatgtgaaatctgcggaaaagaaaaaaaattcggtaactccatttccttctcccataaaagaggaaatagatcttggtccccgaaccttcaacgcgtccgcgccgttgttaacggatcgaagaaaagaatttacgtatgtacgcgttgcctgagatccggcaaggttgaacgcgccctttaattacgagtcgattcttaggaatcggctttttttatcgctttttttaggaggtaactatgaagctttttatttccagtcgtgtacctgatgaaattatccagcgcttaggcggcatcgattatagctacaacgacagcaatgtccctatgacaaaagaagaaattatcgcggcccttgagggaaaagaggctcttatctgtcccctgtccgataaaatcgatcaagaagtcatcgacggcgcaaaggatctaaaactaattttaaattacggcgccggcttcgacaacatcgacatcgcctatgcacgtgaaaaaggcatcgtcgtctgcaacgcaccggccccctcctccgccgtctccaccgccgaattggcctttgctttaatgctggcacaggcgagacaattgattcgcggcgaaaaggacttaagagatggcggcttccgcggatggcgccccacctatttcctcggccaacaattaaaaggcaagaccttgggtattttcggcatgggaaatatcggacaaaacctggcgaagcgcgcgctggctttcgagatgaaggttatttacaattcgagaacccgtaaagaagccattgaagaattaggcgctacctacgtttctttcgacgaacttttgaaagaatcggatttcatcagcctccactccgcttttgttcccgaactgaaacacaaattcgacgccaatgcatttaaggcaatgaaaaacaccgccaccttcattaacgccgcccgcggtcccttaatcgacgagcaggccttggccgatgcgttaaaagacggaaccatcgccggtgccgccttggatgtctatgaattcgaaccgaaggtcacggaagatcttttgcatctcgacaatgtgaccttggcacctcacctgggcaatgccaccgtggaggctcgcctggaaatgggcaatgcctgcgtcgataacttagaagattttatcgccggcaaaaagccgagaaaccaagtcaattaagtgcaacaaaaaaaagggttctatgtcaaccattggggagtctagtgaaaactaggctcctttttgttttcctacacaccctcactcacttatcttttgaacaaacgaaaagcagtttcgtgcggaaatgatgaaagttacgc
